United States Patent Application Publication US 2011/0183924 A1 - sequence listing, part 98

SEQ ID NO: 308408 - DNA, 8946 bp, Homo sapiens
gtggtgacaagttagaagcgcttgcggaaggtccccgcccccaggatcaggctccccctgcaaggggacgatgcaaaggtaaaagcacctcgctccgcagcatccagacctggaggggctgcgaccacgggccgagcccacccattccccagccaaaggacgggcccgccgctctccatggtactgcggagagctcagctccgcccttctctttcagaaggacagcacccggcgtcacgtaacccagccttctcaggctccaccaccgccttttccttcccagctctttccctctcctccccctcctcctccttcacctcctcctcctcctcctgctcccctccgttgcctgttctcccctcccgcactcctggagatagacgctcaagcctgacgcctctgaaaaggcagcagcagtcgccttatccatagacctcaggaaattcgctttgaccgatgcatgcttcaggctctggctcgagctgaggggaataaccgggcagatgtctgagtccttaaaaaagacaagataaaaccaaaatgcatcaccaacacacaaccaattgatgtgctggcatcttagcttggccctgcagaggcagagagaaaagaagaggagctgttgcgatttccacatctaacagcttctggctatttcgcaactgctgggtttgagtcctactgttgccgtggctgaaaagagaagtaaaatccaacttgtgagaccacgcacaaggaattaggctttggctgcagcggtgctgaagcccatgctatgacagaagaagcaggcctttgaagctatcctcgggttaagaaatggtgccctaaagaggcaagcatccctttctccgttctgctgtaagacaccacatctgaaggagacagacttgaggcattcacaagcatccaaggatactggctcactgctggcttcctgtactttcttgagaaaagtgttttctttttactgactctcactgcttccttttggcctggtaccactggtggaacctggcagataatgggatttgaggagttaagtatctgttgacactgcagatactcttaaattagttaatcagactcaaatgggtcagtgctttcccttgatcttttgttgaagccttttccagaacgttgtctccaaagtgcatcctccctttggtctggaagttctgtggctaccctgtaccactggggtcaacgttttccagttggaagaggactacagggagagagggcggggttattggaagaagaagaagaaaaaaagaactagataaaggagggcacatccctctcactcccgcctttccccttacctttctgtctctcgggacccttatttcttcgtcacggtgtccaggaccattttgaccctgtcggccccggcacccccccgccgcaccccagccccgagcatggggacggcgctgctccagcgcgggggctgttttcttctgtgcctctcgctgctgctcctgggctgctgggcggagctgggcagcgggctggagtttccgggcgccgagggccaatggacgcgcttccccaagtggaacgcctgctgcgagagcgagatgagcttccagctcaagactcgcagcgcccgcggcctcgtgctctacttcgacgacgagggcttctgcgacttcctggagctgattctgacgcgcggcggccgcctgcagctcagcttctccatcttctgcgctgagcctgcgacgctcctggccgacacgccggttaacgacggcgcctggcacagcgtgcgcatccgccgccagttccgcaacaccacgctcttcatcgaccaggtggaggccaagtgggtggaggtcaagtccaagcgcagggacatgacggtgttcagcggccttttcgtcggggggctgcccccggaactgcgcgccgcggcgctcaagctcaccctggcctcggtgagggagcgggagcccttcaaggggtggattcgtgacgtgagggtcaactcctcgcaggtcctgcccgtggacagcggcgaggtgaagctggacgatgagccgcccaacagcggcgggggaagcccgtgcgaggcgggcgaggagggcgagggcggggtgtgcctcaacggaggtgtgtgctccgtggtggacgaccaggccgtgtgcgactgctcgcgaaccggcttccgcggcaaggactgcagccaagaagacaacaatgtggaaggtctggcgcacctgatgatgggcgaccaaggtaaaagtaaaggaaaagaagaatatattgccacgttcaaaggatctgaatacttctgctacgacttgtctcaaaaccccattcaaagcagcagtgatgaaataactctgtcatttaaaacccttcagaggaatggactgatgcttcacactgggaaatcggctgattatgtcaatcttgccctgaaaaatggagctgtctctctggtcattaatttgggatcaggggcctttgaagcactagtggagcctgtgaatggaaagtttaatgataatgcctggcatgatgtgaaagtcaccaggaatctgcgtcagcactcaggcattggacacgctatggtgacaatatcagtggatgggattcttaccacaacgggctacacgcaagaagattataccatgctggggtctgatgactttttctatgttggaggcagtcccagcacagccgaccttccagggtcaccagtcagtaacaactttatgggctgtctcaaagaggttgtatataaaaataatgatgtgaggctggaattatctcgacttgccaagcaaggagatcctaagatgaagatccatggagtggtggcatttaaatgtgagaatgttgcaactttagacccaatcacctttgaaaccccagagtctttcatctctttgcctaaatggaatgcaaagaaaactggctccatatcatttgatttccgtacaacagagccaaatggcctcatcttatttagccatggcaagccaagacatcagaaagatgccaagcacccacagatgataaaggtggacttctttgctattgagatgctagatggccacctctacctcctcctggacatggggtcaggtactataaaaataaaagccctgttgaagaaagtgaatgatggagaatggtatcatgtggacttccagagagacggacggtcaggtaccatttctgtcaacacgttgcgtactccctacactgctcctggtgagagtgagattctggacctggatgatgagttgtacctgggggggctgccagaaaataaagctggccttgtcttccccaccgaggtgtggactgctctgctcaactatggctacgtgggctgcatcagggatttgttcatcgatggccaaagcaaagatatccggcaaatggctgaagttcaaagtactgctggagtgaagccttcctgctcaaaggaaacagcaaaaccgtgccttagcaacccttgcaaaaacaatggcatgtgcagggatgggtggaacagatatgtctgtgattgttccggaacaggctatcttggcaggtcctgtgagagagaggcaacggttttgagctatgatgggagcatgtttatgaaaattcagctccccgtagtcatgcatacggaggctgaggatgtttccttacggttccgatcccagcgtgcatatggcattctgatggcaaccacttctagagactctgctgacaccctccgcctggagctagacgcaggacgtgtgaaactgacggtcaatctagattgtatcaggattaactgtaattccagcaaaggtcccgagactctttttgctggctataacctcaatgataacgagtggcacacagtgcgtgtagttcggcgtggaaaaagtttaaagttaacagtggatgaccaacaggccatgacaggtcaaatggcaggtgatcatactaggctggagttccataacatagagactggcatcatcacagaacgacggtatctttcttctgtcccctccaacttcattggacacctgcagagcttgacatttaatggaatggcatacattgacctgtgtaaaaatggcgacatagattactgtgagcttaatgccagatttggcttcaggaacatcatagcagatcctgtcaccttcaagaccaaatcgagctatgttgccttagctaccttgcaagcctacacttctatgcatctttttttccagttcaagacaacatccctagatggattaattctatataacagtggggatggaaatgactttattgtggttgaattagttaaagggtacttacattacgtgtttgatttgggaaatggtgctaacctcatcaaaggaagctcaaataaacctctcaatgacaatcagtggcacaacgtgatgatatcaagggacaccagcaacctccacactgtaaagattgacacaaaaatcacaacgcaaatcaccgccggagccaggaacttagacctcaagagtgacttatatataggaggagtagctaaagaaacatacaaatccttaccaaaacttgtacatgccaaagaaggctttcaaggctgcctggcatcagttgatttaaatggacggcttccggacctcatctccgatgctcttttctgcaacggacagatcgagagaggatgtgaagggcccagcacaacctgccaagaggactcatgttccaatcaaggtgtgtgcttgcaacaatgggatggcttcagctgtgactgtagtatgacttccttcagtggaccactctgcaatgaccctgggacgacatatatctttagcaaaggtggtggacaaatcacgtataagtggcctcctaatgaccgacccagtacgcgagcagacagactggccataggttttagcactgttcagaaagaagctgtattggtgcgagtggacagttcttcaggcttgggtgactacctagaactgcatatacaccagggaaaaattggagttaagtttaatgttgggacagatgacatcgccattgaagaatccaatgcaatcattaatgatgggaaataccatgtagttcgtttcacgaggagtggtggcaatgccacgttgcaggtggacagctggccagtgatcgagcgctaccctgcagggcgtcagctcacaatcttcaatagccaagcaaccataataattggcgggaaagagcagggccagcccttccagggccagctctctgggctgtactacaatggcttgaaagttctgaatatggcagccgaaaacgatgccaacatcgccatagtgggaaatgtgagactggttggtgaagtgccttcctctatgacaactgagtcaacagccactgccatgcaatcagagatgtccacatcaattatggagactaccacgaccctggctactagcacagccagaagaggaaagcccccgacaaaagaacccattagccagaccacagatgacatccttgtggcctcagcagagtgtcccagcgatgatgaggacattgacccctgtgagccgagctcaggtgggttagccaacccaacccgagcaggcggcagagagccgtatccaggctcagcagaagtgatccgggagtccagcagcaccacgggtatggtcgttgggatagtagccgctgccgccctgtgcatccttatcctcctctatgccatgtacaagtacagaaaccgggatgaaggctcataccatgtggacgagagtcgaaactacatcagtaactcagcacagtccaatggggctgttgtaaaggagaaacaacccagcagtgcgaaaagctccaacaaaaataagaaaaacaaggataaagagtattatgtctgatcccaagatcttaaatggacacttgtatagaaatagtcttcattttatctgagacataatataaacttatttactttcctttttatgaagcacatacaaaagaagacagggaatgcaatcaggaaggaaagactttttaaaaaataaaaacaagtatctcatgctcttgtttctcaaaaaagaaaaacaaaaaacaaaaaacaggggccaataaattccctaacatccacagtgttttcatttactctgcttgtctttatgttgctggaacatttctaaaagacagtgatgaccgcacgcattcataaagcaaaggagtactacagcatcaaggcacaacacaaaaaccaacacaaaacataacacaaaaaagaagctacctatgatcctggatttagccaaagtgctagcgctttcctgagaagtcagtccaattgccagagaagactgtccttttgagtgactcaacctgcaaacctttaagagtttgccgcctggtgcaactggagcagtggttggaacttgcatttgaaacaaagtgctggcttttttgaagacttgtgtaggaacacattcaaaaagcccctttctggttgtgagagaggaaaaaaaagtatggaggccttattttcaaaaatgtgaaatataaggcacgttttcacacaaaatttcaaaacaaaaacaagagggcatagatgcaatcattgggaaattttcatgcacgcttattatgttattacatatgtttatataaaatccatctctgtgtgctttctggactgtgataagtgacgttttatagcctgttgtatagaaaatgcaaaatatatctctgctcttcagccatttttggtaaattcaatgttataagtgttgctaagtatagggagttttatgacatcagagcaacaattatttcagttgggtttttctttttttttgccaccattataaattgccacaattacttacttttattttttaaagaaattacagtgtagtgtttattctaaggaagatatgtatgaatgtatatacaaagactcagctacttcttttcttatatgtacagccttcattctgttgcaattaagttttagtacttgtatgaaaggtgtgaattagaaagtcacatatatacatatgtatcttataatcttttctccctgaaatactcacattcccacatacattcactattttcacacacacacacacacacacacacacacacacacgaatccacagcaatccatcagatatgctggaagatccaaacgtgcatacagtagcaaatatttattgacaaattgaaaagcaggaaggaagagggttgtgccaaggtattgatgacaaatggggtgatttgcttcattgagatcttgctcccaggtaaccttaagaagattttagtccctaaagaaatgaacctttccttatcaaatagaatatcactgatatactgctgcatgaataagaaccattatgtgggcaggttatggaagcaaaattggttaatctacaccttaactctggctgctgcaattgaaaactttctttctaataaaataatatatatatctctgaatctgatgtgcatgatgaacatttctggaaagtaaacactttctctcgactaagaaagtatttttcagtaatttttgattctgtattactacccacttaaaaaatcattctctgttaattattgactatgttttaacttttctggttttacatatatatcattaaatatagttttagtttaacacattaagtagtggaaaagtatagattatacacttgttttgcatattattcaatgatgttcacagcaataaattactaatatgagaaggtagtgcaaaaaatgcattattacattgcaagttgatgtttcaggaaaaattggttgcattacttgaataccttctaaaagaacgataaaaaattttgtagaagagaagaatatctttccaattagctttaatcagcaaaggcaaaaaatgcaaaacatcttttgtgatactttagttgatgaaaaaaaagccaagaagtggcctgggatttcagacatacagcaccttagaaatatgtataattcatagcaaatcaccactatctatggttgccaagtaattgttgtgtacaaaggaaatttaggtggctttttatgacccagaaagtaggaaggtattaaaatgaaaatttaatatccattgcttcttttctagattttcattttttttaatttgccacattaaataattcacgagtcttttcttttcccccgtctcattcagtcttactcagggaaagccagttaaataagaagggaagtgtaaaactactaatttacagcttgaagggtttttttttttaagattgcttttctattttatctattaagcttgaaccagtttccatctggaaagattctaaaatataatagaaaataaattgaataatggtaattttaagcagtatatctatgaaatgtgttgtttgggattgatttcaatgtttctccccagcgtaaattttaaagttacatgcaatgattgatatagtttattatcagcaaaattatttctaatattattggcttacacaaactctagcaaaaattattttttcctcaatggaaaaagaaaagagaggaacagagttagaaagagaaaatgacttgaatcccaagtatcttcataccaaacatatcagggttccctgcatagtttgcagttgattgaggatttcacacgacttggcataaatttgattacatctctagactgtaacttttctgattgattatgcttcttttttatccatgtaatgtgttgccttttttaaaagaacaaatactacaataacgtgtgaagtggtcaatccctaagacatcaaagaaaggccacataaccctacccttctagtgctttgtgtgattgggtatcaaaggggttttcttcttctttttttgtttgtttgtttttctgttgcaaggccaatttatccattattggaaatgctaagcaagtggaatttactgttttgttaataaaatatttcttaatacaaaaaaaaaaaa

SEQ ID NO: 308409 - DNA, 5223 bp, Homo sapiens
  misc_feature (864)..(864): n is a, c, g, or t
  misc_feature (942)..(942): n is a, c, g, or t
cttttttctttttctttttctttttctgtttctctcccttactccttcgtctgcatcttcttctcagctgcctttccgccgttcgattcccacttccttcagaagggcgcactcttccctctgaacccctcgccgggcgtaagtgtcaggaggcggcggacgcggagattgcctcgggagcaggcgatgcgcgccgctgctccgcgcgctgcccgggggaggctggcgctagcgggcgagccggccggggctgaatggagggaaggggcgcctggattccatggggtctgcttctgtcttgaaaggaggttgggccggcgaagtggcctccctagtccccgcacacaaagctaaatggatttacctagtggattcgcggtggatgtctgtcatgtagaagtgaggaccttccaggaggagctttaaacaatttctcggccccccacccgccggcacgcactctcgcccgaaactctttgggagtatctctcgagaacctggagccctggaaatctgggagcagccacccgctccgcgcttgctgttcccggggctgcctttccggacaagcccctctccagctgcattcgcctcggctatgtttcggattgtttggggtgctaggcacggcggactccaggaccccgagaagactgtccgaaggagggagaggatgggtgccctggcgcggtgaggcggccggcccctcagcccactccgcgccgcccgctcccctgcgccctctcctctccccgcgccccaaactttgcctcccgcggcggctgcccctcggcgggcgccccgccatgtaccagaggatgctccggtgcggcgccgagctgggctcgcccgggggcggcggcngcggcggcggcggcggcggcgcaggggggcgcctggccctgctttggatagtcccgctcaccctcagcggcctcctangagtggcgtggggggcatccagtttgggagcgcaccacatccaccatttccatggcagcagcaagcatcattcagtgcctattgcaatctacaggtcaccggcatccttgcgaggcggacacgctgggacgacatatatctttagcaaaggtggtggacaaatcacgtataagtggcctcctaatgaccgacccagtacgcgagcagacagactggccataggttttagcactgttcagaaagaagctgtattggtgcgagtggacagttcttcaggcttgggtgactacctagaactgcatatacaccagggaaaaattggagttaagtttaatgttgggacagatgacatcgccattgaagaatccaatgcaatcattaatgatgggaaataccatgtagttcgtttcacgaggagtggtggcaatgccacgttgcaggtggacagctggccagtgatcgagcgctaccctgcagggcgtcagctcacaatcttcaatagccaagcaaccataataattggcgggaaagagcagggccagcccttccagggccagctctctgggctgtactacaatggcttgaaagttctgaatatggcagccgaaaacgatgccaacatcgccatagtgggaaatgtgagactggttggtgaagtgccttcctctatgacaactgagtcaacagccactgccatgcaatcagagatgtccacatcaattatggagactaccacgaccctggctactagcacagccagaagaggaaagcccccgacaaaagaacccattagccagaccacagatgacatccttgtggcctcagcagagtgtcccagcgatgatgaggacattgacccctgtgagccgagctcaggtgggttagccaacccaacccgagcaggcggcagagagccgtatccaggctcagcagaagtgatccgggagtccagcagcaccacgggtatggtcgttgggatagtagccgctgccgccctgtgcatccttatcctcctctatgccatgtacaagtacagaaaccgggatgaaggctcataccatgtggacgagagtcgaaactacatcagtaactcagcacagtccaatggggctgttgtaaaggagaaacaacccagcagtgcgaaaagctccaacaaaaataagaaaaacaaggataaagagtattatgtctgatcccaagatcttaaatggacacttgtatagaaatagtcttcattttatctgagacataatataaacttatttactttcctttttatgaagcacatacaaaagaagacagggaatgcaatcaggaaggaaagactttttaaaaaataaaaacaagtatctcatgctcttgtttctcaaaaaagaaaaacaaaaaacaaaaaacaggggccaataaattccctaacatccacagtgttttcatttactctgcttgtctttatgttgctggaacatttctaaaagacagtgatgaccgcacgcattcataaagcaaaggagtactacagcatcaaggcacaacacaaaaaccaacacaaaacataacacaaaaaagaagctacctatgatcctggatttagccaaagtgctagcgctttcctgagaagtcagtccaattgccagagaagactgtccttttgagtgactcaacctgcaaacctttaagagtttgccgcctggtgcaactggagcagtggttggaacttgcatttgaaacaaagtgctggcttttttgaagacttgtgtaggaacacattcaaaaagcccctttctggttgtgagagaggaaaaaaaagtatggaggccttattttcaaaaatgtgaaatataaggcacgttttcacacaaaatttcaaaacaaaaacaagagggcatagatgcaatcattgggaaattttcatgcacgcttattatgttattacatatgtttatataaaatccatctctgtgtgctttctggactgtgataagtgacgttttatagcctgttgtatagaaaatgcaaaatatatctctgctcttcagccatttttggtaaattcaatgttataagtgttgctaagtatagggagttttatgacatcagagcaacaattatttcagttgggtttttctttttttttgccaccattataaattgccacaattacttacttttattttttaaagaaattacagtgtagtgtttattctaaggaagatatgtatgaatgtatatacaaagactcagctacttcttttcttatatgtacagccttcattctgttgcaattaagttttagtacttgtatgaaaggtgtgaattagaaagtcacatatatacatatgtatcttataatcttttctccctgaaatactcacattcccacatacattcactattttcacacacacacacacacacacacacacacacacacgaatccacagcaatccatcagatatgctggaagatccaaacgtgcatacagtagcaaatatttattgacaaattgaaaagcaggaaggaagagggttgtgccaaggtattgatgacaaatggggtgatttgcttcattgagatcttgctcccaggtaaccttaagaagattttagtccctaaagaaatgaacctttccttatcaaatagaatatcactgatatactgctgcatgaataagaaccattatgtgggcaggttatggaagcaaaattggttaatctacaccttaactctggctgctgcaattgaaaactttctttctaataaaataatatatatatctctgaatctgatgtgcatgatgaacatttctggaaagtaaacactttctctcgactaagaaagtatttttcagtaatttttgattctgtattactacccacttaaaaaatcattctctgttaattattgactatgttttaacttttctggttttacatatatatcattaaatatagttttagtttaacacattaagtagtggaaaagtatagattatacacttgttttgcatattattcaatgatgttcacagcaataaattactaatatgagaaggtagtgcaaaaaatgcattattacattgcaagttgatgtttcaggaaaaattggttgcattacttgaataccttctaaaagaacgataaaaaattttgtagaagagaagaatatctttccaattagctttaatcagcaaaggcaaaaaatgcaaaacatcttttgtgatactttagttgatgaaaaaaaagccaagaagtggcctgggatttcagacatacagcaccttagaaatatgtataattcatagcaaatcaccactatctatggttgccaagtaattgttgtgtacaaaggaaatttaggtggctttttatgacccagaaagtaggaaggtattaaaatgaaaatttaatatccattgcttcttttctagattttcattttttttaatttgccacattaaataattcacgagtcttttcttttcccccgtctcattcagtcttactcagggaaagccagttaaataagaagggaagtgtaaaactactaatttacagcttgaagggtttttttttttaagattgcttttctattttatctattaagcttgaaccagtttccatctggaaagattctaaaatataatagaaaataaattgaataatggtaattttaagcagtatatctatgaaatgtgttgtttgggattgatttcaatgtttctccccagcgtaaattttaaagttacatgcaatgattgatatagtttattatcagcaaaattatttctaatattattggcttacacaaactctagcaaaaattattttttcctcaatggaaaaagaaaagagaggaacagagttagaaagagaaaatgacttgaatcccaagtatcttcataccaaacatatcagggttccctgcatagtttgcagttgattgaggatttcacacgacttggcataaatttgattacatctctagactgtaacttttctgattgattatgcttcttttttatccatgtaatgtgttgccttttttaaaagaacaaatactacaataacgtgtgaagtggtcaatccctaagacatcaaagaaaggccacataaccctacccttctagtgctttgtgtgattgggtatcaaaggggttttcttcttctttttttgtttgtttgtttttctgttgcaaggccaatttatccattattggaaatgctaagcaagtggaatttactgttttgttaataaaatatttcttaatacaaaaaaaaaaaa

SEQ ID NO: 308410 - DNA, 8967 bp, Homo sapiens
gtggtgacaagttagaagcgcttgcggaaggtccccgcccccaggatcaggctccccctgcaaggggacgatgcaaaggtaaaagcacctcgctccgcagcatccagacctggaggggctgcgaccacgggccgagcccacccattccccagccaaaggacgggcccgccgctctccatggtactgcggagagctcagctccgcccttctctttcagaaggacagcacccggcgtcacgtaacccagccttctcaggctccaccaccgccttttccttcccagctctttccctctcctccccctcctcctccttcacctcctcctcctcctcctgctcccctccgttgcctgttctcccctcccgcactcctggagatagacgctcaagcctgacgcctctgaaaaggcagcagcagtcgccttatccatagacctcaggaaattcgctttgaccgatgcatgcttcaggctctggctcgagctgaggggaataaccgggcagatgtctgagtccttaaaaaagacaagataaaaccaaaatgcatcaccaacacacaaccaattgatgtgctggcatcttagcttggccctgcagaggcagagagaaaagaagaggagctgttgcgatttccacatctaacagcttctggctatttcgcaactgctgggtttgagtcctactgttgccgtggctgaaaagagaagtaaaatccaacttgtgagaccacgcacaaggaattaggctttggctgcagcggtgctgaagcccatgctatgacagaagaagcaggcctttgaagctatcctcgggttaagaaatggtgccctaaagaggcaagcatccctttctccgttctgctgtaagacaccacatctgaaggagacagacttgaggcattcacaagcatccaaggatactggctcactgctggcttcctgtactttcttgagaaaagtgttttctttttactgactctcactgcttccttttggcctggtaccactggtggaacctggcagataatgggatttgaggagttaagtatctgttgacactgcagatactcttaaattagttaatcagactcaaatgggtcagtgctttcccttgatcttttgttgaagccttttccagaacgttgtctccaaagtgcatcctccctttggtctggaagttctgtggctaccctgtaccactggggtcaacgttttccagttggaagaggactacagggagagagggcggggttattggaagaagaagaagaaaaaaagaactagataaaggagggcacatccctctcactcccgcctttccccttacctttctgtctctcgggacccttatttcttcgtcacggtgtccaggaccattttgaccctgtcggccccggcacccccccgccgcaccccagccccgagcatggggacggcgctgctccagcgcgggggctgttttcttctgtgcctctcgctgctgctcctgggctgctgggcggagctgggcagcgggctggagtttccgggcgccgagggccaatggacgcgcttccccaagtggaacgcctgctgcgagagcgagatgagcttccagctcaagactcgcagcgcccgcggcctcgtgctctacttcgacgacgagggcttctgcgacttcctggagctgattctgacgcgcggcggccgcctgcagctcagcttctccatcttctgcgctgagcctgcgacgctcctggccgacacgccggttaacgacggcgcctggcacagcgtgcgcatccgccgccagttccgcaacaccacgctcttcatcgaccaggtggaggccaagtgggtggaggtcaagtccaagcgcagggacatgacggtgttcagcggccttttcgtcggggggctgcccccggaactgcgcgccgcggcgctcaagctcaccctggcctcggtgagggagcgggagcccttcaaggggtggattcgtgacgtgagggtcaactcctcgcaggtcctgcccgtggacagcggcgaggtgaagctggacgatgagccgcccaacagcggcgggggaagcccgtgcgaggcgggcgaggagggcgagggcggggtgtgcctcaacggaggtgtgtgctccgtggtggacgaccaggccgtgtgcgactgctcgcgaaccggcttccgcggcaaggactgcagccaagaagacaacaatgtggaaggtctggcgcacctgatgatgggcgaccaaggtaaaagtaaaggaaaagaagaatatattgccacgttcaaaggatctgaatacttctgctacgacttgtctcaaaaccccattcaaagcagcagtgatgaaataactctgtcatttaaaacccttcagaggaatggactgatgcttcacactgggaaatcggctgattatgtcaatcttgccctgaaaaatggagctgtctctctggtcattaatttgggatcaggggcctttgaagcactagtggagcctgtgaatggaaagtttaatgataatgcctggcatgatgtgaaagtcaccaggaatctgcgtcagcactcaggcattggacacgctatggtaaacaaactacattgttcggtgacaatatcagtggatgggattcttaccacaacgggctacacgcaagaagattataccatgctggggtctgatgactttttctatgttggaggcagtcccagcacagccgaccttccagggtcaccagtcagtaacaactttatgggctgtctcaaagaggttgtatataaaaataatgatgtgaggctggaattatctcgacttgccaagcaaggagatcctaagatgaagatccatggagtggtggcatttaaatgtgagaatgttgcaactttagacccaatcacctttgaaaccccagagtctttcatctctttgcctaaatggaatgcaaagaaaactggctccatatcatttgatttccgtacaacagagccaaatggcctcatcttatttagccatggcaagccaagacatcagaaagatgccaagcacccacagatgataaaggtggacttctttgctattgagatgctagatggccacctctacctcctcctggacatggggtcaggtactataaaaataaaagccctgttgaagaaagtgaatgatggagaatggtatcatgtggacttccagagagacggacggtcaggtaccatttctgtcaacacgttgcgtactccctacactgctcctggtgagagtgagattctggacctggatgatgagttgtacctgggggggctgccagaaaataaagctggccttgtcttccccaccgaggtgtggactgctctgctcaactatggctacgtgggctgcatcagggatttgttcatcgatggccaaagcaaagatatccggcaaatggctgaagttcaaagtactgctggagtgaagccttcctgctcaaaggaaacagcaaaaccgtgccttagcaacccttgcaaaaacaatggcatgtgcagggatgggtggaacagatatgtctgtgattgttccggaacaggctatcttggcaggtcctgtgagagagaggcaacggttttgagctatgatgggagcatgtttatgaaaattcagctccccgtagtcatgcatacggaggctgaggatgtttccttacggttccgatcccagcgtgcatatggcattctgatggcaaccacttctagagactctgctgacaccctccgcctggagctagacgcaggacgtgtgaaactgacggtcaatctagattgtatcaggattaactgtaattccagcaaaggtcccgagactctttttgctggctataacctcaatgataacgagtggcacacagtgcgtgtagttcggcgtggaaaaagtttaaagttaacagtggatgaccaacaggccatgacaggtcaaatggcaggtgatcatactaggctggagttccataacatagagactggcatcatcacagaacgacggtatctttcttctgtcccctccaacttcattggacacctgcagagcttgacatttaatggaatggcatacattgacctgtgtaaaaatggcgacatagattactgtgagcttaatgccagatttggcttcaggaacatcatagcagatcctgtcaccttcaagaccaaatcgagctatgttgccttagctaccttgcaagcctacacttctatgcatctttttttccagttcaagacaacatccctagatggattaattctatataacagtggggatggaaatgactttattgtggttgaattagttaaagggtacttacattacgtgtttgatttgggaaatggtgctaacctcatcaaaggaagctcaaataaacctctcaatgacaatcagtggcacaacgtgatgatatcaagggacaccagcaacctccacactgtaaagattgacacaaaaatcacaacgcaaatcaccgccggagccaggaacttagacctcaagagtgacttatatataggaggagtagctaaagaaacatacaaatccttaccaaaacttgtacatgccaaagaaggctttcaaggctgcctggcatcagttgatttaaatggacggcttccggacctcatctccgatgctcttttctgcaacggacagatcgagagaggatgtgaagggcccagcacaacctgccaagaggactcatgttccaatcaaggtgtgtgcttgcaacaatgggatggcttcagctgtgactgtagtatgacttccttcagtggaccactctgcaatgaccctgggacgacatatatctttagcaaaggtggtggacaaatcacgtataagtggcctcctaatgaccgacccagtacgcgagcagacagactggccataggttttagcactgttcagaaagaagctgtattggtgcgagtggacagttcttcaggcttgggtgactacctagaactgcatatacaccagggaaaaattggagttaagtttaatgttgggacagatgacatcgccattgaagaatccaatgcaatcattaatgatgggaaataccatgtagttcgtttcacgaggagtggtggcaatgccacgttgcaggtggacagctggccagtgatcgagcgctaccctgcagggcgtcagctcacaatcttcaatagccaagcaaccataataattggcgggaaagagcagggccagcccttccagggccagctctctgggctgtactacaatggcttgaaagttctgaatatggcagccgaaaacgatgccaacatcgccatagtgggaaatgtgagactggttggtgaagtgccttcctctatgacaactgagtcaacagccactgccatgcaatcagagatgtccacatcaattatggagactaccacgaccctggctactagcacagccagaagaggaaagcccccgacaaaagaacccattagccagaccacagatgacatccttgtggcctcagcagagtgtcccagcgatgatgaggacattgacccctgtgagccgagctcaggtgggttagccaacccaacccgagcaggcggcagagagccgtatccaggctcagcagaagtgatccgggagtccagcagcaccacgggtatggtcgttgggatagtagccgctgccgccctgtgcatccttatcctcctctatgccatgtacaagtacagaaaccgggatgaaggctcataccatgtggacgagagtcgaaactacatcagtaactcagcacagtccaatggggctgttgtaaaggagaaacaacccagcagtgcgaaaagctccaacaaaaataagaaaaacaaggataaagagtattatgtctgatcccaagatcttaaatggacacttgtatagaaatagtcttcattttatctgagacataatataaacttatttactttcctttttatgaagcacatacaaaagaagacagggaatgcaatcaggaaggaaagactttttaaaaaataaaaacaagtatctcatgctcttgtttctcaaaaaagaaaaacaaaaaacaaaaaacaggggccaataaattccctaacatccacagtgttttcatttactctgcttgtctttatgttgctggaacatttctaaaagacagtgatgaccgcacgcattcataaagcaaaggagtactacagcatcaaggcacaacacaaaaaccaacacaaaacataacacaaaaaagaagctacctatgatcctggatttagccaaagtgctagcgctttcctgagaagtcagtccaattgccagagaagactgtccttttgagtgactcaacctgcaaacctttaagagtttgccgcctggtgcaactggagcagtggttggaacttgcatttgaaacaaagtgctggcttttttgaagacttgtgtaggaacacattcaaaaagcccctttctggttgtgagagaggaaaaaaaagtatggaggccttattttcaaaaatgtgaaatataaggcacgttttcacacaaaatttcaaaacaaaaacaagagggcatagatgcaatcattgggaaattttcatgcacgcttattatgttattacatatgtttatataaaatccatctctgtgtgctttctggactgtgataagtgacgttttatagcctgttgtatagaaaatgcaaaatatatctctgctcttcagccatttttggtaaattcaatgttataagtgttgctaagtatagggagttttatgacatcagagcaacaattatttcagttgggtttttctttttttttgccaccattataaattgccacaattacttacttttattttttaaagaaattacagtgtagtgtttattctaaggaagatatgtatgaatgtatatacaaagactcagctacttcttttcttatatgtacagccttcattctgttgcaattaagttttagtacttgtatgaaaggtgtgaattagaaagtcacatatatacatatgtatcttataatcttttctccctgaaatactcacattcccacatacattcactattttcacacacacacacacacacacacacacacacacacgaatccacagcaatccatcagatatgctggaagatccaaacgtgcatacagtagcaaatatttattgacaaattgaaaagcaggaaggaagagggttgtgccaaggtattgatgacaaatggggtgatttgcttcattgagatcttgctcccaggtaaccttaagaagattttagtccctaaagaaatgaacctttccttatcaaatagaatatcactgatatactgctgcatgaataagaaccattatgtgggcaggttatggaagcaaaattggttaatctacaccttaactctggctgctgcaattgaaaactttctttctaataaaataatatatatatctctgaatctgatgtgcatgatgaacatttctggaaagtaaacactttctctcgactaagaaagtatttttcagtaatttttgattctgtattactacccacttaaaaaatcattctctgttaattattgactatgttttaacttttctggttttacatatatatcattaaatatagttttagtttaacacattaagtagtggaaaagtatagattatacacttgttttgcatattattcaatgatgttcacagcaataaattactaatatgagaaggtagtgcaaaaaatgcattattacattgcaagttgatgtttcaggaaaaattggttgcattacttgaataccttctaaaagaacgataaaaaattttgtagaagagaagaatatctttccaattagctttaatcagcaaaggcaaaaaatgcaaaacatcttttgtgatactttagttgatgaaaaaaaagccaagaagtggcctgggatttcagacatacagcaccttagaaatatgtataattcatagcaaatcaccactatctatggttgccaagtaattgttgtgtacaaaggaaatttaggtggctttttatgacccagaaagtaggaaggtattaaaatgaaaatttaatatccattgcttcttttctagattttcattttttttaatttgccacattaaataattcacgagtcttttcttttcccccgtctcattcagtcttactcagggaaagccagttaaataagaagggaagtgtaaaactactaatttacagcttgaagggtttttttttttaagattgcttttctattttatctattaagcttgaaccagtttccatctggaaagattctaaaatataatagaaaataaattgaataatggtaattttaagcagtatatctatgaaatgtgttgtttgggattgatttcaatgtttctccccagcgtaaattttaaagttacatgcaatgattgatatagtttattatcagcaaaattatttctaatattattggcttacacaaactctagcaaaaattattttttcctcaatggaaaaagaaaagagaggaacagagttagaaagagaaaatgacttgaatcccaagtatcttcataccaaacatatcagggttccctgcatagtttgcagttgattgaggatttcacacgacttggcataaatttgattacatctctagactgtaacttttctgattgattatgcttcttttttatccatgtaatgtgttgccttttttaaaagaacaaatactacaataacgtgtgaagtggtcaatccctaagacatcaaagaaaggccacataaccctacccttctagtgctttgtgtgattgggtatcaaaggggttttcttcttctttttttgtttgtttgtttttctgttgcaaggccaatttatccattattggaaatgctaagcaagtggaatttactgttttgttaataaaatatttcttaatacaaaaaaaaaaaa

SEQ ID NO: 308411 - DNA, 8909 bp, Homo sapiens
gtggtgacaagttagaagcgcttgcggaaggtccccgcccccaggatcaggctccccctgcaaggggacgatgcaaaggtaaaagcacctcgctccgcagcatccagacctggaggggctgcgaccacgggccgagcccacccattccccagccaaaggacgggcccgccgctctccatggtactgcggagagctcagctccgcccttctctttcagaaggacagcacccggcgtcacgtaacccagccttctcaggctccaccaccgccttttccttcccagctctttccctctcctccccctcctcctccttcacctcctcctcctcctcctgctcccctccgttgcctgttctcccctcccgcactcctggagatagacgctcaagcctgacgcctctgaaaaggcagcagcagtcgccttatccatagacctcaggaaattcgctttgaccgatgcatgcttcaggctctggctcgagctgaggggaataaccgggcagatgtctgagtccttaaaaaagacaagataaaaccaaaatgcatcaccaacacacaaccaattgatgtgctggcatcttagcttggccctgcagaggcagagagaaaagaagaggagctgttgcgatttccacatctaacagcttctggctatttcgcaactgctgggtttgagtcctactgttgccgtggctgaaaagagaagtaaaatccaacttgtgagaccacgcacaaggaattaggctttggctgcagcggtgctgaagcccatgctatgacagaagaagcaggcctttgaagctatcctcgggttaagaaatggtgccctaaagaggcaagcatccctttctccgttctgctgtaagacaccacatctgaaggagacagacttgaggcattcacaagcatccaaggatactggctcactgctggcttcctgtactttcttgagaaaagtgttttctttttactgactctcactgcttccttttggcctggtaccactggtggaacctggcagataatgggatttgaggagttaagtatctgttgacactgcagatactcttaaattagttaatcagactcaaatgggtcagtgctttcccttgatcttttgttgaagccttttccagaacgttgtctccaaagtgcatcctccctttggtctggaagttctgtggctaccctgtaccactggggtcaacgttttccagttggaagaggactacagggagagagggcggggttattggaagaagaagaagaaaaaaagaactagataaaggagggcacatccctctcactcccgcctttccccttacctttctgtctctcgggacccttatttcttcgtcacggtgtccaggaccattttgaccctgtcggccccggcacccccccgccgcaccccagccccgagcatggggacggcgctgctccagcgcgggggctgttttcttctgtgcctctcgctgctgctcctgggctgctgggcggagctgggcagcgggctggagtttccgggcgccgagggccaatggacgcgcttccccaagtggaacgcctgctgcgagagcgagatgagcttccagctcaagactcgcagcgcccgcggcctcgtgctctacttcgacgacgagggcttctgcgacttcctggagctgattctgacgcgcggcggccgcctgcagctcagcttctccatcttctgcgctgagcctgcgacgctcctggccgacacgccggttaacgacggcgcctggcacagcgtgcgcatccgccgccagttccgcaacaccacgctcttcatcgaccaggtggaggccaagtgggtggaggtcaagtccaagcgcagggacatgacggtgttcagcggccttttcgtcggggggctgcccccggaactgcgcgccgcggcgctcaagctcaccctggcctcggtgagggagcgggagcccttcaaggggtggattcgtgacgtgagggtcaactcctcgcaggtcctgcccgtggacagcggcgaggtgaagctggacgatgagccgcccaacagcggcgggggaagcccgtgcgaggcgggcgaggagggcgagggcggggtgtgcctcaacggaggtgtgtgctccgtggtggacgaccaggccgtgtgcgactgctcgcgaaccggcttccgcggcaaggactgcagccaagaagacaacaatgtggaaggtctggcgcacctgatgatgggcgaccaaggtaaaagtaaaggaaaagaagaatatattgccacgttcaaaggatctgaatacttctgctacgacttgtctcaaaaccccattcaaagcagcagtgatgaaataactctgtcatttaaaacccttcagaggaatggactgatgcttcacactgggaaatcggctgattatgtcaatcttgccctgaaaaatggagctgtctctctggtcattaatttgggatcaggggcctttgaagcactagtggagcctgtgaatggaaagtttaatgataatgcctggcatgatgtgaaagtcaccaggaatctgcgtcagcactcaggcattggacacgctatggtaaacaaactacattgttcggtgacaatatcagtggatgggattcttaccacaacgggctacacgcaagaagattataccatgctggggtctgatgactttttctatgttggaggcagtcccagcacagccgaccttccagggtcaccagtcagtaacaactttatgggctgtctcaaagaggttgtatataaaaataatgatgtgaggctggaattatctcgacttgccaagcaaggagatcctaagatgaagatccatggagtggtggcatttaaatgtgagaatgttgcaactttagacccaatcacctttgaaaccccagagtctttcatctctttgcctaaatggaatgcaaagaaaactggctccatatcatttgatttccgtacaacagagccaaatggcctcatcttatttagccatggcaagccaagacatcagaaagatgccaagcacccacagatgataaaggtggacttctttgctattgagatgctagatggccacctctacctcctcctggacatggggtcaggtactataaaaataaaagccctgttgaagaaagtgaatgatggagaatggtatcatgtggacttccagagagacggacggtcaggtaccatttctgtcaacacgttgcgtactccctacactgctcctggtgagagtgagattctggacctggatgatgagttgtacctgggggggctgccagaaaataaagctggccttgtcttccccaccgaggtgtggactgctctgctcaactatggctacgtgggctgcatcagggatttgttcatcgatggccaaagcaaagatatccggcaaatggctgaagttcaaagtactgctggagtgaagccttcctgctcaaaggaaacagcaaaaccgtgccttagcaacccttgcaaaaacaatggcatgtgcagggatgggtggaacagatatgtctgtgattgttccggaacaggctatcttggcaggtcctgtgagagagaggcaacggttttgagctatgatgggagcatgtttatgaaaattcagctccccgtagtcatgcatacggaggctgaggatgtttccttacggttccgatcccagcgtgcatatggcattctgatggcaaccacttctagagactctgctgacaccctccgcctggagctagacgcaggacgtgtgaaactgacggtcaatctagattgtatcaggattaactgtaattccagcaaaggtcccgagactctttttgctggctataacctcaatgataacgagtggcacacagtgcgtgtagttcggcgtggaaaaagtttaaagttaacagtggatgaccaacaggccatgacaggtcaaatggcaggtgatcatactaggctggagttccataacatagagactggcatcatcacagaacgacggtatctttcttctgtcccctccaacttcattggacacctgcagagcttgacatttaatggaatggcatacattgacctgtgtaaaaatggcgacatagattactgtgagcttaatgccagatttggcttcaggaacatcatagcagatcctgtcaccttcaagaccaaatcgagctatgttgccttagctaccttgcaagcctacacttctatgcatctttttttccagttcaagacaacatccctagatggattaattctatataacagtggggatggaaatgactttattgtggttgaattagttaaagggtacttacattacgtgtttgatttgggaaatggtgctaacctcatcaaaggaagctcaaataaacctctcaatgacaatcagtggcacaacgtgatgatatcaagggacaccagcaacctccacactgtaaagattgacacaaaaatcacaacgcaaatcaccgccggagccaggaacttagacctcaagagtgacttatatataggaggagtagctaaagaaacatacaaatccttaccaaaacttgtacatgccaaagaaggctttcaaggctgcctggcatcagttgatttaaatggacggcttccggacctcatctccgatgctcttttctgcaacggacagatcgagagaggatgtgaagggcccagcacaacctgccaagaggactcatgttccaatcaaggtgtgtgcttgcaacaatgggatggcttcagctgtgactgtagtatgacttccttcagtggaccactctgcaatgaccctgggacgacatatatctttagcaaaggtggtggacaaatcacgtataagtggcctcctaatgaccgacccagtacgcgagcagacagactggccataggttttagcactgttcagaaagaagctgtattggtgcgagtggacagttcttcaggcttgggtgactacctagaactgcatatacaccagggaaaaattggagttaagtttaatgttgggacagatgacatcgccattgaagaatccaatgcaatcattaatgatgggaaataccatgtagttcgtttcacgaggagtggtggcaatgccacgttgcaggtggacagctggccagtgatcgagcgctaccctgcagggcgtcagctcacaatcttcaatagccaagcaaccataataattggcgggaaagagcagggccagcccttccagggccagctctctgggctgtactacaatggcttgaaagttctgaatatggcagccgaaaacgatgccaacatcgccatagtgggaaatgtgagactggttggtgaagtgccttcctctatgacaactgagtcaacagccactgccatgcaatcagagatgtccacatcaattatggagactaccacgaccctggctactagcacagccagaagaggaaagcccccgacaaaagaacccattagccagaccacagatgacatccttgtggcctcagcagagtgtcccagcgatgatgaggacattgacccctgtgagccgagctcaggtgggttagccaacccaacccgagcaggcggcagagagccgtatccaggctcagcagaagtgatccgggagtccagcagcaccacgggtatggtcgttgggatagtagccgctgccgccctgtgcatccttatcctcctctatgccatgtacaagtacagaaaccgggatgaaggctcataccatgtggacgagagtcgaaactacatcagtaactcagcacagtccaatggggctgttgtaaaggagaaacaacccagcagtgcgaaaagctccaacaaaaataagaaaaacaaggataaagagtattatgtctgatcccaagatcttaaatggacacttgtatagaaatagtcttcattttatctgagacataatataaacttatttactttcctttttatgaagcacatacaaaagaagacagggaatgcaatcaggaaggaaagactttttaaaaaataaaaacaagtatctcatgctcttgtttctcaaaaaagaaaaacaaaaaacaaaaaacaggggccaataaattccctaacatccacagtgttttcatttactctgcttgtctttatgttgctggaacatttctaaaagacagtgatgaccgcacgcattcataaagcaaaggagtactacagcatcaaggcacaacacaaaaaccaacacaaaacataacacaaaaaagaagctacctatgatcctggatttagccaaagtgctagcgctttcctgagaagtcagtccaattgccagagaagactgtccttttgagtgactcaacctgcaaacctttaagagtttgccgcctggtgcaactggagcagtggttggaacttgcatttgaaacaaagtgctggcttttttgaagacttgtgtaggaacacattcaaaaagcccctttctggttgtgagagaggcaaaatttcaaaacaaaaacaagagggcatagatgcaatcattgggaaattttcatgcacgcttattatgttattacatatgtttatataaaatccatctctgtgtgctttctggactgtgataagtgacgttttatagcctgttgtatagaaaatgcaaaatatatctctgctcttcagccatttttggtaaattcaatgttataagtgttgctaagtatagggagttttatgacatcagagcaacaattatttcagttgggtttttctttttttttgccaccattataaattgccacaattacttacttttattttttaaagaaattacagtgtagtgtttattctaaggaagatatgtatgaatgtatatacaaagactcagctacttcttttcttatatgtacagccttcattctgttgcaattaagttttagtacttgtatgaaaggtgtgaattagaaagtcacatatatacatatgtatcttataatcttttctccctgaaatactcacattcccacatacattcactattttcacacacacacacacacacacacacacacacacacgaatccacagcaatccatcagatatgctggaagatccaaacgtgcatacagtagcaaatatttattgacaaattgaaaagcaggaaggaagagggttgtgccaaggtattgatgacaaatggggtgatttgcttcattgagatcttgctcccaggtaaccttaagaagattttagtccctaaagaaatgaacctttccttatcaaatagaatatcactgatatactgctgcatgaataagaaccattatgtgggcaggttatggaagcaaaattggttaatctacaccttaactctggctgctgcaattgaaaactttctttctaataaaataatatatatatctctgaatctgatgtgcatgatgaacatttctggaaagtaaacactttctctcgactaagaaagtatttttcagtaatttttgattctgtattactacccacttaaaaaatcattctctgttaattattgactatgttttaacttttctggttttacatatatatcattaaatatagttttagtttaacacattaagtagtggaaaagtatagattatacacttgttttgcatattattcaatgatgttcacagcaataaattactaatatgagaaggtagtgcaaaaaatgcattattacattgcaagttgatgtttcaggaaaaattggttgcattacttgaataccttctaaaagaacgataaaaaattttgtagaagagaagaatatctttccaattagctttaatcagcaaaggcaaaaaatgcaaaacatcttttgtgatactttagttgatgaaaaaaaagccaagaagtggcctgggatttcagacatacagcaccttagaaatatgtataattcatagcaaatcaccactatctatggttgccaagtaattgttgtgtacaaaggaaatttaggtggctttttatgacccagaaagtaggaaggtattaaaatgaaaatttaatatccattgcttcttttctagattttcattttttttaatttgccacattaaataattcacgagtcttttcttttcccccgtctcattcagtcttactcagggaaagccagttaaataagaagggaagtgtaaaactactaatttacagcttgaagggtttttttttttaagattgcttttctattttatctattaagcttgaaccagtttccatctggaaagattctaaaatataatagaaaataaattgaataatggtaattttaagcagtatatctatgaaatgtgttgtttgggattgatttcaatgtttctccccagcgtaaattttaaagttacatgcaatgattgatatagtttattatcagcaaaattatttctaatattattggcttacacaaactctagcaaaaattattttttcctcaatggaaaaagaaaagagaggaacagagttagaaagagaaaatgacttgaatcccaagtatcttcataccaaacatatcagggttccctgcatagtttgcagttgattgaggatttcacacgacttggcataaatttgattacatctctagactgtaacttttctgattgattatgcttcttttttatccatgtaatgtgttgccttttttaaaagaacaaatactacaataacgtgtgaagtggtcaatccctaagacatcaaagaaaggccacataaccctacccttctagtgctttgtgtgattgggtatcaaaggggttttcttcttctttttttgtttgtttgtttttctgttgcaaggccaatttatccattattggaaatgctaagcaagtggaatttactgttttgttaataaaatatttcttaatacaaaaaaaaaaaa

SEQ ID NO: 308412 - DNA, 3524 bp, Homo sapiens
aacttatggagaacaggccaaaacccaaataagaaaacaaaccacagatgacatccttgtggcctcagcagagtgtcccagcgatgatgaggacattgacccctgtgagccgagctcaggtgggttagccaacccaacccgagcaggcggcagagagccgtatccaggctcagcagaagtgatccgggagtccagcagcaccacgggtatggtcgttgggatagtagccgctgccgccctgtgcatccttatcctcctctatgccatgtacaagtacagaaaccgggatgaaggctcataccatgtggacgagagtcgaaactacatcagtaactcagcacagtccaatggggctgttgtaaaggagaaacaacccagcagtgcgaaaagctccaacaaaaataagaaaaacaaggataaagagtattatgtctgatcccaagatcttaaatggacacttgtatagaaatagtcttcattttatctgagacataatataaacttatttactttcctttttatgaagcacatacaaaagaagacagggaatgcaatcaggaaggaaagactttttaaaaaataaaaacaagtatctcatgctcttgtttctcaaaaaagaaaaacaaaaaacaaaaaacaggggccaataaattccctaacatccacagtgttttcatttactctgcttgtctttatgttgctggaacatttctaaaagacagtgatgaccgcacgcattcataaagcaaaggagtactacagcatcaaggcacaacacaaaaaccaacacaaaacataacacaaaaaagaagctacctatgatcctggatttagccaaagtgctagcgctttcctgagaagtcagtccaattgccagagaagactgtccttttgagtgactcaacctgcaaacctttaagagtttgccgcctggtgcaactggagcagtggttggaacttgcatttgaaacaaagtgctggcttttttgaagacttgtgtaggaacacattcaaaaagcccctttctggttgtgagagaggaaaaaaaagtatggaggccttattttcaaaaatgtgaaatataaggcacgttttcacacaaaatttcaaaacaaaaacaagagggcatagatgcaatcattgggaaattttcatgcacgcttattatgttattacatatgtttatataaaatccatctctgtgtgctttctggactgtgataagtgacgttttatagcctgttgtatagaaaatgcaaaatatatctctgctcttcagccatttttggtaaattcaatgttataagtgttgctaagtatagggagttttatgacatcagagcaacaattatttcagttgggtttttctttttttttgccaccattataaattgccacaattacttacttttattttttaaagaaattacagtgtagtgtttattctaaggaagatatgtatgaatgtatatacaaagactcagctacttcttttcttatatgtacagccttcattctgttgcaattaagttttagtacttgtatgaaaggtgtgaattagaaagtcacatatatacatatgtatcttataatcttttctccctgaaatactcacattcccacatacattcactattttcacacacacacacacacacacacacacacacacacgaatccacagcaatccatcagatatgctggaagatccaaacgtgcatacagtagcaaatatttattgacaaattgaaaagcaggaaggaagagggttgtgccaaggtattgatgacaaatggggtgatttgcttcattgagatcttgctcccaggtaaccttaagaagattttagtccctaaagaaatgaacctttccttatcaaatagaatatcactgatatactgctgcatgaataagaaccattatgtgggcaggttatggaagcaaaattggttaatctacaccttaactctggctgctgcaattgaaaactttctttctaataaaataatatatatatctctgaatctgatgtgcatgatgaacatttctggaaagtaaacactttctctcgactaagaaagtatttttcagtaatttttgattctgtattactacccacttaaaaaatcattctctgttaattattgactatgttttaacttttctggttttacatatatatcattaaatatagttttagtttaacacattaagtagtggaaaagtatagattatacacttgttttgcatattattcaatgatgttcacagcaataaattactaatatgagaaggtagtgcaaaaaatgcattattacattgcaagttgatgtttcaggaaaaattggttgcattacttgaataccttctaaaagaacgataaaaaattttgtagaagagaagaatatctttccaattagctttaatcagcaaaggcaaaaaatgcaaaacatcttttgtgatactttagttgatgaaaaaaaagccaagaagtggcctgggatttcagacatacagcaccttagaaatatgtataattcatagcaaatcaccactatctatggttgccaagtaattgttgtgtacaaaggaaatttaggtggctttttatgacccagaaagtaggaaggtattaaaatgaaaatttaatatccattgcttcttttctagattttcattttttttaatttgccacattaaataattcacgagtcttttcttttcccccgtctcattcagtcttactcagggaaagccagttaaataagaagggaagtgtaaaactactaatttacagcttgaagggtttttttttttaagattgcttttctattttatctattaagcttgaaccagtttccatctggaaagattctaaaatataatagaaaataaattgaataatggtaattttaagcagtatatctatgaaatgtgttgtttgggattgatttcaatgtttctccccagcgtaaattttaaagttacatgcaatgattgatatagtttattatcagcaaaattatttctaatattattggcttacacaaactctagcaaaaattattttttcctcaatggaaaaagaaaagagaggaacagagttagaaagagaaaatgacttgaatcccaagtatcttcataccaaacatatcagggttccctgcatagtttgcagttgattgaggatttcacacgacttggcataaatttgattacatctctagactgtaacttttctgattgattatgcttcttttttatccatgtaatgtgttgccttttttaaaagaacaaatactacaataacgtgtgaagtggtcaatccctaagacatcaaagaaaggccacataaccctacccttctagtgctttgtgtgattgggtatcaaaggggttttcttcttctttttttgtttgtttgtttttctgttgcaaggccaatttatccattattggaaatgctaagcaagtggaatttactgttttgttaataaaatatttcttaatacaaaaaaaaaaaa

SEQ ID NO: 308413 - DNA, 3636 bp, Homo sapiens
agcgggagtcaggagctctcctgtcaccagtattgatttcagaggatggactaaatttcctaggatttccattaagaattaagaaaaaagctctaagcacgcagggtagccagacagacatggatatgagatggcactgtgaaaactcgcagaccacagatgacatccttgtggcctcagcagagtgtcccagcgatgatgaggacattgacccctgtgagccgagctcaggtgggttagccaacccaacccgagcaggcggcagagagccgtatccaggctcagcagaagtgatccgggagtccagcagcaccacgggtatggtcgttgggatagtagccgctgccgccctgtgcatccttatcctcctctatgccatgtacaagtacagaaaccgggatgaaggctcataccatgtggacgagagtcgaaactacatcagtaactcagcacagtccaatggggctgttgtaaaggagaaacaacccagcagtgcgaaaagctccaacaaaaataagaaaaacaaggataaagagtattatgtctgatcccaagatcttaaatggacacttgtatagaaatagtcttcattttatctgagacataatataaacttatttactttcctttttatgaagcacatacaaaagaagacagggaatgcaatcaggaaggaaagactttttaaaaaataaaaacaagtatctcatgctcttgtttctcaaaaaagaaaaacaaaaaacaaaaaacaggggccaataaattccctaacatccacagtgttttcatttactctgcttgtctttatgttgctggaacatttctaaaagacagtgatgaccgcacgcattcataaagcaaaggagtactacagcatcaaggcacaacacaaaaaccaacacaaaacataacacaaaaaagaagctacctatgatcctggatttagccaaagtgctagcgctttcctgagaagtcagtccaattgccagagaagactgtccttttgagtgactcaacctgcaaacctttaagagtttgccgcctggtgcaactggagcagtggttggaacttgcatttgaaacaaagtgctggcttttttgaagacttgtgtaggaacacattcaaaaagcccctttctggttgtgagagaggaaaaaaaagtatggaggccttattttcaaaaatgtgaaatataaggcacgttttcacacaaaatttcaaaacaaaaacaagagggcatagatgcaatcattgggaaattttcatgcacgcttattatgttattacatatgtttatataaaatccatctctgtgtgctttctggactgtgataagtgacgttttatagcctgttgtatagaaaatgcaaaatatatctctgctcttcagccatttttggtaaattcaatgttataagtgttgctaagtatagggagttttatgacatcagagcaacaattatttcagttgggtttttctttttttttgccaccattataaattgccacaattacttacttttattttttaaagaaattacagtgtagtgtttattctaaggaagatatgtatgaatgtatatacaaagactcagctacttcttttcttatatgtacagccttcattctgttgcaattaagttttagtacttgtatgaaaggtgtgaattagaaagtcacatatatacatatgtatcttataatcttttctccctgaaatactcacattcccacatacattcactattttcacacacacacacacacacacacacacacacacacgaatccacagcaatccatcagatatgctggaagatccaaacgtgcatacagtagcaaatatttattgacaaattgaaaagcaggaaggaagagggttgtgccaaggtattgatgacaaatggggtgatttgcttcattgagatcttgctcccaggtaaccttaagaagattttagtccctaaagaaatgaacctttccttatcaaatagaatatcactgatatactgctgcatgaataagaaccattatgtgggcaggttatggaagcaaaattggttaatctacaccttaactctggctgctgcaattgaaaactttctttctaataaaataatatatatatctctgaatctgatgtgcatgatgaacatttctggaaagtaaacactttctctcgactaagaaagtatttttcagtaatttttgattctgtattactacccacttaaaaaatcattctctgttaattattgactatgttttaacttttctggttttacatatatatcattaaatatagttttagtttaacacattaagtagtggaaaagtatagattatacacttgttttgcatattattcaatgatgttcacagcaataaattactaatatgagaaggtagtgcaaaaaatgcattattacattgcaagttgatgtttcaggaaaaattggttgcattacttgaataccttctaaaagaacgataaaaaattttgtagaagagaagaatatctttccaattagctttaatcagcaaaggcaaaaaatgcaaaacatcttttgtgatactttagttgatgaaaaaaaagccaagaagtggcctgggatttcagacatacagcaccttagaaatatgtataattcatagcaaatcaccactatctatggttgccaagtaattgttgtgtacaaaggaaatttaggtggctttttatgacccagaaagtaggaaggtattaaaatgaaaatttaatatccattgcttcttttctagattttcattttttttaatttgccacattaaataattcacgagtcttttcttttcccccgtctcattcagtcttactcagggaaagccagttaaataagaagggaagtgtaaaactactaatttacagcttgaagggtttttttttttaagattgcttttctattttatctattaagcttgaaccagtttccatctggaaagattctaaaatataatagaaaataaattgaataatggtaattttaagcagtatatctatgaaatgtgttgtttgggattgatttcaatgtttctccccagcgtaaattttaaagttacatgcaatgattgatatagtttattatcagcaaaattatttctaatattattggcttacacaaactctagcaaaaattattttttcctcaatggaaaaagaaaagagaggaacagagttagaaagagaaaatgacttgaatcccaagtatcttcataccaaacatatcagggttccctgcatagtttgcagttgattgaggatttcacacgacttggcataaatttgattacatctctagactgtaacttttctgattgattatgcttcttttttatccatgtaatgtgttgccttttttaaaagaacaaatactacaataacgtgtgaagtggtcaatccctaagacatcaaagaaaggccacataaccctacccttctagtgctttgtgtgattgggtatcaaaggggttttcttcttctttttttgtttgtttgtttttctgttgcaaggccaatttatccattattggaaatgctaagcaagtggaatttactgttttgttaataaaatatttcttaatacaaaaaaaaaaaa

SEQ ID NO: 308414 - DNA, 3532 bp, Homo sapiens
tccacgatgattgtaagtttcctgaggcctccgtagccctgcggaactaccacagatgacatccttgtggcctcagcagagtgtcccagcgatgatgaggacattgacccctgtgagccgagctcaggtgggttagccaacccaacccgagcaggcggcagagagccgtatccaggctcagcagaagtgatccgggagtccagcagcaccacgggtatggtcgttgggatagtagccgctgccgccctgtgcatccttatcctcctctatgccatgtacaagtacagaaaccgggatgaaggctcataccatgtggacgagagtcgaaactacatcagtaactcagcacagtccaatggggctgttgtaaaggagaaacaacccagcagtgcgaaaagctccaacaaaaataagaaaaacaaggataaagagtattatgtctgatcccaagatcttaaatggacacttgtatagaaatagtcttcattttatctgagacataatataaacttatttactttcctttttatgaagcacatacaaaagaagacagggaatgcaatcaggaaggaaagactttttaaaaaataaaaacaagtatctcatgctcttgtttctcaaaaaagaaaaacaaaaaacaaaaaacaggggccaataaattccctaacatccacagtgttttcatttactctgcttgtctttatgttgctggaacatttctaaaagacagtgatgaccgcacgcattcataaagcaaaggagtactacagcatcaaggcacaacacaaaaaccaacacaaaacataacacaaaaaagaagctacctatgatcctggatttagccaaagtgctagcgctttcctgagaagtcagtccaattgccagagaagactgtccttttgagtgactcaacctgcaaacctttaagagtttgccgcctggtgcaactggagcagtggttggaacttgcatttgaaacaaagtgctggcttttttgaagacttgtgtaggaacacattcaaaaagcccctttctggttgtgagagaggaaaaaaaagtatggaggccttattttcaaaaatgtgaaatataaggcacgttttcacacaaaatttcaaaacaaaaacaagagggcatagatgcaatcattgggaaattttcatgcacgcttattatgttattacatatgtttatataaaatccatctctgtgtgctttctggactgtgataagtgacgttttatagcctgttgtatagaaaatgcaaaatatatctctgctcttcagccatttttggtaaattcaatgttataagtgttgctaagtatagggagttttatgacatcagagcaacaattatttcagttgggtttttctttttttttgccaccattataaattgccacaattacttacttttattttttaaagaaattacagtgtagtgtttattctaaggaagatatgtatgaatgtatatacaaagactcagctacttcttttcttatatgtacagccttcattctgttgcaattaagttttagtacttgtatgaaaggtgtgaattagaaagtcacatatatacatatgtatcttataatcttttctccctgaaatactcacattcccacatacattcactattttcacacacacacacacacacacacacacacacacacgaatccacagcaatccatcagatatgctggaagatccaaacgtgcatacagtagcaaatatttattgacaaattgaaaagcaggaaggaagagggttgtgccaaggtattgatgacaaatggggtgatttgcttcattgagatcttgctcccaggtaaccttaagaagattttagtccctaaagaaatgaacctttccttatcaaatagaatatcactgatatactgctgcatgaataagaaccattatgtgggcaggttatggaagcaaaattggttaatctacaccttaactctggctgctgcaattgaaaactttctttctaataaaataatatatatatctctgaatctgatgtgcatgatgaacatttctggaaagtaaacactttctctcgactaagaaagtatttttcagtaatttttgattctgtattactacccacttaaaaaatcattctctgttaattattgactatgttttaacttttctggttttacatatatatcattaaatatagttttagtttaacacattaagtagtggaaaagtatagattatacacttgttttgcatattattcaatgatgttcacagcaataaattactaatatgagaaggtagtgcaaaaaatgcattattacattgcaagttgatgtttcaggaaaaattggttgcattacttgaataccttctaaaagaacgataaaaaattttgtagaagagaagaatatctttccaattagctttaatcagcaaaggcaaaaaatgcaaaacatcttttgtgatactttagttgatgaaaaaaaagccaagaagtggcctgggatttcagacatacagcaccttagaaatatgtataattcatagcaaatcaccactatctatggttgccaagtaattgttgtgtacaaaggaaatttaggtggctttttatgacccagaaagtaggaaggtattaaaatgaaaatttaatatccattgcttcttttctagattttcattttttttaatttgccacattaaataattcacgagtcttttcttttcccccgtctcattcagtcttactcagggaaagccagttaaataagaagggaagtgtaaaactactaatttacagcttgaagggtttttttttttaagattgcttttctattttatctattaagcttgaaccagtttccatctggaaagattctaaaatataatagaaaataaattgaataatggtaattttaagcagtatatctatgaaatgtgttgtttgggattgatttcaatgtttctccccagcgtaaattttaaagttacatgcaatgattgatatagtttattatcagcaaaattatttctaatattattggcttacacaaactctagcaaaaattattttttcctcaatggaaaaagaaaagagaggaacagagttagaaagagaaaatgacttgaatcccaagtatcttcataccaaacatatcagggttccctgcatagtttgcagttgattgaggatttcacacgacttggcataaatttgattacatctctagactgtaacttttctgattgattatgcttcttttttatccatgtaatgtgttgccttttttaaaagaacaaatactacaataacgtgtgaagtggtcaatccctaagacatcaaagaaaggccacataaccctacccttctagtgctttgtgtgattgggtatcaaaggggttttcttcttctttttttgtttgtttgtttttctgttgcaaggccaatttatccattattggaaatgctaagcaagtggaatttactgttttgttaataaaatatttcttaatacaaaaaaaaaaaa

SEQ ID NO: 308415 - DNA, 4846 bp, Homo sapiens
gtggtgacaagttagaagcgcttgcggaaggtccccgcccccaggatcaggctccccctgcaaggggacgatgcaaaggtaaaagcacctcgctccgcagcatccagacctggaggggctgcgaccacgggccgagcccacccattccccagccaaaggacgggcccgccgctctccatggtactgcggagagctcagctccgcccttctctttcagaaggacagcacccggcgtcacgtaacccagccttctcaggctccaccaccgccttttccttcccagctctttccctctcctccccctcctcctccttcacctcctcctcctcctcctgctcccctccgttgcctgttctcccctcccgcactcctggagatagacgctcaagcctgacgcctctgaaaaggcagcagcagtcgccttatccatagacctcaggaaattcgctttgaccgatgcatgcttcaggctctggctcgagctgaggggaataaccgggcagatgtctgagtccttaaaaaagacaagataaaaccaaaatgcatcaccaacacacaaccaattgatgtgctggcatcttagcttggccctgcagaggcagagagaaaagaagaggagctgttgcgatttccacatctaacagcttctggctatttcgcaactgctgggtttgagtcctactgttgccgtggctgaaaagagaagtaaaatccaacttgtgagaccacgcacaaggaattaggctttggctgcagcggtgctgaagcccatgctatgacagaagaagcaggcctttgaagctatcctcgggttaagaaatggtgccctaaagaggcaagcatccctttctccgttctgctgtaagacaccacatctgaaggagacagacttgaggcattcacaagcatccaaggatactggctcactgctggcttcctgtactttcttgagaaaagtgttttctttttactgactctcactgcttccttttggcctggtaccactggtggaacctggcagataatgggatttgaggagttaagtatctgttgacactgcagatactcttaaattagttaatcagactcaaatgggtcagtgctttcccttgatcttttgttgaagccttttccagaacgttgtctccaaagtgcatcctccctttggtctggaagttctgtggctaccctgtaccactggggtcaacgttttccagttggaagaggactacagggagagagggcggggttattggaagaagaagaagaaaaaaagaactagataaaggagggcacatccctctcactcccgcctttccccttacctttctgtctctcgggacccttatttcttcgtcacggtgtccaggaccattttgaccctgtcggccccggcacccccccgccgcaccccagccccgagcatggggacggcgctgctccagcgcgggggctgttttcttctgtgcctctcgctgctgctcctgggctgctgggcggagctgggcagcgggctggagtttccgggcgccgagggccaatggacgcgcttccccaagtggaacgcctgctgcgagagcgagatgagcttccagctcaagactcgcagcgcccgcggcctcgtgctctacttcgacgacgagggcttctgcgacttcctggagctgattctgacgcgcggcggccgcctgcagctcagcttctccatcttctgcgctgagcctgcgacgctcctggccgacacgccggttaacgacggcgcctggcacagcgtgcgcatccgccgccagttccgcaacaccacgctcttcatcgaccaggtggaggccaagtgggtggaggtcaagtccaagcgcagggacatgacggtgttcagcggccttttcgtcggggggctgcccccggaactgcgcgccgcggcgctcaagctcaccctggcctcggtgagggagcgggagcccttcaaggggtggattcgtgacgtgagggtcaactcctcgcaggtcctgcccgtggacagcggcgaggtgaagctggacgatgagccgcccaacagcggcgggggaagcccgtgcgaggcgggcgaggagggcgagggcggggtgtgcctcaacggaggtgtgtgctccgtggtggacgaccaggccgtgtgcgactgctcgcgaaccggcttccgcggcaaggactgcagccaagaagacaacaatgtggaaggtctggcgcacctgatgatgggcgaccaaggtaaaagtaaaggaaaagaagaatatattgccacgttcaaaggatctgaatacttctgctacgacttgtctcaaaaccccattcaaagcagcagtgatgaaataactctgtcatttaaaacccttcagaggaatggactgatgcttcacactgggaaatcggctgattatgtcaatcttgccctgaaaaatggagctgtctctctggtcattaatttgggatcaggggcctttgaagcactagtggagcctgtgaatggaaagtttaatgataatgcctggcatgatgtgaaagtcaccaggaatctgcgtcagcactcaggcattggacacgctatggtaaacaaactacattgttcggtgacaatatcagtggatgggattcttaccacaacgggctacacgcaagaagattataccatgctggggtctgatgactttttctatgttggaggcagtcccagcacagccgaccttccagggtcaccagtcagtaacaactttatgggctgtctcaaagaggttgtatataaaaataatgatgtgaggctggaattatctcgacttgccaagcaaggagatcctaagatgaagatccatggagtggtggcatttaaatgtgagaatgttgcaactttagacccaatcacctttgaaaccccagagtctttcatctctttgcctaaatggaatgcaaagaaaactggctccatatcatttgatttccgtacaacagagccaaatggcctcatcttatttagccatggcaagccaagacatcagaaagatgccaagcacccacagatgataaaggtggacttctttgctattgagatgctagatggccacctctacctcctcctggacatggggtcaggtactataaaaataaaagccctgttgaagaaagtgaatgatggagaatggtatcatgtggacttccagagagacggacggtcaggtaccatttctgtcaacacgttgcgtactccctacactgctcctggtgagagtgagattctggacctggatgatgagttgtacctgggggggctgccagaaaataaagctggccttgtcttccccaccgaggtgtggactgctctgctcaactatggctacgtgggctgcatcagggatttgttcatcgatggccaaagcaaagatatccggcaaatggctgaagttcaaagtactgctggagtgaagccttcctgctcaaaggaaacagcaaaaccgtgccttagcaacccttgcaaaaacaatggcatgtgcagggatgggtggaacagatatgtctgtgattgttccggaacaggctatcttggcaggtcctgtgagagagaggcaacggttttgagctatgatgggagcatgtttatgaaaattcagctccccgtagtcatgcatacggaggctgaggatgtttccttacggttccgatcccagcgtgcatatggcattctgatggcaaccacttctagagactctgctgacaccctccgcctggagctagacgcaggacgtgtgaaactgacggtcaatctagattgtatcaggattaactgtaattccagcaaaggtcccgagactctttttgctggctataacctcaatgataacgagtggcacacagtgcgtgtagttcggcgtggaaaaagtttaaagttaacagtggatgaccaacaggccatgacaggtcaaatggcaggtgatcatactaggctggagttccataacatagagactggcatcatcacagaacgacggtatctttcttctgtcccctccaacttcattggacacctgcagagcttgacatttaatggaatggcatacattgacctgtgtaaaaatggcgacatagattactgtgagcttaatgccagatttggcttcaggaacatcatagcagatcctgtcaccttcaagaccaaatcgagctatgttgccttagctaccttgcaagcctacacttctatgcatctttttttccagttcaagacaacatccctagatggattaattctatataacagtggggatggaaatgactttattgtggttgaattagttaaagggtacttacattacgtgtttgatttgggaaatggtgctaacctcatcaaaggaagctcaaataaacctctcaatgacaatcagtggcacaacgtgatgatatcaagggacaccagcaacctccacactgtaaagattgacacaaaaatcacaacgcaaatcaccgccggagccaggaacttagacctcaagagtgacttatatataggaggagtagctaaagaaacatacaaatccttaccaaaacttgtacatgccaaagaaggctttcaaggctgcctggcatcagttgatttaaatggacggcttccggacctcatctccgatgctcttttctgcaacggacagatcgagagaggatgtgaagggcccagcacaacctgccaagaggactcatgttccaatcaaggtgtgtgcttgcaacaatgggatggcttcagctgtgactgtagtatgacttccttcagtggaccactctgcaatgaccgtaagtacctctctgagtatggactgatactcatcgt

SEQ ID NO: 308416 - DNA, 845 bp, Homo sapiens
  misc_feature (16)..(16): n is a, c, g, or t
agagagagagagaganagagaactagtcacgagtcttttcttttcccccgtctcattcagtcttactcagggaaagccagttaaataagaagggaagtgtaaaactactaatttacagcttgaagggtttttttttttaagattgcttttctattttatctattaagcttgaaccagtttccatctggaaagattctaaaatataatagaaaataaattgaataatggtaattttaagcagtatatctatgaaatgtgttgtttgggattgatttcaatgtttctccccagcgtaaattttaaagttacatgcaatgattgatatagtttattatcagcaaaattatttctaatattattggcttacacaaactctagcaaaaattattttttcctcaatggaaaaagaaaagagaggaacagagttagaaagagaaaatgacttgaatcccaagtatcttcataccaaacatatcagggttccctgcatagtttgcagttgattgaggatttcacacgacttggcataaatttgattacatctctagactgtaacttttctgattgattatgcttcttttttatccatgtaatgtgttgccttttttaaaagaacaaatactacaataacgtgtgaagtggtcaatccctaagacatcaaagaaaggccacataaccctacccttctagtgctttgtgtgattgggtatcaaaggggttttcttcttctttttttgtttgtttgtttttctgttgcaaggccaatttatccattattggaaatgctaagcaagtggaatttactgttttgttaataaaatatttcttaatacaaaaaaaaaaaa

SEQ ID NO: 308417 - DNA, 2362 bp, Homo sapiens
gtggtgacaagttagaagcgcttgcggaaggtccccgcccccaggatcaggctccccctgcaaggggacgatgcaaaggtaaaagcacctcgctccgcagcatccagacctggaggggctgcgaccacgggccgagcccacccattccccagccaaaggacgggcccgccgctctccatggtactgcggagagctcagctccgcccttctctttcagaaggacagcacccggcgtcacgtaacccagccttctcaggctccaccaccgccttttccttcccagctctttccctctcctccccctcctcctccttcacctcctcctcctcctcctgctcccctccgttgcctgttctcccctcccgcactcctggagatagacgctcaagcctgacgcctctgaaaaggcagcagcagtcgccttatccatagacctcaggaaattcgctttgaccgatgcatgcttcaggctctggctcgagctgaggggaataaccgggcagatgtctgagtccttaaaaaagacaagataaaaccaaaatgcatcaccaacacacaaccaattgatgtgctggcatcttagcttggccctgcagaggcagagagaaaagaagaggagctgttgcgatttccacatctaacagcttctggctatttcgcaactgctgggtttgagtcctactgttgccgtggctgaaaagagaagtaaaatccaacttgtgagaccacgcacaaggaattaggctttggctgcagcggtgctgaagcccatgctatgacagaagaagcaggcctttgaagctatcctcgggttaagaaatggtgccctaaagaggcaagcatccctttctccgttctgctgtaagacaccacatctgaaggagacagacttgaggcattcacaagcatccaaggatactggctcactgctggcttcctgtactttcttgagaaaagtgttttctttttactgactctcactgcttccttttggcctggtaccactggtggaacctggcagataatgggatttgaggagttaagtatctgttgacactgcagatactcttaaattagttaatcagactcaaatgggtcagtgctttcccttgatcttttgttgaagccttttccagaacgttgtctccaaagtgcatcctccctttggtctggaagttctgtggctaccctgtaccactggggtcaacgttttccagttggaagaggactacagggagagagggcggggttattggaagaagaagaagaaaaaaagaactagataaaggagggcacatccctctcactcccgcctttccccttacctttctgtctctcgggacccttatttcttcgtcacggtgtccaggaccattttgaccctgtcggccccggcacccccccgccgcaccccagccccgagcatggggacggcgctgctccagcgcgggggctgttttcttctgtgcctctcgctgctgctcctgggctgctgggcggagctgggcagcgggctggagtttccgggcgccgagggccaatggacgcgcttccccaagtggaacgcctgctgcgagagcgagatgagcttccagctcaagactcgcagcgcccgcggcctcgtgctctacttcgacgacgagggcttctgcgacttcctggagctgattctgacgcgcggcggccgcctgcagctcagcttctccatcttctgcgctgagcctgcgacgctcctggccgacacgccggttaacgacggcgcctggcacagcgtgcgcatccgccgccagttccgcaacaccacgctcttcatcgaccaggtggaggccaagtgggtggaggtcaagtccaagcgcagggacatgacggtgttcagcggccttttcgtcggggggctgcccccggaactgcgcgccgcggcgctcaagctcaccctggcctcggtgagggagcgggagcccttcaaggggtggattcgtgacgtgagggtcaactcctcgcaggtcctgcccgtggacagcggcgaggtgaagctggacgatgagccgcccaacagcggcgggggaagcccgtgcgaggcgggcgaggagggcgagggcggggtgtgcctcaacggaggtgtgtgctccgtggtggacgaccaggccgtgtgcgactgctcgcgaaccggcttccgcggcaaggactgcagccaaggtctggcgcacctgatgatgggcgaccaaggtatgggctctgttccttttccactctgctttcagtgttttcttgttctgtagctgctttcaaaccatcactgcaaaggatgggcaaatgcttgcaaattatatggctgcaaattaaatacatatcttttgttcac

SEQ ID NO: 308418 - DNA, 2517 bp, Homo sapiens
gtggtgacaagttagaagcgcttgcggaaggtccccgcccccaggatcaggctccccctgcaaggggacgatgcaaaggtaaaagcacctcgctccgcagcatccagacctggaggggctgcgaccacgggccgagcccacccattccccagccaaaggacgggcccgccgctctccatggtactgcggagagctcagctccgcccttctctttcagaaggacagcacccggcgtcacgtaacccagccttctcaggctccaccaccgccttttccttcccagctctttccctctcctccccctcctcctccttcacctcctcctcctcctcctgctcccctccgttgcctgttctcccctcccgcactcctggagatagacgctcaagcctgacgcctctgaaaaggcagcagcagtcgccttatccatagacctcaggaaattcgctttgaccgatgcatgcttcaggctctggctcgagctgaggggaataaccgggcagatgtctgagtccttaaaaaagacaagataaaaccaaaatgcatcaccaacacacaaccaattgatgtgctggcatcttagcttggccctgcagaggcagagagaaaagaagaggagctgttgcgatttccacatctaacagcttctggctatttcgcaactgctgggtttgagtcctactgttgccgtggctgaaaagagaagtaaaatccaacttgtgagaccacgcacaaggaattaggctttggctgcagcggtgctgaagcccatgctatgacagaagaagcaggcctttgaagctatcctcgggttaagaaatggtgccctaaagaggcaagcatccctttctccgttctgctgtaagacaccacatctgaaggagacagacttgaggcattcacaagcatccaaggatactggctcactgctggcttcctgtactttcttgagaaaagtgttttctttttactgactctcactgcttccttttggcctggtaccactggtggaacctggcagataatgggatttgaggagttaagtatctgttgacactgcagatactcttaaattagttaatcagactcaaatgggtcagtgctttcccttgatcttttgttgaagccttttccagaacgttgtctccaaagtgcatcctccctttggtctggaagttctgtggctaccctgtaccactggggtcaacgttttccagttggaagaggactacagggagagagggcggggttattggaagaagaagaagaaaaaaagaactagataaaggagggcacatccctctcactcccgcctttccccttacctttctgtctctcgggacccttatttcttcgtcacggtgtccaggaccattttgaccctgtcggccccggcacccccccgccgcaccccagccccgagcatggggacggcgctgctccagcgcgggggctgttttcttctgtgcctctcgctgctgctcctgggctgctgggcggagctgggcagcgggctggagtttccgggcgccgagggccaatggacgcgcttccccaagtggaacgcctgctgcgagagcgagatgagcttccagctcaagactcgcagcgcccgcggcctcgtgctctacttcgacgacgagggcttctgcgacttcctggagctgattctgacgcgcggcggccgcctgcagctcagcttctccatcttctgcgctgagcctgcgacgctcctggccgacacgccggttaacgacggcgcctggcacagcgtgcgcatccgccgccagttccgcaacaccacgctcttcatcgaccaggtggaggccaagtgggtggaggtcaagtccaagcgcagggacatgacggtgttcagcggccttttcgtcggggggctgcccccggaactgcgcgccgcggcgctcaagctcaccctggcctcggtgagggagcgggagcccttcaaggggtggattcgtgacgtgagggtcaactcctcgcaggtcctgcccgtggacagcggcgaggtgaagctggacgatgagccgcccaacagcggcgggggaagcccgtgcgaggcgggcgaggagggcgagggcggggtgtgcctcaacggaggtgtgtgctccgtggtggacgaccaggccgtgtgcgactgctcgcgaaccggcttccgcggcaaggactgcagccaagaaataaaattcggtcttcagtgtgttttgccggtgctgttacatgacaatgaccaaggaaaatactgttgtataaatacagcaaagcctctaacagaaaaagacaacaatgtggaaggtctggcgcacctgatgatgggcgaccaaggtaaaagtaaagagaaacttgaaattttcagatggataaggaaggacttcactaatttctgactgcagactccagacatatcttcaataaagcaatgcaggagagctatctaatccattctaaattacatatattccctcaagtaagagaataaaaataatgtcactcaaaatg

SEQ ID NO: 308419 - DNA, 3399 bp, Homo sapiens
gtggtgacaagttagaagcgcttgcggaaggtccccgcccccaggatcaggctccccctgcaaggggacgatgcaaaggtaaaagcacctcgctccgcagcatccagacctggaggggctgcgaccacgggccgagcccacccattccccagccaaaggacgggcccgccgctctccatggtactgcggagagctcagctccgcccttctctttcagaaggacagcacccggcgtcacgtaacccagccttctcaggctccaccaccgccttttccttcccagctctttccctctcctccccctcctcctccttcacctcctcctcctcctcctgctcccctccgttgcctgttctcccctcccgcactcctggagatagacgctcaagcctgacgcctctgaaaaggcagcagcagtcgccttatccatagacctcaggaaattcgctttgaccgatgcatgcttcaggctctggctcgagctgaggggaataaccgggcagatgtctgagtccttaaaaaagacaagataaaaccaaaatgcatcaccaacacacaaccaattgatgtgctggcatcttagcttggccctgcagaggcagagagaaaagaagaggagctgttgcgatttccacatctaacagcttctggctatttcgcaactgctgggtttgagtcctactgttgccgtggctgaaaagagaagtaaaatccaacttgtgagaccacgcacaaggaattaggctttggctgcagcggtgctgaagcccatgctatgacagaagaagcaggcctttgaagctatcctcgggttaagaaatggtgccctaaagaggcaagcatccctttctccgttctgctgtaagacaccacatctgaaggagacagacttgaggcattcacaagcatccaaggatactggctcactgctggcttcctgtactttcttgagaaaagtgttttctttttactgactctcactgcttccttttggcctggtaccactggtggaacctggcagataatgggatttgaggagttaagtatctgttgacactgcagatactcttaaattagttaatcagactcaaatgggtcagtgctttcccttgatcttttgttgaagccttttccagaacgttgtctccaaagtgcatcctccctttggtctggaagttctgtggctaccctgtaccactggggtcaacgttttccagttggaagaggactacagggagagagggcggggttattggaagaagaagaagaaaaaaagaactagataaaggagggcacatccctctcactcccgcctttccccttacctttctgtctctcgggacccttatttcttcgtcacggtgtccaggaccattttgaccctgtcggccccggcacccccccgccgcaccccagccccgagcatggggacggcgctgctccagcgcgggggctgttttcttctgtgcctctcgctgctgctcctgggctgctgggcggagctgggcagcgggctggagtttccgggcgccgagggccaatggacgcgcttccccaagtggaacgcctgctgcgagagcgagatgagcttccagctcaagactcgcagcgcccgcggcctcgtgctctacttcgacgacgagggcttctgcgacttcctggagctgattctgacgcgcggcggccgcctgcagctcagcttctccatcttctgcgctgagcctgcgacgctcctggccgacacgccggttaacgacggcgcctggcacagcgtgcgcatccgccgccagttccgcaacaccacgctcttcatcgaccaggtggaggccaagtgggtggaggtcaagtccaagcgcagggacatgacggtgttcagcggccttttcgtcggggggctgcccccggaactgcgcgccgcggcgctcaagctcaccctggcctcggtgagggagcgggagcccttcaaggggtggattcgtgacgtgagggtcaactcctcgcaggtcctgcccgtggacagcggcgaggtgaagctggacgatgagccgcccaacagcggcgggggaagcccgtgcgaggcgggcgaggagggcgagggcggggtgtgcctcaacggaggtgtgtgctccgtggtggacgaccaggccgtgtgcgactgctcgcgaaccggcttccgcggcaaggactgcagccaagaagacaacaatgtggaaggtctggcgcacctgatgatgggcgaccaaggtaaaagtaaaggaaaagaagaatatattgccacgttcaaaggatctgaatacttctgctacgacttgtctcaaaaccccattcaaagcagcagtgatgaaataactctgtcatttaaaacccttcagaggaatggactgatgcttcacactgggaaatcggctgattatgtcaatcttgccctgaaaaatggagctgtctctctggtcattaatttgggatcaggggcctttgaagcactagtggagcctgtgaatggaaagtttaatgataatgcctggcatgatgtgaaagtcaccaggaatctgcgtcagcactcaggcattggacacgctatggtaaacaaactacattgttcggtgacaatatcagtggatgggattcttaccacaacgggctacacgcaagaagattataccatgctggggtctgatgactttttctatgttggaggcagtcccagcacagccgaccttccagggtcaccaatccagcatgaaagcacctttgctgaagacccgatgttccagagtcaaacgggacaactttaaattcaatattctactattgtttatgtaggattgggggagggaaacagctcatagatcattatgaaggaattaggttcctcttctttattagtctgtaagtaatttacatttgagatttgtgtggacagttgatattagctataaaagaaagtcaaaccaaaaagagatactgggtctaaagttgagctaaatggtttacttgcttatttctacttaaatgccataggtgttatgcatacagtgatgacttttttgagtattaaaagaaaaaagaagaaaaagcaattagcctataggagaagcaacgactatgtaattcaaaacaaaactaaaacaaaataagtctatataatgacataattttcttcccttattttcaacacattctggaggaagtaaatgttatctggtgaatttacttgatatttatctgagcaagatcatcaaactaaatgacatcaataatttcatccctcattatcagctgtagttgtgtattgtaactttgtataagattggaatttgttgggttttggggagagaaagatgaagaagtccctgaatttcattttttaatgaatattttccataaaagctgtcttta

SEQ ID NO: 308420 - DNA, 2334 bp, Homo sapiens
gtggtgacaagttagaagcgcttgcggaaggtccccgcccccaggatcaggctccccctgcaaggggacgatgcaaaggtaaaagcacctcgctccgcagcatccagacctggaggggctgcgaccacgggccgagcccacccattccccagccaaaggacgggcccgccgctctccatggtactgcggagagctcagctccgcccttctctttcagaaggacagcacccggcgtcacgtaacccagccttctcaggctccaccaccgccttttccttcccagctctttccctctcctccccctcctcctccttcacctcctcctcctcctcctgctcccctccgttgcctgttctcccctcccgcactcctggagatagacgctcaagcctgacgcctctgaaaaggcagcagcagtcgccttatccatagacctcaggaaattcgctttgaccgatgcatgcttcaggctctggctcgagctgaggggaataaccgggcagatgtctgagtccttaaaaaagacaagataaaaccaaaatgcatcaccaacacacaaccaattgatgtgctggcatcttagcttggccctgcagaggcagagagaaaagaagaggagctgttgcgatttccacatctaacagcttctggctatttcgcaactgctgggtttgagtcctactgttgccgtggctgaaaagagaagtaaaatccaacttgtgagaccacgcacaaggaattaggctttggctgcagcggtgctgaagcccatgctatgacagaagaagcaggcctttgaagctatcctcgggttaagaaatggtgccctaaagaggcaagcatccctttctccgttctgctgtaagacaccacatctgaaggagacagacttgaggcattcacaagcatccaaggatactggctcactgctggcttcctgtactttcttgagaaaagtgttttctttttactgactctcactgcttccttttggcctggtaccactggtggaacctggcagataatgggatttgaggagttaagtatctgttgacactgcagatactcttaaattagttaatcagactcaaatgggtcagtgctttcccttgatcttttgttgaagccttttccagaacgttgtctccaaagtgcatcctccctttggtctggaagttctgtggctaccctgtaccactggggtcaacgttttccagttggaagaggactacagggagagagggcggggttattggaagaagaagaagaaaaaaagaactagataaaggagggcacatccctctcactcccgcctttccccttacctttctgtctctcgggacccttatttcttcgtcacggtgtccaggaccattttgaccctgtcggccccggcacccccccgccgcaccccagccccgagcatggggacggcgctgctccagcgcgggggctgttttcttctgtgcctctcgctgctgctcctgggctgctgggcggagctgggcagcgggctggagtttccgggcgccgagggccaatggacgcgcttccccaagtggaacgcctgctgcgagagcgagatgagcttccagctcaagactcgcagcgcccgcggcctcgtgctctacttcgacgacgagggcttctgcgacttcctggagctgattctgacgcgcggcggccgcctgcagctcagcttctccatcttctgcgctgagcctgcgacgctcctggccgacacgccggttaacgacggcgcctggcacagcgtgcgcatccgccgccagttccgcaacaccacgctcttcatcgaccaggtcctgcccgtggacagcggcgaggtgaagctggacgatgagccgcccaacagcggcgggggaagcccgtgcgaggcgggcgaggagggcgagggcggggtgtgcctcaacggaggtgtgtgctccgtggtggacgaccaggccgtgtgcgactgctcgcgaaccggcttccgcggcaaggactgcagccaagaaataaaattcggtcttcagtgtgttttgccggtgctgttacatgacaatgaccaaggaaaatactgttgtataaatacagcaaagcctctaacagaaaaagacaacaatgtggaaggtctggcgcacctgatgatgggcgaccaaggtaaaagtaaagagaaacttgaaattttcagatggataaggaaggacttcactaatttctgactgcagactccagacatatcttcaataaagcaatgcaggagagctatctaatccattctaaattacatatattccctcaagtaagagaataaaaataatgtcactcaaaatg

SEQ ID NO: 308421 - DNA, 2959 bp, Homo sapiens
gtggtgacaagttagaagcgcttgcggaaggtccccgcccccaggatcaggctccccctgcaaggggacgatgcaaaggtaaaagcacctcgctccgcagcatccagacctggaggggctgcgaccacgggccgagcccacccattccccagccaaaggacgggcccgccgctctccatggtactgcggagagctcagctccgcccttctctttcagaaggacagcacccggcgtcacgtaacccagccttctcaggctccaccaccgccttttccttcccagctctttccctctcctccccctcctcctccttcacctcctcctcctcctcctgctcccctccgttgcctgttctcccctcccgcactcctggagatagacgctcaagcctgacgcctctgaaaaggcagcagcagtcgccttatccatagacctcaggaaattcgctttgaccgatgcatgcttcaggctctggctcgagctgaggggaataaccgggcagatgtctgagtccttaaaaaagacaagataaaaccaaaatgcatcaccaacacacaaccaattgatgtgctggcatcttagcttggccctgcagaggcagagagaaaagaagaggagctgttgcgatttccacatctaacagcttctggctatttcgcaactgctgggtttgagtcctactgttgccgtggctgaaaagagaagtaaaatccaacttgtgagaccacgcacaaggaattaggctttggctgcagcggtgctgaagcccatgctatgacagaagaagcaggcctttgaagctatcctcgggttaagaaatggtgccctaaagaggcaagcatccctttctccgttctgctgtaagacaccacatctgaaggagacagacttgaggcattcacaagcatccaaggatactggctcactgctggcttcctgtactttcttgagaaaagtgttttctttttactgactctcactgcttccttttggcctggtaccactggtggaacctggcagataatgggatttgaggagttaagtatctgttgacactgcagatactcttaaattagttaatcagactcaaatgggtcagtgctttcccttgatcttttgttgaagccttttccagaacgttgtctccaaagtgcatcctccctttggtctggaagttctgtggctaccctgtaccactggggtcaacgttttccagttggaagaggactacagggagagagggcggggttattggaagaagaagaagaaaaaaagaactagataaaggagggcacatccctctcactcccgcctttccccttacctttctgtctctcgggacccttatttcttcgtcacggtgtccaggaccattttgaccctgtcggccccggcacccccccgccgcaccccagccccgagcatggggacggcgctgctccagcgcgggggctgttttcttctgtgcctctcgctgctgctcctgggctgctgggcggagctgggcagcgggctggagtttccgggcgccgagggccaatggacgcgcttccccaagtggaacgcctgctgcgagagcgagatgagcttccagctcaagactcgcagcgcccgcggcctcgtgctctacttcgacgacgagggcttctgcgacttcctggagctgattctgacgcgcggcggccgcctgcagctcagcttctccatcttctgcgctgagcctgcgacgctcctggccgacacgccggttaacgacggcgcctggcacagcgtgcgcatccgccgccagttccgcaacaccacgctcttcatcgaccaggtggaggccaagtgggtggaggtcaagtccaagcgcagggacatgacggtgttcagcggccttttcgtcggggggctgcccccggaactgcgcgccgcggcgctcaagctcaccctggcctcggtgagggagcgggagcccttcaaggggtggattcgtgacgtgagggtcaactcctcgcaggtcctgcccgtggacagcggcgaggtgaagctggacgatgagccgcccaacagcggcgggggaagcccgtgcgaggcgggcgaggagggcgagggcggggtgtgcctcaacggaggtgtgtgctccgtggtggacgaccaggccgtgtgcgactgctcgcgaaccggcttccgcggcaaggactgcagccaagaagacaacaatgtggaaggtctggcgcacctgatgatgggcgaccaaggtaaaagtaaaggaaaagaagaatatattgccacgttcaaaggatctgaatacttctgctacgacttgtctcaaaaccccattcaaagcagcagtgatgaaataactctgtcatttaaaacccttcagaggaatggactgatgcttcacactgggaaatcggctgattatgtcaatcttgccctgaaaaatggagctgtctctctggtcattaatttgggatcaggggcctttgaagcactagtggagcctgtgaatggaaagtttaatgataatgcctggcatgatgtgaaagtcaccaggaatctgcgtcaggtgacaatatcagtggatgggattcttaccacaacgggctacacgcaagaagattataccatgctggggtctgatgactttttctatgttggaggcagtcccagcacagccgaccttccagggtcaccagtcagtaacaactttatgggctgtctcaaagagattaaagaaaaaaaaggaaatcactcaacatattgaaacaacctataatctcatattccttagaagcaacttaggtctttccctatatggcatttaataatgtctatttgaaatgagactttgcttgcacgtagaacaactaaccctcaattggaaagttacttttgtgtatgtgattatcaaatttcaaaataaaataagattagctcaaaataatttggtaaaacctaacctgaact

SEQ ID NO: 308422 - DNA, 791 bp, Homo sapiens
  misc_feature (16)..(16): n is a, c, g, or t
agagagagagagaganagagaactagtcacgagtcttttcttttcccccgtctcattcagtcttactcagggaaagccagttaaataagaagggaagtgtaaaactactaatttacagcttgaagggtttttttttttaagattgcttttctattttatctattaagcttgaaccagtttccatctggaaagattctaaaatataatagaaaataaattgaataatggtaattttaagcagtatatctatgaaatgtgttgtttgggattgatttcaatgtttctccccagcgtaaattttaaagttacatgcaatgattgatatagtttattatcagcaaaattatttctaatattattggcttacacaaactctagcaaaaattattttttcctcaatggaaaaagaaaagagaggaacagagttagaaagagtagtttgcagttgattgaggatttcacacgacttggcataaatttgattacatctctagactgtaacttttctgattgattatgcttcttttttatccatgtaatgtgttgccttttttaaaagaacaaatactacaataacgtgtgaagtggtcaatccctaagacatcaaagaaaggccacataaccctacccttctagtgctttgtgtgattgggtatcaaaggggttttcttcttctttttttgtttgtttgtttttctgttgcaaggccaatttatccattattggaaatgctaagcaagtggaatttactgttttgttaataaaatatttcttaatacaaaaaaaaaaaa

SEQ ID NO: 308423 - DNA, 1719 bp, Homo sapiens
atttagatatgatttaacgtatatgataggatgtgtataggttgtatgcaattactagaacattttctataaaggtcatgaatatctgtggtggatcctggaaccaatggggttgggagggcagcttcaattgttttaaaatgtttcaggccaacagaatatgcttataaatgcttttataacctcatagcttctgtttctttatagttttggcttatttgtaatgtttcctttttctcatgtggtacaaaacatggttatgtaccattacctcttcaactcagccagtggcttggcagtttcccttgtgcagtgtttaaaactgggccacagttttgaatgcagttgtggatattaaaatgaaatagattaggaaagaatagattaagatagaatacagataagaaaataagaaaatatcagccttcatctggcaaagaaaataccagccttcatctggcaaagggcatcatcaggcatcaccaggaggtgctctgtatccataggttccctatctgtgggttccaccaccactgataaaaaatatttggaaaaaaatacaacaatgcaaaataatacaaatttaaaaaaatacaatatatttatgtggtgtttacattgtattcgttattataagtaatctagagatgatttaaagggacgggaagatatatgtaggttatatgtaaatataccattttatataaggaacgtgtatatccatggattttagaatctgtagggattcctggaaccagtcttccatggataccgagggatgactgtattgttctgtgaaatttttgtcccagctacatatttgtatgtatgtatgtttttggtccggtataattgtataatatttcttactatgggttaaacaactttataagacattgtgaggaacctggtatcctctggactagatcattcccgtagacagttccattgtgcacacatagtatttcgttaaaatcaggtgactgtttaaaaattaaaaagattttagataaaaatctagatttttactttctcctgaaatatcagaagatggggtctaaattcacactgaggccaagcagtggtaggctcattttaaagaagggctttctgctctctggtttaccccattgtatactaattagcctggtcttacttttatatattacctgaatagccacttagggcattttgaacacgtggcttgcattgctttgtctttttgaaatccgctgtggcaggcccaaaccttgcctttggtgggcttaagtaaggtctggtttccagtacaaaggcaaaggcaaatgaggattattagtattccattttgccctatggatattctcagtgctttctactggaaactcacaaccaattctgaatatgccacatactgtgtgatttgcccttgctgtccaaccctgttcttgctgccatttaaaaacaatcaggccaggtgtggtggctcatttctgtaatcccagcactttgggaggccaaggtgggtggatcatttgagctctggagttcgagaccagccagggccacatggcgagacctcgtctctactaaaaattaaaaaaaaaaaaaattagctgggcatggcggtggttcatgcctgtagtcctagcactttgggtgccggggcgggaggatcgtttgagctcagcagttcaagaccagcctgggcatcatagtgagaccctgtctctatttata

SEQ ID NO: 308424 - DNA, 1712 bp, Homo sapiens
atttagatatgatttaacgtatatgataggatgtgtataggttgtatgcaattactagaacattttctataaaggtcatgaatatctgtggtggatcctggaaccaatggggttgggagggcagcttcaattgttttaaaatgtttcaggccaacagaatatgcttataaatgcttttataacctcatagcttctgtttctttatagttttggcttatttgtaatgtttcctttttctcatgtggtacaaaacatggttatgtaccattacctcttcaactcagccagtggcttggcagtttcccttgtgcagtgtttaaaactgggccacagttttgaatgcagttgtggatattaaaatgaaatagattaggaaagaatagattaagatagaatacagataagaaaataagaaaatatcagccttcatctggcaaagaaaataccagccttcatctggcaaagggcatcatcaggcatcaccaggaggtgctctgtatccataggttccctatctgtgggttccaccaccactgataaaaaatatttggaaaaaaatacaacaatgcaaaataatacaaatttaaaaaaatacaatatatttatgtggtgtttacattgtattcgttattataagtaatctagagatgatttaaagggacgggaagatatatgtaggttatatgtaaatataccattttatataaggaacgtgtatatccatggattttagaatctgtagggattcctggaaccagtcttccatggataccgagggatgactgtattgttctgtgaaatttttgtcccagctacatatttgtatgtatgtatgtttttggtccggtataattgtataatatttcttactatgggttaaacaactttataagacattgtgaggaacctggtatcctctggactagatcattcccgtagacagttccattgtgcacacatagtatttcgttaaaatcaggtgactgtttaaaaattaaaaagattttagataaaaatctagatttttactttctcctgaaatatcagaagatggggtctaaattcacactgaggccaagcagtggtaggctcattttaaagaagggctttctgctctctggtttaccccattgtatactaattagcctggtcttacttttatatattacctgaatagccacttagggcattttgaacacgtggcttgcattgctttgtctttttgaaatccgctgtggcaggcccaaaccttgcctttggtgggcttaagtaaggtctggtttccagtacaaaggcaaaggcaaatgaggattattagtattccattttgccctatggatattctcagtgctttctactggaaactcacaaccaattctgaatatgccacatactgtgtgatttgcccttgctgtccaaccctgttcttgctgccatttaaaaacaatcaggccaggtgtggtggctcatttctgtaatcccagcactttgggaggccaaggtgggtggatcatttgagctctggagttcgagaccagccagggccacatggcgagacctcgtctctactaaaaattaaaaaaattagccgggcatgtctgcggttgcctgtaataccagctacttgggaggctcaggcaggagaattgcttgaacccgggatgcggaggttgcagtgagccgagatcgcaccactgcacacccaggctgga

SEQ ID NO: 308425 - DNA, 1403 bp, Homo sapiens
atttagatatgatttaacgtatatgataggatgtgtataggttgtatgcaattactagaacattttctataaaggtcatgaatatctgtggtggatcctggaaccaatggggttgggagggcagcttcaattgttttaaaatgtttcaggccaacagaatatgcttataaatgcttttataacctcatagcttctgtttctttatagttttggcttatttgtaatgtttcctttttctcatgtggtacaaaacatggttatgtaccattacctcttcaactcagccagtggcttggcagtttcccttgtgcagtgtttaaaactgggccacagttttgaatgcagttgtggatattaaaatgaaatagattaggaaagaatagattaagatagaatacagataagaaaataagaaaatatcagccttcatctggcaaagaaaataccagccttcatctggcaaagggcatcatcaggcatcaccaggaggtgctctgtatccataggttccctatctgtgggttccaccaccactgataaaaaatatttcttactatgggttaaacaactttataagacattgtgaggaacctggtatcctctggactagatcattcccgtagacagttccattgtgcacacatagtatttcgttaaaatcaggtgactgtttaaaaattaaaaagattttagataaaaatctagatttttactttctcctgaaatatcagaagatggggtctaaattcacactgaggccaagcagtggtaggctcattttaaagaagggctttctgctctctggtttaccccattgtatactaattagcctggtcttacttttatatattacctgaatagccacttagggcattttgaacacgtggcttgcattgctttgtctttttgaaatccgctgtggcaggcccaaaccttgcctttggtgggcttaagtaaggtctggtttccagtacaaaggcaaaggcaaatgaggattattagtattccattttgccctatggatattctcagtgctttctactggaaactcacaaccaattctgaatatgccacatactgtgtgatttgcccttgctgtccaaccctgttcttgctgccatttaaaaacaatcaggccaggtgtggtggctcatttctgtaatcccagcactttgggaggccaaggtgggtggatcatttgagctctggagttcgagaccagccagggccacatggcgagacctcgtctctactaaaaattaaaaaaaaaaaaaattagctgggcatggcggtggttcatgcctgtagtcctagcactttgggtgccggggcgggaggatcgtttgagctcagcagttcaagaccagcctgggcatcatagtgagaccctgtctctatttata

SEQ ID NO: 308426 - DNA, 7865 bp, Homo sapiens
gcctccggggcagcggcgaggccggagcgtcgcggcggagaggacgagaccgggacaagaccagggcaggagggagccggccagccgcgagaaccccgcacgcccggcaagatgctgtcctggcggctgcagacgggccccgagaaggccgagctccaggagctcaacgcccggctctatgactacgtgtgtcgggtgcgggagctggagcgcgaaaacctactcctggaggaggagctgcgcggccggcgcgggcgagagggcctgtgggccgaggggcaggcccgctgcgccgaggaggcgcgcagcttgcggcagcagctggacgagctgagctgggccactgcgctggcggagggcgagcgggacgctctgcggcgcgagctgcgggagctgcagcgcctggatgcggaggagcgcgccgcccgcggccgcctggacgccgagctgggtgcgcagcagcgcgagctgcaggaggcgctgggcgcgcgcgccgccctcgaggcgctgctgggccgactgcaggccgagcgccgaggcctcgacgcggcccacgaacgcgacgtgcgggagctgcgcgcgcgcgccgccagccttaccatgcatttccgcgcccgcgccaccggccccgccgcgccgccgccacgcctgcgggaggtgcacgacagctacgcactgctggtggccgagtcgtggcgggagacggtgcagctgtacgaggacgaggtgcgcgagctggaggaggcgctgcggcgcggccaggagagcagactccaggcggaggaagagacgcggctgtgcgcgcaggaggcagaggcgctgcggcgcgaggcgctcgggttggagcagctgcgcgcgcggctggaggacgcgctgctgcggatgcgcgaggagtacgggatacaggccgaggagcggcagagagcgattgactgcctggaggatgagaaggcaaccctcaccttggccatggctgactggctgcgggactatcaggacctcctgcaggtgaagaccggcctcagtctggaggtggcgacctaccgggccttattggaaggagaaagtaatccagagatagtgatctgggctgagcacgttgaaaacatgccgtcagaattcagaaacaaatcctatcactataccgactcactactacagagggaaaatgaaaggaatctattttcaaggcagaaagcacctttggcaagtttcaatcacagctcggcactgtattctaacctgtcagggcaccgtggatctcagacgggcacatctattggaggtgatgccagaagaggcttcttgggctcgggatattcttcctcggccactacccagcaggaaaactcatacggaaaagccgtcagcagtcaaaccaacgtcagaactttctctccaacctatggccttttaagaaatactgaggctcaagtgaaaacattccctgacagaccaaaagccggagatacaagggaggtccccgtttacataggtgaagattccacaattgcccgcgagtcgtaccgggatcgccgagacaaggtggcagcaggtgcttcggaaagcacacggtcaaatgagaggaccgtcattctgggaaagaaaacagaagtgaaagccacgagggagcaagaaagaaacagaccagaaaccatccgaacaaagccagaagagaaaatgttcgattctaaagagaaggcttccgaggagagaaacctaagatgggaagaattgacaaagttagataaggaagcgagacagagagaaagccagcagatgaaggagaaggctaaggagaaggactcactgaaggagaagagcgtgcgagagagagaggtgccgattagtctagaagtatcccaggacagaagagcagaggtgtccccgaaaggtttgcagacgcctgtgaaggatgctggtggtgggaccggtagagaggcagaagcaagagagctacggttcaggttgggcaccagtgatgccactggttctctgcaaggcgattccatgacagaaaccgtagcagaaaacatcgttaccagtatcctgaagcagttcactcagtctccagagacagaagcatctgctgattcttttccagacacaaaagtcacttacgtggacaggaaagagcttcctggggaaaggaaaacaaagactgaaatagttgtggagtctaaactgactgaggatgttgatgtttccgatgaagctggcctggactaccttttaagcaaggatattaaggaagtggggctgaaaggcaagtcagccgagcagatgataggagacatcatcaacctcggcctgaaagggagggaggggagagcaaaggtcgtcaacgtggagatcgtggaggagcccgtgagttatgtcagcggggagaagccggaggagttttccgtcccattcaaagtggaggaggtcgaagatgtgtcgccaggcccctgggggttggttaaggaggaggaaggttatggagaaagcgatgtcacattctcagttaatcagcatcgaaggaccaagcagccccaggagaacacgactcacgtggaagaagtgacagaggcaggtgattcagagggcgagcagagttattttgtgtccactccagatgaacaccccggggggcacgacagagatgacggctcggtgtacgggcagatccacatcgaggaggaatccaccatcaggtactcttggcaggatgaaatcgtgcaggggactcgaaggaggacacagaaggacggtgcagtgggcgagaaggttgtgaagcccttggatgtcccagcgccctctctggagggggacctgggttccactcactggaaagaacaagctagaagcggtgaatttcatgccgaacccacagtcattgaaaaagaaattaaaataccccacgaattccacacctccatgaagggcatctcctccaaggagccccggcagcagctggtggaggtcatcgggcagctggaggaaacccttcccgagcgcatgagggaggagctgtccgccctcaccagagaggggcagggtgggccggggagcgtttccgtggatgtcaagaaggtccagggtgctggtggcagttccgtgaccctggttgctgaagtcaacgtctcacaaactgtggatgccgatcggttagacctggaggagctgagcaaagatgaggccagtgagatggagaaggctgtggagtcggtggttcgggagagcctgagcaggcaacgcagcccagcgcctggcagcccagatgaggaaggtggagcggaggccccggctgctggcattcgcttcaggcgttgggccacccgggagctgtacatcccttcaggcgagagcgaggttgctggtggggcctctcacagctcgggacagcgcactccccagggcccagtgtcggccactgtggaggtcagcagccccacaggctttgcccagtcacaggtgctggaggatgtgagccaggctgcaaggcacataaaactcggcccctctgaagtctggaggactgagcgaatgtcatatgaaggacccactgcagaagtggtggaggtaagtgcgggaggtgacctaagtcaggcagcgagcccgaccggagccagccggtctgtgaggcatgtcacgctgggtcccggtcaaagtccactgtccagagaagtcatcttcctaggccctgcccctgcctgtccagaggcatggggctcgccagaacctggcccagcagagtcttctgcagatatggacggatcagggaggcacagcacatttggctgcagacaatttcatgctgaaaaggagattatttttcagggccccatttctgctgcagggaaggttggtgattattttgcaacagaagagtcagtgggtacccagacttctgtcaggcaactccagttaggccctaaagaagggttcagtgggcaaatccagttcacagctccactttcagacaaggtggagttgggtgtcataggagattctgtacacatggaagggttgccagggagcagcacatccatcaggcacatcagcattgggcctcagaggcatcagaccacccagcagatagtttaccatgggctggttccccaactgggggaatctggtgactcagagagcactgtgcacggagagggctcagcagatgtgcaccaggccactcacagtcatacctcgggtagacaaaccgttatgactgaaaagagcaccttccaaagtgtcgtttctgaatctccccaggaggatagtgcaggggacacatcaggggcagaaatgacatcgggtgttagcagatcctttaggcacattcgactaggtcctacagaaacggaaacctctgaacacattgccatccgtggacccgtgtccagaacatttgtgcttgctggttcagcggactcccctgagctaggcaagttagcagacagcagcagaacgctaaggcacattgcaccagggcccaaagaaacttcgtttacctttcagatggatgtgagtaacgtagaggcgatccgcagccggacacaggaagcgggagctctcggtgtgtctgaccgtggttcctggagagacgcggacagtaggaatgaccaggcagttggtgtgagctttaaggcctctgctggggaaggagaccaggcccacagagaacagggcaaggagcaggccatgtttgataagaaggtgcagctccagagaatggtagaccaaaggtcggtgatttcagatgaaaagaaagttgccctcctctatctagacaatgaggaggaggagaatgatgggcattggttttaataagcagaaacattttgttttaatggcagcctgttggcgacgtgccaacatccaaaggccttaacttattttaagaggccgagggagtctatgaaaatctccccttttttacttttttaaagagtactcccggcatggtcaatttcctttatagttaatccgtaaaggtttccagttaattcatgccttaaaaggcactgcaattttatttttgagttgggacttttacaaaacacttttttccctggagtcttctctccacttctggagatgaatttctatgttttgcacctggtcacagacatggcttgcatctgtttgaaactacaattaattatagatgtcaaaacattaaccagattaaagtaatatatttaagagtaaattttgcttgcatgtgctaatatgaaataacagactaacattttaggggaaaaataaatacaatttagactctaaaaagtcttttcaaaaagaaatgggaaataggcagactgtttatgttaaaaaaattcttgctaaatgatttcatctttaggaaaaaattacttgccatatagagctaaattcatcttaagacttgaatgaattgctttctatgtacagaactttaaacaatatagtatttatggcgaggacagctgtagtctgttgtgatatttcacattctatttgcacaggttccctggcactggtagggtagatgattattgggaatcgcttacagtaccatttcattttttggcactaggtcattaagtagcacacagtctgaatgcccttttctggagtggccagttcctatcagactgtgcagacttgcgcttctctgcaccttatcccttagcacccaaacatttaatttcactggtgggaggtagaccttgaagacaatgaagagaatgccgatactcagactgcagctggaccggcaagctggctgtgtacaggaaaattggaagcacacagtggactgtgcctcttaaagatgcctttcccaaccctccattcatgggatgcaggtctttctgagctcaagggtgaaagatgaatacaataacaaccatgaacccacctcacggaagctttttttgcactttgaacagaagtcattgcagttggggtgttttgtccagggaaacagtttattaaatagaaggatgttttggggaaggaactggatatctctcctgcagcccagcaccgagatacccaggacgggcctggggggcgagaaaggcccccatgctcatgggccgcggagtgtggacctgtagataggcaccaccgagtttaagatactgggatgagcatgcttcattggattcattttattttacacgtcagtattgttttaaagtttctgtctgtaaagtgtagcatcatatataaaaagagtttcgctagcagcgcattttttttagttcaggctagcttctttcacataatgctgtctcagctgtatttccagtaacacagcatcatcgcactgactgtggcgcactggggaataacagtctgagctagcaccaccctcagccaggctacaacgacagcactggagggtcttccctctcagattcacctggaggccctcagacccccagggtgcacgtctccccaggtcctgggagtggctaccgcaggtagtttctggagagcacgttttcttcattgataagtggaggagaaatgcagcacagctttcaagatactattttaaaaacaccatgaatcagatagggaaagaaagttgattggaatggcaagtttaaacctttgttgtccatctgccaaatgaactagtgattgtcagactggtatggaggtgactgctttgtaaggttttgtcgtttctaatacagacagagatgtgctgattttgttttagctgtaacaggtaatggtttttggatagatgattgactggtgagaatttggtcaaggtgacagcctcctgtctgatgacaggacagactggtggtgaggagtctaagtgggctcagtttgatgtcagtgtctgggctcatgacttgtaaatggaagctgatgtgaacaggtaattaatattatgacccacttctatttactttgggaaatatcttggatcttaattatcatctgcaagtttcaagaagtattctgccaaaagtatttacaagtatggactcatgagctattgttggttgctaaatgtgaatcacgcgggagtgagtgtgcccttcacactgtgacattgtgacattgtgacaagctccatgtcctttaaaatcagtcactctgcacacaagagaaatcaacttcgtggttggatggggccggaacacaaccagtctttttgtatttattgttactgagacaaaacagtactcactgagtgtttttcagtttcctactggtggttttgatattgtttgtttaagatgtatatttagaatgacatcatctaagaagctgattttgctaaactcctgttccctacaatgggaaatgtcacaagaatgtgcaaaaataaaaatctgaggaaaaaacccaaaaaaaaaaaaaaaaaaaaaaaaaaaaaaaaaaaaaaaacccccaaaaaaaaaaaaaaaaaaaaaaaaaaaaaaaaaaaaaaaaaaaaaagaaaaaaaaaaaaaaaaaaaaaaaaaaaaaaaaaaaaaaaaaaaaaaaaaaacacacacccaagcaacaaaaaaaaaaacaagagatacgacgagcacgagagcggcgcggacagaacagaaaaaaaaagagtgtcggagctcgaccccacaaagaaacataaacagggcaggccctgtagcgtgacaccagcaggaagatacaaaaaataaaggcgatgcgggtggtggacccgaccaactaaaaaaaaaaggaagcggcaggtgaggatagcgacagtacactaccatacaatgtcgagcaatcactatgcaaggacggcacaacaaataaaaaggacgcggcgggggagagtcaacaatacacaccccgccggcggggggtgtaataaaagacttaaacagcagggaacacggcagcacagccgcgga

SEQ ID NO: 308427 - DNA, 7363 bp, Homo sapiens
gcctccggggcagcggcgaggccggagcgtcgcggcggagaggacgagaccgggacaagaccagggcaggagggagccggccagccgcgagaaccccgcacgcccggcaagatgctgtcctggcggctgcagacgggccccgagaaggccgagctccaggagctcaacgcccggctctatgactacgtgtgtcgggtgcgggagctggagcgcgaaaacctactcctggaggaggagctgcgcggccggcgcgggcgagagggcctgtgggccgaggggcaggcccgctgcgccgaggaggcgcgcagcttgcggcagcagctggacgagctgagctgggccactgcgctggcggagggcgagcgggacgctctgcggcgcgagctgcgggagctgcagcgcctggatgcggaggagcgcgccgcccgcggccgcctggacgccgagctgggtgcgcagcagcgcgagctgcaggaggcgctgggcgcgcgcgccgccctcgaggcgctgctgggccgactgcaggccgagcgccgaggcctcgacgcggcccacgaacgcgacgtgcgggagctgcgcgcgcgcgccgccagccttaccatgcatttccgcgcccgcgccaccggccccgccgcgccgccgccacgcctgcgggaggtgcacgacagctacgcactgctggtggccgagtcgtggcgggagacggtgcagctgtacgaggacgaggtgcgcgagctggaggaggcgctgcggcgcggccaggagagcagactccaggcggaggaagagacgcggctgtgcgcgcaggaggcagaggcgctgcggcgcgaggcgctcgggttggagcagctgcgcgcgcggctggaggacgcgctgctgcggatgcgcgaggagtacgggatacaggccgaggagcggcagagagcgattgactgcctggaggatgagaaggcaaccctcaccttggccatggctgactggctgcgggactatcaggacctcctgcaggtgaagaccggcctcagtctggaggtggcgacctaccgggccttattggaaggagaaagtaatccagagatagtgatctgggctgagcacgttgaaaacatgccgtcagaattcagaaacaaatcctatcactataccgactcactactacagagggaaaatgaaaggaatctattttcaaggcagaaagcacctttggcaagtttcaatcacagctcggcactgtattctaacctgtcagggcaccgtggatctcagacgggcacatctattggaggtgatgccagaagaggcttcttgggctcgggatattcttcctcggccactacccagcaggaaaactcatacggaaaagccgtcagcagtcaaaccaacgtcagaactttctctccaacctatggccttttaagaaatactgaggctcaagtgaaaacattccctgacagaccaaaagccggagatacaagggaggtccccgtttacataggtgaagattccacaattgcccgcgagtcgtaccgggatcgccgagacaaggtggcagcaggtgcttcggaaagcacacggtcaaatgagaggaccgtcattctgggaaagaaaacagaagtgaaagccacgagggagcaagaaagaaacagaccagaaaccatccgaacaaagccagaagagaaaatgttcgattctaaagagaaggcttccgaggagagaaacctaagatgggaagaattgacaaagttagataaggaagcgagacagagagaaagccagcagatgaaggagaaggctaaggagaaggactcactgaaggagaagagcgtgcgagagagagaggtgccgattagtctagaagtatcccaggacagaagagcagaggtgtccccgaaaggtttgcagacgcctgtgaaggatgctggtggtgggaccggtagagaggcagaagcaagagagctacggttcaggttgggcaccagtgatgccactggttctctgcaaggcgattccatgacagaaaccgtagcagaaaacatcgttaccagtatcctgaagcagttcactcagtctccagagacagaagcatctgctgattcttttccagacacaaaagtcacttacgtggacaggaaagagcttcctggggaaaggaaaacaaagactgaaatagttgtggagtctaaactgactgaggatgttgatgtttccgatgaagctggcctggactaccttttaagcaaggatattaaggaagtggggctgaaaggcaagtcagccgagcagatgataggagacatcatcaacctcggcctgaaagggagggaggggagagcaaaggtcgtcaacgtggagatcgtggaggagcccgtgagttatgtcagcggggagaagccggaggagttttccgtcccattcaaagtggaggaggtcgaagatgtgtcgccaggcccctgggggttggttaaggaggaggaaggttatggagaaagcgatgtcacattctcagttaatcagcatcgaaggaccaagcagccccaggagaacacgactcacgtggaagaagtgacagaggcaggtgattcagagggcgagcagagttattttgtgtccactccagatgaacaccccggggggcacgacagagatgacggctcggtgtacgggcagatccacatcgaggaggaatccaccatcaggtactcttggcaggatgaaatcgtgcaggggactcgaaggaggacacagaaggacggtgcagtgggcgagaaggttgtgaagcccttggatgtcccagcgccctctctggagggggacctgggttccactcactggaaagaacaagctagaagcggtgaatttcatgccgaacccacagtcattgaaaaagaaattaaaataccccacgaattccacacctccatgaagggcatctcctccaaggagccccggcagcagctggtggaggtcatcgggcagctggaggaaacccttcccgagcgcatgagggaggagctgtccgccctcaccagagaggggcagggtgggccggggagcgtttccgtggatgtcaagaaggtccagggtgctggtggcagttccgtgaccctggttgctgaagtcaacgtctcacaaactgtggatgccgatcggttagacctggaggagctgagcaaagatgaggccagtgagatggagaaggctgtggagtcggtggttcgggagagcctgagcaggcaacgcagcccagcgcctggcagcccagatgaggaaggtggagcggaggccccggctgctggcattcgcttcaggcgttgggccacccgggagctgtacatcccttcaggcgagagcgaggttgctggtggggcctctcacagctcgggacagcgcactccccagggcccagtgtcggccactgtggaggtcagcagccccacaggctttgcccagtcacaggtgctggaggatgtgagccaggctgcaaggcacataaaactcggcccctctgaagtctggaggactgagcgaatgtcatatgaaggacccactgcagaagtggtggaggtaagtgcgggaggtgacctaagtcaggcagcgagcccgaccggagccagccggtctgtgaggcatgtcacgctgggtcccggtcaaagtccactgtccagagaagtcatcttcctaggccctgcccctgcctgtccagaggcatggggctcgccagaacctggcccagcagagtcttctgcagatatggacggatcagggaggcacagcacatttggctgcagacaatttcatgctgaaaaggagattatttttcagggccccatttctgctgcagggaaggttggtgattattttgcaacagaagagtcagtgggtacccagacttctgtcaggcaactccagttaggccctaaagaagggttcagtgggcaaatccagttcacagctccactttcagacaaggtggagttgggtgtcataggagattctgtacacatggaagggttgccagggagcagcacatccatcaggcacatcagcattgggcctcagaggcatcagaccacccagcagatagtttaccatgggctggttccccaactgggggaatctggtgactcagagagcactgtgcacggagagggctcagcagatgtgcaccaggccactcacagtcatacctcgggtagacaaaccgttatgactgaaaagagcaccttccaaagtgtcgtttctgaatctccccaggaggatagtgcaggggacacatcaggggcagaaatgacatcgggtgttagcagatcctttaggcacattcgactaggtcctacagaaacggaaacctctgaacacattgccatccgtggacccgtgtccagaacatttgtgcttgctggttcagcggactcccctgagctaggcaagttagcagacagcagcagaacgctaaggcacattgcaccagggcccaaagaaacttcgtttacctttcagatggatgtgagtaacgtagaggcgatccgcagccggacacaggaagcgggagctctcggtgtgtctgaccgtggttcctggagagacgcggacagtaggaatgaccaggcagttggtgtgagctttaaggcctctgctggggaaggagaccaggcccacagagaacagggcaaggagcaggccatgtttgataagaaggtgcagctccagagaatggtagaccaaaggtcggtgatttcagatgaaaagaaagttgccctcctctatctagacaatgaggaggaggagaatgatgggcattggttttaataagcagaaacattttgttttaatggcagcctgttggcgacgtgccaacatccaaaggccttaacttattttaagaggccgagggagtctatgaaaatctccccttttttacttttttaaagagtactcccggcatggtcaatttcctttatagttaatccgtaaaggtttccagttaattcatgccttaaaaggcactgcaattttatttttgagttgggacttttacaaaacacttttttccctggagtcttctctccacttctggagatgaatttctatgttttgcacctggtcacagacatggcttgcatctgtttgaaactacaattaattatagatgtcaaaacattaaccagattaaagtaatatatttaagagtaaattttgcttgcatgtgctaatatgaaataacagactaacattttaggggaaaaataaatacaatttagactctaaaaagtcttttcaaaaagaaatgggaaataggcagactgtttatgttaaaaaaattcttgctaaatgatttcatctttaggaaaaaattacttgccatatagagctaaattcatcttaagacttgaatgaattgctttctatgtacagaactttaaacaatatagtatttatggcgaggacagctgtagtctgttgtgatatttcacattctatttgcacaggttccctggcactggtagggtagatgattattgggaatcgcttacagtaccatttcattttttggcactaggtcattaagtagcacacagtctgaatgcccttttctggagtggccagttcctatcagactgtgcagacttgcgcttctctgcaccttatcccttagcacccaaacatttaatttcactggtgggaggtagaccttgaagacaatgaagagaatgccgatactcagactgcagctggaccggcaagctggctgtgtacaggaaaattggaagcacacagtggactgtgcctcttaaagatgcctttcccaaccctccattcatgggatgcaggtctttctgagctcaagggtgaaagatgaatacaataacaaccatgaacccacctcacggaagctttttttgcactttgaacagaagtcattgcagttggggtgttttgtccagggaaacagtttattaaatagaaggatgttttggggaaggaactggatatctctcctgcagcccagcaccgagatacccaggacgggcctggggggcgagaaaggcccccatgctcatgggccgcggagtgtggacctgtagataggcaccaccgagtttaagatactgggatgagcatgcttcattggattcattttattttacacgtcagtattgttttaaagtttctgtctgtaaagtgtagcatcatatataaaaagagtttcgctagcagcgcattttttttagttcaggctagcttctttcacataatgctgtctcagctgtatttccagtaacacagcatcatcgcactgactgtggcgcactggggaataacagtctgagctagcaccaccctcagccaggctacaacgacagcactggagggtcttccctctcagattcacctggaggccctcagacccccagggtgcacgtctccccaggtcctgggagtggctaccgcaggtagtttctggagagcacgttttcttcattgataagtggaggagaaatgcagcacagctttcaagatactattttaaaaacaccatgaatcagatagggaaagaaagttgattggaatggcaagtttaaacctttgttgtccatctgccaaatgaactagtgattgtcagactggtatggaggtgactgctttgtaaggttttgtcgtttctaatacagacagagatgtgctgattttgttttagctgtaacaggtaatggtttttggatagatgattgactggtgagaatttggtcaaggtgacagcctcctgtctgatgacaggacagactggtggtgaggagtctaagtgggctcagtttgatgtcagtgtctgggctcatgacttgtaaatggaagctgatgtgaacaggtaattaatattatgacccacttctatttactttgggaaatatcttggatcttaattatcatctgcaagtttcaagaagtattctgccaaaagtatttacaagtatggactcatgagctattgttggttgctaaatgtgaatcacgcgggagtgagtgtgcccttcacactgtgacattgtgacattgtgacaagctccatgtcctttaaaatcagtcactctgcacacaagagaaatcaacttcgtggttggatggggccggaacacaaccagtctttttgtatttattgttactgagacaaaacagtactcactgagtgtttttcagtttcctactggtggttttgatattgtttgtttaagatgtatatttagaatgacatcatctaagaagctgattttgctaaactcctgttccctacaatgggaaatgtcacaagaatgtgcaaaaataaaaatctgaggaaaaaacccacatgttcctaaagagaatg

SEQ ID NO: 308428 - DNA, 6929 bp, Homo sapiens
gcctccggggcagcggcgaggccggagcgtcgcggcggagaggacgagaccgggacaagaccagggcaggagggagccggccagccgcgagaaccccgcacgcccggcaagatgctgtcctggcggctgcagacgggccccgagaaggccgagctccaggagctcaacgcccggctctatgactacgtgtgtcgggtgcgggagctggagcgcgaaaacctactcctggaggaggagctgcgcggccggcgcgggcgagagggcctgtgggccgaggggcaggcccgctgcgccgaggaggcgcgcagcttgcggcagcagctggacgagctgagctgggccactgcgctggcggagggcgagcgggacgctctgcggcgcgagctgcgggagctgcagcgcctggatgcggaggagcgcgccgcccgcggccgcctggacgccgagctgggtgcgcagcagcgcgagctgcaggaggcgctgggcgcgcgcgccgccctcgaggcgctgctgggccgactgcaggccgagcgccgaggcctcgacgcggcccacgaacgcgacgtgcgggagctgcgcgcgcgcgccgccagccttaccatgcatttccgcgcccgcgccaccggccccgccgcgccgccgccacgcctgcgggaggtgcacgacagctacgcactgctggtggccgagtcgtggcgggagacggtgcagctgtacgaggacgaggtgcgcgagctggaggaggcgctgcggcgcggccaggagagcagactccaggcggaggaagagacgcggctgtgcgcgcaggaggcagaggcgctgcggcgcgaggcgctcgggttggagcagctgcgcgcgcggctggaggacgcgctgctgcggatgcgcgaggagtacgggatacaggccgaggagcggcagagagcgattgactgcctggaggatgagaaggcaaccctcaccttggccatggctgactggctgcgggactatcaggacctcctgcaggtgaagaccggcctcagtctggaggtggcgacctaccgggccttattggaaggagaaagtaatccagagatagtgatctgggctgagcacgttgaaaacatgccgtcagaattcagaaacaaatcctatcactataccgactcactactacagagggaaaatgaaaggaatctattttcaaggcagaaagcacctttggcaagtttcaatcacagctcggcactgtattctaacctgtcagggcaccgtggatctcagacgggcacatctattggaggtgatgccagaagaggcttcttgggctcgggatattcttcctcggccactacccagcaggaaaactcatacggaaaagccgtcagcagtcaaaccaacgtcagaactttctctccaacctatggccttttaagaaatactgaggctcaagtgaaaacattccctgacagaccaaaagccggagatacaagggaggtccccgtttacataggtgaagattccacaattgcccgcgagtcgtaccgggatcgccgagacaaggtggcagcaggtgcttcggaaagcacacggtcaaatgagaggaccgtcattctgggaaagaaaacagaagtgaaagccacgagggagcaagaaagaaacagaccagaaaccatccgaacaaagccagaagagaaaatgttcgattctaaagagaaggcttccgaggagagaaacctaagatgggaagaattgacaaagttagataaggaagcgagacagagagaaagccagcagatgaaggagaaggctaaggagaaggactcactgaaggagaagagcgtgcgagagagagaggtgccgattagtctagaagtatcccaggacagaagagcagaggtgtccccgaaaggtttgcagacgcctgtgaaggatgctggtggtgggaccggtagagaggcagaagcaagagagctacggttcaggttgggcaccagtgatgccactggttctctgcaaggcgattccatgacagaaaccgtagcagaaaacatcgttaccagtatcctgaagcagttcactcagtctccagagacagaagcatctgctgattcttttccagacacaaaagtcacttacgtggacaggaaagagcttcctggggaaaggaaaacaaagactgaaatagttgtggagtctaaactgactgaggatgttgatgtttccgatgaagctggcctggactaccttttaagcaaggatattaaggaagtggggctgaaaggcaagtcagccgagcagatgataggagacatcatcaacctcggcctgaaagggagggaggggagagcaaaggtcgtcaacgtggagatcgtggaggagcccgtgagttatgtcagcggggagaagccggaggagttttccgtcccattcaaagtggaggaggtcgaagatgtgtcgccaggcccctgggggttggttaaggaggaggaaggttatggagaaagcgatgtcacattctcagttaatcagcatcgaaggaccaagcagccccaggagaacacgactcacgtggaagaagtgacagaggcaggtgattcagagggcgagcagagttattttgtgtccactccagatgaacaccccggggggcacgacagagatgacggctcggtgtacgggcagatccacatcgaggaggaatccaccatcaggtactcttggcaggatgaaatcgtgcaggggactcgaaggaggacacagaaggacggtgcagtgggcgagaaggttgtgaagcccttggatgtcccagcgccctctctggagggggacctgggttccactcactggaaagaacaagctagaagcggtgaatttcatgccgaacccacagtcattgaaaaagaaattaaaataccccacgaattccacacctccatgaagggcatctcctccaaggagccccggcagcagctggtggaggtcatcgggcagctggaggaaacccttcccgagcgcatgagggaggagctgtccgccctcaccagagaggggcagggtgggccggggagcgtttccgtggatgtcaagaaggtccagggtgctggtggcagttccgtgaccctggttgctgaagtcaacgtctcacaaactgtggatgccgatcggttagacctggaggagctgagcaaagatgaggccagtgagatggagaaggctgtggagtcggtggttcgggagagcctgagcaggcaacgcagcccagcgcctggcagcccagatgaggaaggtggagcggaggccccggctgctggcattcgcttcaggcgttgggccacccgggagctgtacatcccttcaggcgagagcgaggttgctggtggggcctctcacagctcgggacagcgcactccccagggcccagtgtcggccactgtggaggtcagcagccccacaggctttgcccagtcacaggtgctggaggatgtgagccaggctgcaaggcacataaaactcggcccctctgaagtctggaggactgagcgaatgtcatatgaaggacccactgcagaagtggtggagatggatgtgagtaacgtagaggcgatccgcagccggacacaggaagcgggagctctcggtgtgtctgaccgtggttcctggagagacgcggacagtaggaatgaccaggcagttggtgtgagctttaaggcctctgctggggaaggagaccaggcccacagagaacagggcaaggagcaggccatgtttgataagaaggtgcagctccagagaatggtagaccaaaggtcggtgatttcagatgaaaagaaagttgccctcctctatctagacaatgaggaggaggagaatgatgggcattggttttaataagcagaaacattttgttttaatggcagcctgttggcgacgtgccaacatccaaaggccttaacttattttaagaggccgagggagtctatgaaaatctccccttttttacttttttaaagagtactcccggcatggtcaatttcctttatagttaatccgtaaaggtttccagttaattcatgccttaaaaggcactgcaattttatttttgagttgggacttttacaaaacacttttttccctggagtcttctctccacttctggagatgaatttctatgttttgcacctggtcacagacatggcttgcatctgtttgaaactacaattaattatagatgtcaaaacattaaccagattaaagtaatatatttaagagtaaattttgcttgcatgtgctaatatgaaataacagactaacattttaggggaaaaataaatacaatttagactctaaaaagtcttttcaaaaagaaatgggaaataggcagactgtttatgttaaaaaaattcttgctaaatgatttcatctttaggaaaaaattacttgccatatagagctaaattcatcttaagacttgaatgaattgctttctatgtacagaactttaaacaatatagtatttatggcgaggacagctgtagtctgttgtgatatttcacattctatttgcacaggttccctggcactggtagggtagatgattattgggaatcgcttacagtaccatttcattttttggcactaggtcattaagtagcacacagtctgaatgcccttttctggagtggccagttcctatcagactgtgcagacttgcgcttctctgcaccttatcccttagcacccaaacatttaatttcactggtgggaggtagaccttgaagacaatgaagagaatgccgatactcagactgcagctggaccggcaagctggctgtgtacaggaaaattggaagcacacagtggactgtgcctcttaaagatgcctttcccaaccctccattcatgggatgcaggtctttctgagctcaagggtgaaagatgaatacaataacaaccatgaacccacctcacggaagctttttttgcactttgaacagaagtcattgcagttggggtgttttgtccagggaaacagtttattaaatagaaggatgttttggggaaggaactggatatctctcctgcagcccagcaccgagatacccaggacgggcctggggggcgagaaaggcccccatgctcatgggccgcggagtgtggacctgtagataggcaccaccgagtttaagatactgggatgagcatgcttcattggattcattttattttacacgtcagtattgttttaaagtttctgtctgtaaagtgtagcatcatatataaaaagagtttcgctagcagcgcattttttttagttcaggctagcttctttcacataatgctgtctcagctgtatttccagtaacacagcatcatcgcactgactgtggcgcactggggaataacagtctgagctagcaccaccctcagccaggctacaacgacagcactggagggtcttccctctcagattcacctggaggccctcagacccccagggtgcacgtctccccaggtcctgggagtggctaccgcaggtagtttctggagagcacgttttcttcattgataagtggaggagaaatgcagcacagctttcaagatactattttaaaaacaccatgaatcagatagggaaagaaagttgattggaatggcaagtttaaacctttgttgtccatctgccaaatgaactagtgattgtcagactggtatggaggtgactgctttgtaaggttttgtcgtttctaatacagacagagatgtgctgattttgttttagctgtaacaggtaatggtttttggatagatgattgactggtgagaatttggtcaaggtgacagcctcctgtctgatgacaggacagactggtggtgaggagtctaagtgggctcagtttgatgtcagtgtctgggctcatgacttgtaaatggaagctgatgtgaacaggtaattaatattatgacccacttctatttactttgggaaatatcttggatcttaattatcatctgcaagtttcaagaagtattctgccaaaagtatttacaagtatggactcatgagctattgttggttgctaaatgtgaatcacgcgggagtgagtgtgcccttcacactgtgacattgtgacattgtgacaagctccatgtcctttaaaatcagtcactctgcacacaagagaaatcaacttcgtggttggatggggccggaacacaaccagtctttttgtatttattgttactgagacaaaacagtactcactgagtgtttttcagtttcctactggtggttttgatattgtttgtttaagatgtatatttagaatgacatcatctaagaagctgattttgctaaactcctgttccctacaatgggaaatgtcacaagaatgtgcaaaaataaaaatctgaggaaaaaacccaaaaaaaaaaaaaaaaaaaaaaaaaaaaaaaaaaaaaaaacccccaaaaaaaaaaaaaaaaaaaaaaaaaaaaaaaaaaaaaaaaaaaaaagaaaaaaaaaaaaaaaaaaaaaaaaaaaaaaaaaaaaaaaaaaaaaaaaaaacacacacccaagcaacaaaaaaaaaaacaagagatacgacgagcacgagagcggcgcggacagaacagaaaaaaaaagagtgtcggagctcgaccccacaaagaaacataaacagggcaggccctgtagcgtgacaccagcaggaagatacaaaaaataaaggcgatgcgggtggtggacccgaccaactaaaaaaaaaaggaagcggcaggtgaggatagcgacagtacactaccatacaatgtcgagcaatcactatgcaaggacggcacaacaaataaaaaggacgcggcgggggagagtcaacaatacacaccccgccggcggggggtgtaataaaagacttaaacagcagggaacacggcagcacagccgcgga

SEQ ID NO: 308429 - DNA, 6946 bp, Homo sapiens
gcctccggggcagcggcgaggccggagcgtcgcggcggagaggacgagaccgggacaagaccagggcaggagggagccggccagccgcgagaaccccgcacgcccggcaagatgctgtcctggcggctgcagacgggccccgagaaggccgagctccaggagctcaacgcccggctctatgactacgtgtgtcgggtgcgggagctggagcgcgaaaacctactcctggaggaggagctgcgcggccggcgcgggcgagagggcctgtgggccgaggggcaggcccgctgcgccgaggaggcgcgcagcttgcggcagcagctggacgagctgagctgggccactgcgctggcggagggcgagcgggacgctctgcggcgcgagctgcgggagctgcagcgcctggatgcggaggagcgcgccgcccgcggccgcctggacgccgagctgggtgcgcagcagcgcgagctgcaggaggcgctgggcgcgcgcgccgccctcgaggcgctgctgggccgactgcaggccgagcgccgaggcctcgacgcggcccacgaacgcgacgtgcgggagctgcgcgcgcgcgccgccagccttaccatgcatttccgcgcccgcgccaccggccccgccgcgccgccgccacgcctgcgggaggtgcacgacagctacgcactgctggtggccgagtcgtggcgggagacggtgcagctgtacgaggacgaggtgcgcgagctggaggaggcgctgcggcgcggccaggagagcagactccaggcggaggaagagacgcggctgtgcgcgcaggaggcagaggcgctgcggcgcgaggcgctcgggttggagcagctgcgcgcgcggctggaggacgcgctgctgcggatgcgcgaggagtacgggatacaggccgaggagcggcagagagcgattgactgcctggaggatgagaaggcaaccctcaccttggccatggctgactggctgcgggactatcaggacctcctgcaggtgaagaccggcctcagtctggaggtggcgacctaccgggccttattggaaggagaaagtaatccagagatagtgatctgggctgagcacgttgaaaacatgccgtcagaattcagaaacaaatcctatcactataccgactcactactacagagggaaaatgaaaggaatctattttcaaggcagaaagcacctttggcaagtttcaatcacagctcggcactgtattctaacctgtcagggcaccgtggatctcagacgggcacatctattggaggtgatgccagaagaggcttcttgggctcgggatattcttcctcggccactacccagcaggaaaactcatacggaaaagccgtcagcagtcaaaccaacgtcagaactttctctccaacctatggccttttaagaaatactgaggctcaagtgaaaacattccctgacagaccaaaagccggagatacaagggaggtccccgtttacataggtgaagattccacaattgcccgcgagtcgtaccgggatcgccgagacaaggtggcagcaggtgcttcggaaagcacacggtcaaatgagaggaccgtcattctgggaaagaaaacagaagtgaaagccacgagggagcaagaaagaaacagaccagaaaccatccgaacaaagccagaagagaaaatgttcgattctaaagagaaggcttccgaggagagaaacctaagatgggaagaattgacaaagttagataaggaagcgagacagagagaaagccagcagatgaaggagaaggctaaggagaaggactcactgaaggagaagagcgtgcgagagagagaggtgccgattagtctagaagtatcccaggacagaagagcagaggtgtccccgaaaggtttgcagacgcctgtgaaggatgctggtggtgggaccggtagagaggcagaagcaagagagctacggttcaggttgggcaccagtgatgccactggttctctgcaaggcgattccatgacagaaaccgtagcagaaaacatcgttaccagtatcctgaagcagttcactcagtctccagagacagaagcatctgctgattcttttccagacacaaaagtcacttacgtggacaggaaagagcttcctggggaaaggaaaacaaagactgaaatagttgtggagtctaaactgactgaggatgttgatgtttccgatgaagctggcctggactaccttttaagcaaggatattaaggaagtggggctgaaaggcaagtcagccgagcagatgataggagacatcatcaacctcggcctgaaagggagggaggggagagcaaaggtcgtcaacgtggagatcgtggaggagcccgtgagttatgtcagcggggagaagccggaggagttttccgtcccattcaaagtggaggaggtcgaagatgtgtcgccaggcccctgggggttggttaaggaggaggaaggttatggagaaagcgatgtcacattctcagttaatcagcatcgaaggaccaagcagccccaggagaacacgactcacgtggaagaagtgacagaggcaggtgattcagagggcgagcagagttattttgtgtccactccagatgaacaccccggggggcacgacagagatgacggctcggtgtacgggcagatccacatcgaggaggaatccaccatcaggtactcttggcaggatgaaatcgtgcaggggactcgaaggaggacacagaaggacggtgcagtgggcgagaaggttgtgaagcccttggatgtcccagcgccctctctggagggggacctgggttccactcactggaaagaacaagctagaagcggtgaatttcatgccgaacccacagtcattgaaaaagaaattaaaataccccacgaattccacacctccatgaagggcatctcctccaaggagccccggcagcagctggtggaggtcatcgggcagctggaggaaacccttcccgagcgcatgagggaggagctgtccgccctcaccagagaggggcagggtgggccggggagcgtttccgtggatgtcaagaaggtccagggtgctggtggcagttccgtgaccctggttgctgaagtcaacgtctcacaaactgtggatgccgatcggttagacctggaggagctgagcaaagatgaggccagtgagatggagaaggctgtggagtcggtggttcgggagagcctgagcaggcaacgcagcccagcgcctggcagcccagatgaggaaggtggagcggaggccccggctgctggcattcgcttcaggcgttgggccacccgggagctgtacatcccttcaggcgagagcgaggttgctggtggggcctctcacagctcgggacagcgcactccccagggcccagtgtcggccactgtggaggtcagcagccccacaggctttgcccagtcacaggtgctggaggatgtgagccaggctgcaaggcacataaaactcggcccctctgaagtctggaggactgagcgaatgtcatatgaaggacccactgcagaagtggtggagatggatgtgagtaacgtagaggcgatccgcagccggacacaggaagcgggagctctcggtgtgtctgaccgtggttcctggagagacgcggacagtaggaatgaccaggcagttggtgtgagctttaaggcctctgctggggaaggagaccaggcccacagagaacagggcaaggagcaggccatgtttgataagaaggtgcagctccagagaatggtagaccaaaggtcggtgatttcagatgaaaagaaagttgccctcctctatctagacaatgaggaggaggagaatgatgggcattggttttaataagcagaaacattttgttttaatggcagcctgttggcgacgtgccaacatccaaaggccttaacttattttaagaggccgagggagtctatgaaaatctccccttttttacttttttaaagagtactcccggcatggtcaatttcctttatagttaatccgtaaaggtttccagttaattcatgccttaaaaggcactgcaattttatttttgagttgggacttttacaaaacacttttttccctggagtcttctctccacttctggagatgaatttctatgttttgcacctggtcacagacatggcttgcatctgtttgaaactacaattaattatagatgtcaaaacattaaccagattaaagtaatatatttaagagtaaattttgcttgcatgtgctaatatgaaataacagactaacattttaggggaaaaataaatacaatttagactctaaaaagtcttttcaaaaagaaatgggaaataggcagactgtttatgttaaaaaaattcttgctaaatgatttcatctttaggaaaaaattacttgccatatagagctaaattcatcttaagacttgaatgaattgctttctatgtacagaactttaaacaatatagtatttatggcgaggacagctgtagtctgttgtgatatttcacattctatttgcacaggttccctggcactggtagggtagatgattattgggaatcgcttacagtaccatttcattttttggcactaggtcattaagtagcacacagtctgaatgcccttttctgttatagcctaagttctggagtggccagttcctatcagactgtgcagacttgcgcttctctgcaccttatcccttagcacccaaacatttaatttcactggtgggaggtagaccttgaagacaatgaagagaatgccgatactcagactgcagctggaccggcaagctggctgtgtacaggaaaattggaagcacacagtggactgtgcctcttaaagatgcctttcccaaccctccattcatgggatgcaggtctttctgagctcaagggtgaaagatgaatacaataacaaccatgaacccacctcacggaagctttttttgcactttgaacagaagtcattgcagttggggtgttttgtccagggaaacagtttattaaatagaaggatgttttggggaaggaactggatatctctcctgcagcccagcaccgagatacccaggacgggcctggggggcgagaaaggcccccatgctcatgggccgcggagtgtggacctgtagataggcaccaccgagtttaagatactgggatgagcatgcttcattggattcattttattttacacgtcagtattgttttaaagtttctgtctgtaaagtgtagcatcatatataaaaagagtttcgctagcagcgcattttttttagttcaggctagcttctttcacataatgctgtctcagctgtatttccagtaacacagcatcatcgcactgactgtggcgcactggggaataacagtctgagctagcaccaccctcagccaggctacaacgacagcactggagggtcttccctctcagattcacctggaggccctcagacccccagggtgcacgtctccccaggtcctgggagtggctaccgcaggtagtttctggagagcacgttttcttcattgataagtggaggagaaatgcagcacagctttcaagatactattttaaaaacaccatgaatcagatagggaaagaaagttgattggaatggcaagtttaaacctttgttgtccatctgccaaatgaactagtgattgtcagactggtatggaggtgactgctttgtaaggttttgtcgtttctaatacagacagagatgtgctgattttgttttagctgtaacaggtaatggtttttggatagatgattgactggtgagaatttggtcaaggtgacagcctcctgtctgatgacaggacagactggtggtgaggagtctaagtgggctcagtttgatgtcagtgtctgggctcatgacttgtaaatggaagctgatgtgaacaggtaattaatattatgacccacttctatttactttgggaaatatcttggatcttaattatcatctgcaagtttcaagaagtattctgccaaaagtatttacaagtatggactcatgagctattgttggttgctaaatgtgaatcacgcgggagtgagtgtgcccttcacactgtgacattgtgacattgtgacaagctccatgtcctttaaaatcagtcactctgcacacaagagaaatcaacttcgtggttggatggggccggaacacaaccagtctttttgtatttattgttactgagacaaaacagtactcactgagtgtttttcagtttcctactggtggttttgatattgtttgtttaagatgtatatttagaatgacatcatctaagaagctgattttgctaaactcctgttccctacaatgggaaatgtcacaagaatgtgcaaaaataaaaatctgaggaaaaaacccaaaaaaaaaaaaaaaaaaaaaaaaaaaaaaaaaaaaaaaacccccaaaaaaaaaaaaaaaaaaaaaaaaaaaaaaaaaaaaaaaaaaaaaagaaaaaaaaaaaaaaaaaaaaaaaaaaaaaaaaaaaaaaaaaaaaaaaaaaacacacacccaagcaacaaaaaaaaaaacaagagatacgacgagcacgagagcggcgcggacagaacagaaaaaaaaagagtgtcggagctcgaccccacaaagaaacataaacagggcaggccctgtagcgtgacaccagcaggaagatacaaaaaataaaggcgatgcgggtggtggacccgaccaactaaaaaaaaaaggaagcggcaggtgaggatagcgacagtacactaccatacaatgtcgagcaatcactatgcaaggacggcacaacaaataaaaaggacgcggcgggggagagtcaacaatacacaccccgccggcggggggtgtaataaaagacttaaacagcagggaacacggcagcacagccgcgga

SEQ ID NO: 308430 - DNA, 6739 bp, Homo sapiens
gggcctagaggatcccgctgccgctactactacagagggaaaatgaaaggaatctattttcaaggcagaaagcacctttggcaagtttcaatcacagctcggcactgtattctaacctgtcagggcaccgtggatctcagacgggcacatctattggaggtgatgccagaagaggcttcttgggctcgggatattcttcctcggccactacccagcaggaaaactcatacggaaaagccgtcagcagtcaaaccaacgtcagaactttctctccaacctatggccttttaagaaatactgaggctcaagtgaaaacattccctgacagaccaaaagccggagatacaagggaggtccccgtttacataggtgaagattccacaattgcccgcgagtcgtaccgggatcgccgagacaaggtggcagcaggtgcttcggaaagcacacggtcaaatgagaggaccgtcattctgggaaagaaaacagaagtgaaagccacgagggagcaagaaagaaacagaccagaaaccatccgaacaaagccagaagagaaaatgttcgattctaaagagaaggcttccgaggagagaaacctaagatgggaagaattgacaaagttagataaggaagcgagacagagagaaagccagcagatgaaggagaaggctaaggagaaggactcactgaaggagaagagcgtgcgagagagagaggtgccgattagtctagaagtatcccaggacagaagagcagaggtgtccccgaaaggtttgcagacgcctgtgaaggatgctggtggtgggaccggtagagaggcagaagcaagagagctacggttcaggttgggcaccagtgatgccactggttctctgcaaggcgattccatgacagaaaccgtagcagaaaacatcgttaccagtatcctgaagcagttcactcagtctccagagacagaagcatctgctgattcttttccagacacaaaagtcacttacgtggacaggaaagagcttcctggggaaaggaaaacaaagactgaaatagttgtggagtctaaactgactgaggatgttgatgtttccgatgaagctggcctggactaccttttaagcaaggatattaaggaagtggggctgaaaggcaagtcagccgagcagatgataggagacatcatcaacctcggcctgaaagggagggaggggagagcaaaggtcgtcaacgtggagatcgtggaggagcccgtgagttatgtcagcggggagaagccggaggagttttccgtcccattcaaagtggaggaggtcgaagatgtgtcgccaggcccctgggggttggttaaggaggaggaaggttatggagaaagcgatgtcacattctcagttaatcagcatcgaaggaccaagcagccccaggagaacacgactcacgtggaagaagtgacagaggcaggtgattcagagggcgagcagagttattttgtgtccactccagatgaacaccccggggggcacgacagagatgacggctcggtgtacgggcagatccacatcgaggaggaatccaccatcaggtactcttggcaggatgaaatcgtgcaggggactcgaaggaggacacagaaggacggtgcagtgggcgagaaggttgtgaagcccttggatgtcccagcgccctctctggagggggacctgggttccactcactggaaagaacaagctagaagcggtgaatttcatgccgaacccacagtcattgaaaaagaaattaaaataccccacgaattccacacctccatgaagggcatctcctccaaggagccccggcagcagctggtggaggtcatcgggcagctggaggaaacccttcccgagcgcatgagggaggagctgtccgccctcaccagagaggggcagggtgggccggggagcgtttccgtggatgtcaagaaggtccagggtgctggtggcagttccgtgaccctggttgctgaagtcaacgtctcacaaactgtggatgccgatcggttagacctggaggagctgagcaaagatgaggccagtgagatggagaaggctgtggagtcggtggttcgggagagcctgagcaggcaacgcagcccagcgcctggcagcccagatgaggaaggtggagcggaggccccggctgctggcattcgcttcaggcgttgggccacccgggagctgtacatcccttcaggcgagagcgaggttgctggtggggcctctcacagctcgggacagcgcactccccagggcccagtgtcggccactgtggaggtcagcagccccacaggctttgcccagtcacaggtgctggaggatgtgagccaggctgcaaggcacataaaactcggcccctctgaagtctggaggactgagcgaatgtcatatgaaggacccactgcagaagtggtggaggtaagtgcgggaggtgacctaagtcaggcagcgagcccgaccggagccagccggtctgtgaggcatgtcacgctgggtcccggtcaaagtccactgtccagagaagtcatcttcctaggccctgcccctgcctgtccagaggcatggggctcgccagaacctggcccagcagagtcttctgcagatatggacggatcagggaggcacagcacatttggctgcagacaatttcatgctgaaaaggagattatttttcagggccccatttctgctgcagggaaggttggtgattattttgcaacagaagagtcagtgggtacccagacttctgtcaggcaactccagttaggccctaaagaagggttcagtgggcaaatccagttcacagctccactttcagacaaggtggagttgggtgtcataggagattctgtacacatggaagggttgccagggagcagcacatccatcaggcacatcagcattgggcctcagaggcatcagaccacccagcagatagtttaccatgggctggttccccaactgggggaatctggtgactcagagagcactgtgcacggagagggctcagcagatgtgcaccaggccactcacagtcatacctcgggtagacaaaccgttatgactgaaaagagcaccttccaaagtgtcgtttctgaatctccccaggaggatagtgcaggggacacatcaggggcagaaatgacatcgggtgttagcagatcctttaggcacattcgactaggtcctacagaaacggaaacctctgaacacattgccatccgtggacccgtgtccagaacatttgtgcttgctggttcagcggactcccctgagctaggcaagttagcagacagcagcagaacgctaaggcacattgcaccagggcccaaagaaacttcgtttacctttcagatggatgtgagtaacgtagaggcgatccgcagccggacacaggaagcgggagctctcggtgtgtctgaccgtggttcctggagagacgcggacagtaggaatgaccaggcagttggtgtgagctttaaggcctctgctggggaaggagaccaggcccacagagaacagggcaaggagcaggccatgtttgataagaaggtgcagctccagagaatggtagaccaaaggtcggtgatttcagatgaaaagaaagttgccctcctctatctagacaatgaggaggaggagaatgatgggcattggttttaataagcagaaacattttgttttaatggcagcctgttggcgacgtgccaacatccaaaggccttaacttattttaagaggccgagggagtctatgaaaatctccccttttttacttttttaaagagtactcccggcatggtcaatttcctttatagttaatccgtaaaggtttccagttaattcatgccttaaaaggcactgcaattttatttttgagttgggacttttacaaaacacttttttccctggagtcttctctccacttctggagatgaatttctatgttttgcacctggtcacagacatggcttgcatctgtttgaaactacaattaattatagatgtcaaaacattaaccagattaaagtaatatatttaagagtaaattttgcttgcatgtgctaatatgaaataacagactaacattttaggggaaaaataaatacaatttagactctaaaaagtcttttcaaaaagaaatgggaaataggcagactgtttatgttaaaaaaattcttgctaaatgatttcatctttaggaaaaaattacttgccatatagagctaaattcatcttaagacttgaatgaattgctttctatgtacagaactttaaacaatatagtatttatggcgaggacagctgtagtctgttgtgatatttcacattctatttgcacaggttccctggcactggtagggtagatgattattgggaatcgcttacagtaccatttcattttttggcactaggtcattaagtagcacacagtctgaatgcccttttctggagtggccagttcctatcagactgtgcagacttgcgcttctctgcaccttatcccttagcacccaaacatttaatttcactggtgggaggtagaccttgaagacaatgaagagaatgccgatactcagactgcagctggaccggcaagctggctgtgtacaggaaaattggaagcacacagtggactgtgcctcttaaagatgcctttcccaaccctccattcatgggatgcaggtctttctgagctcaagggtgaaagatgaatacaataacaaccatgaacccacctcacggaagctttttttgcactttgaacagaagtcattgcagttggggtgttttgtccagggaaacagtttattaaatagaaggatgttttggggaaggaactggatatctctcctgcagcccagcaccgagatacccaggacgggcctggggggcgagaaaggcccccatgctcatgggccgcggagtgtggacctgtagataggcaccaccgagtttaagatactgggatgagcatgcttcattggattcattttattttacacgtcagtattgttttaaagtttctgtctgtaaagtgtagcatcatatataaaaagagtttcgctagcagcgcattttttttagttcaggctagcttctttcacataatgctgtctcagctgtatttccagtaacacagcatcatcgcactgactgtggcgcactggggaataacagtctgagctagcaccaccctcagccaggctacaacgacagcactggagggtcttccctctcagattcacctggaggccctcagacccccagggtgcacgtctccccaggtcctgggagtggctaccgcaggtagtttctggagagcacgttttcttcattgataagtggaggagaaatgcagcacagctttcaagatactattttaaaaacaccatgaatcagatagggaaagaaagttgattggaatggcaagtttaaacctttgttgtccatctgccaaatgaactagtgattgtcagactggtatggaggtgactgctttgtaaggttttgtcgtttctaatacagacagagatgtgctgattttgttttagctgtaacaggtaatggtttttggatagatgattgactggtgagaatttggtcaaggtgacagcctcctgtctgatgacaggacagactggtggtgaggagtctaagtgggctcagtttgatgtcagtgtctgggctcatgacttgtaaatggaagctgatgtgaacaggtaattaatattatgacccacttctatttactttgggaaatatcttggatcttaattatcatctgcaagtttcaagaagtattctgccaaaagtatttacaagtatggactcatgagctattgttggttgctaaatgtgaatcacgcgggagtgagtgtgcccttcacactgtgacattgtgacattgtgacaagctccatgtcctttaaaatcagtcactctgcacacaagagaaatcaacttcgtggttggatggggccggaacacaaccagtctttttgtatttattgttactgagacaaaacagtactcactgagtgtttttcagtttcctactggtggttttgatattgtttgtttaagatgtatatttagaatgacatcatctaagaagctgattttgctaaactcctgttccctacaatgggaaatgtcacaagaatgtgcaaaaataaaaatctgaggaaaaaacccaaaaaaaaaaaaaaaaaaaaaaaaaaaaaaaaaaaaaaaacccccaaaaaaaaaaaaaaaaaaaaaaaaaaaaaaaaaaaaaaaaaaaaaagaaaaaaaaaaaaaaaaaaaaaaaaaaaaaaaaaaaaaaaaaaaaaaaaaaacacacacccaagcaacaaaaaaaaaaacaagagatacgacgagcacgagagcggcgcggacagaacagaaaaaaaaagagtgtcggagctcgaccccacaaagaaacataaacagggcaggccctgtagcgtgacaccagcaggaagatacaaaaaataaaggcgatgcgggtggtggacccgaccaactaaaaaaaaaaggaagcggcaggtgaggatagcgacagtacactaccatacaatgtcgagcaatcactatgcaaggacggcacaacaaataaaaaggacgcggcgggggagagtcaacaatacacaccccgccggcggggggtgtaataaaagacttaaacagcagggaacacggcagcacagccgcgga

SEQ ID NO: 308431 - DNA, 6687 bp, Homo sapiens
tactactactaaattcgcggccgcgtcgacaagtttcaatcacagctcggcactgtattctaacctgtcagggcaccgtggatctcagacgggcacatctattggaggtgatgccagaagaggcttcttgggctcgggatattcttcctcggccactacccagcaggaaaactcatacggaaaagccgtcagcagtcaaaccaacgtcagaactttctctccaacctatggccttttaagaaatactgaggctcaagtgaaaacattccctgacagaccaaaagccggagatacaagggaggtccccgtttacataggtgaagattccacaattgcccgcgagtcgtaccgggatcgccgagacaaggtggcagcaggtgcttcggaaagcacacggtcaaatgagaggaccgtcattctgggaaagaaaacagaagtgaaagccacgagggagcaagaaagaaacagaccagaaaccatccgaacaaagccagaagagaaaatgttcgattctaaagagaaggcttccgaggagagaaacctaagatgggaagaattgacaaagttagataaggaagcgagacagagagaaagccagcagatgaaggagaaggctaaggagaaggactcactgaaggagaagagcgtgcgagagagagaggtgccgattagtctagaagtatcccaggacagaagagcagaggtgtccccgaaaggtttgcagacgcctgtgaaggatgctggtggtgggaccggtagagaggcagaagcaagagagctacggttcaggttgggcaccagtgatgccactggttctctgcaaggcgattccatgacagaaaccgtagcagaaaacatcgttaccagtatcctgaagcagttcactcagtctccagagacagaagcatctgctgattcttttccagacacaaaagtcacttacgtggacaggaaagagcttcctggggaaaggaaaacaaagactgaaatagttgtggagtctaaactgactgaggatgttgatgtttccgatgaagctggcctggactaccttttaagcaaggatattaaggaagtggggctgaaaggcaagtcagccgagcagatgataggagacatcatcaacctcggcctgaaagggagggaggggagagcaaaggtcgtcaacgtggagatcgtggaggagcccgtgagttatgtcagcggggagaagccggaggagttttccgtcccattcaaagtggaggaggtcgaagatgtgtcgccaggcccctgggggttggttaaggaggaggaaggttatggagaaagcgatgtcacattctcagttaatcagcatcgaaggaccaagcagccccaggagaacacgactcacgtggaagaagtgacagaggcaggtgattcagagggcgagcagagttattttgtgtccactccagatgaacaccccggggggcacgacagagatgacggctcggtgtacgggcagatccacatcgaggaggaatccaccatcaggtactcttggcaggatgaaatcgtgcaggggactcgaaggaggacacagaaggacggtgcagtgggcgagaaggttgtgaagcccttggatgtcccagcgccctctctggagggggacctgggttccactcactggaaagaacaagctagaagcggtgaatttcatgccgaacccacagtcattgaaaaagaaattaaaataccccacgaattccacacctccatgaagggcatctcctccaaggagccccggcagcagctggtggaggtcatcgggcagctggaggaaacccttcccgagcgcatgagggaggagctgtccgccctcaccagagaggggcagggtgggccggggagcgtttccgtggatgtcaagaaggtccagggtgctggtggcagttccgtgaccctggttgctgaagtcaacgtctcacaaactgtggatgccgatcggttagacctggaggagctgagcaaagatgaggccagtgagatggagaaggctgtggagtcggtggttcgggagagcctgagcaggcaacgcagcccagcgcctggcagcccagatgaggaaggtggagcggaggccccggctgctggcattcgcttcaggcgttgggccacccgggagctgtacatcccttcaggcgagagcgaggttgctggtggggcctctcacagctcgggacagcgcactccccagggcccagtgtcggccactgtggaggtcagcagccccacaggctttgcccagtcacaggtgctggaggatgtgagccaggctgcaaggcacataaaactcggcccctctgaagtctggaggactgagcgaatgtcatatgaaggacccactgcagaagtggtggaggtaagtgcgggaggtgacctaagtcaggcagcgagcccgaccggagccagccggtctgtgaggcatgtcacgctgggtcccggtcaaagtccactgtccagagaagtcatcttcctaggccctgcccctgcctgtccagaggcatggggctcgccagaacctggcccagcagagtcttctgcagatatggacggatcagggaggcacagcacatttggctgcagacaatttcatgctgaaaaggagattatttttcagggccccatttctgctgcagggaaggttggtgattattttgcaacagaagagtcagtgggtacccagacttctgtcaggcaactccagttaggccctaaagaagggttcagtgggcaaatccagttcacagctccactttcagacaaggtggagttgggtgtcataggagattctgtacacatggaagggttgccagggagcagcacatccatcaggcacatcagcattgggcctcagaggcatcagaccacccagcagatagtttaccatgggctggttccccaactgggggaatctggtgactcagagagcactgtgcacggagagggctcagcagatgtgcaccaggccactcacagtcatacctcgggtagacaaaccgttatgactgaaaagagcaccttccaaagtgtcgtttctgaatctccccaggaggatagtgcaggggacacatcaggggcagaaatgacatcgggtgttagcagatcctttaggcacattcgactaggtcctacagaaacggaaacctctgaacacattgccatccgtggacccgtgtccagaacatttgtgcttgctggttcagcggactcccctgagctaggcaagttagcagacagcagcagaacgctaaggcacattgcaccagggcccaaagaaacttcgtttacctttcagatggatgtgagtaacgtagaggcgatccgcagccggacacaggaagcgggagctctcggtgtgtctgaccgtggttcctggagagacgcggacagtaggaatgaccaggcagttggtgtgagctttaaggcctctgctggggaaggagaccaggcccacagagaacagggcaaggagcaggccatgtttgataagaaggtgcagctccagagaatggtagaccaaaggtcggtgatttcagatgaaaagaaagttgccctcctctatctagacaatgaggaggaggagaatgatgggcattggttttaataagcagaaacattttgttttaatggcagcctgttggcgacgtgccaacatccaaaggccttaacttattttaagaggccgagggagtctatgaaaatctccccttttttacttttttaaagagtactcccggcatggtcaatttcctttatagttaatccgtaaaggtttccagttaattcatgccttaaaaggcactgcaattttatttttgagttgggacttttacaaaacacttttttccctggagtcttctctccacttctggagatgaatttctatgttttgcacctggtcacagacatggcttgcatctgtttgaaactacaattaattatagatgtcaaaacattaaccagattaaagtaatatatttaagagtaaattttgcttgcatgtgctaatatgaaataacagactaacattttaggggaaaaataaatacaatttagactctaaaaagtcttttcaaaaagaaatgggaaataggcagactgtttatgttaaaaaaattcttgctaaatgatttcatctttaggaaaaaattacttgccatatagagctaaattcatcttaagacttgaatgaattgctttctatgtacagaactttaaacaatatagtatttatggcgaggacagctgtagtctgttgtgatatttcacattctatttgcacaggttccctggcactggtagggtagatgattattgggaatcgcttacagtaccatttcattttttggcactaggtcattaagtagcacacagtctgaatgcccttttctggagtggccagttcctatcagactgtgcagacttgcgcttctctgcaccttatcccttagcacccaaacatttaatttcactggtgggaggtagaccttgaagacaatgaagagaatgccgatactcagactgcagctggaccggcaagctggctgtgtacaggaaaattggaagcacacagtggactgtgcctcttaaagatgcctttcccaaccctccattcatgggatgcaggtctttctgagctcaagggtgaaagatgaatacaataacaaccatgaacccacctcacggaagctttttttgcactttgaacagaagtcattgcagttggggtgttttgtccagggaaacagtttattaaatagaaggatgttttggggaaggaactggatatctctcctgcagcccagcaccgagatacccaggacgggcctggggggcgagaaaggcccccatgctcatgggccgcggagtgtggacctgtagataggcaccaccgagtttaagatactgggatgagcatgcttcattggattcattttattttacacgtcagtattgttttaaagtttctgtctgtaaagtgtagcatcatatataaaaagagtttcgctagcagcgcattttttttagttcaggctagcttctttcacataatgctgtctcagctgtatttccagtaacacagcatcatcgcactgactgtggcgcactggggaataacagtctgagctagcaccaccctcagccaggctacaacgacagcactggagggtcttccctctcagattcacctggaggccctcagacccccagggtgcacgtctccccaggtcctgggagtggctaccgcaggtagtttctggagagcacgttttcttcattgataagtggaggagaaatgcagcacagctttcaagatactattttaaaaacaccatgaatcagatagggaaagaaagttgattggaatggcaagtttaaacctttgttgtccatctgccaaatgaactagtgattgtcagactggtatggaggtgactgctttgtaaggttttgtcgtttctaatacagacagagatgtgctgattttgttttagctgtaacaggtaatggtttttggatagatgattgactggtgagaatttggtcaaggtgacagcctcctgtctgatgacaggacagactggtggtgaggagtctaagtgggctcagtttgatgtcagtgtctgggctcatgacttgtaaatggaagctgatgtgaacaggtaattaatattatgacccacttctatttactttgggaaatatcttggatcttaattatcatctgcaagtttcaagaagtattctgccaaaagtatttacaagtatggactcatgagctattgttggttgctaaatgtgaatcacgcgggagtgagtgtgcccttcacactgtgacattgtgacattgtgacaagctccatgtcctttaaaatcagtcactctgcacacaagagaaatcaacttcgtggttggatggggccggaacacaaccagtctttttgtatttattgttactgagacaaaacagtactcactgagtgtttttcagtttcctactggtggttttgatattgtttgtttaagatgtatatttagaatgacatcatctaagaagctgattttgctaaactcctgttccctacaatgggaaatgtcacaagaatgtgcaaaaataaaaatctgaggaaaaaacccaaaaaaaaaaaaaaaaaaaaaaaaaaaaaaaaaaaaaaaacccccaaaaaaaaaaaaaaaaaaaaaaaaaaaaaaaaaaaaaaaaaaaaaagaaaaaaaaaaaaaaaaaaaaaaaaaaaaaaaaaaaaaaaaaaaaaaaaaaacacacacccaagcaacaaaaaaaaaaacaagagatacgacgagcacgagagcggcgcggacagaacagaaaaaaaaagagtgtcggagctcgaccccacaaagaaacataaacagggcaggccctgtagcgtgacaccagcaggaagatacaaaaaataaaggcgatgcgggtggtggacccgaccaactaaaaaaaaaaggaagcggcaggtgaggatagcgacagtacactaccatacaatgtcgagcaatcactatgcaaggacggcacaacaaataaaaaggacgcggcgggggagagtcaacaatacacaccccgccggcggggggtgtaataaaagacttaaacagcagggaacacggcagcacagccgcgga

SEQ ID NO: 308432 - DNA, 5668 bp, Homo sapiens
  misc_feature (33)..(33): n is a, c, g, or t
tgcctgctagtctgactctatagtgatccccgntactgcgctgggatattaaggaagtggggctgaaaggcaagtcagccgagcagatgataggagacatcatcaacctcggcctgaaagggagggaggggagagcaaaggtcgtcaacgtggagatcgtggaggagcccgtgagttatgtcagcggggagaagccggaggagttttccgtcccattcaaagtggaggaggtcgaagatgtgtcgccaggcccctgggggttggttaaggaggaggaaggttatggagaaagcgatgtcacattctcagttaatcagcatcgaaggaccaagcagccccaggagaacacgactcacgtggaagaagtgacagaggcaggtgattcagagggcgagcagagttattttgtgtccactccagatgaacaccccggggggcacgacagagatgacggctcggtgtacgggcagatccacatcgaggaggaatccaccatcaggtactcttggcaggatgaaatcgtgcaggggactcgaaggaggacacagaaggacggtgcagtgggcgagaaggttgtgaagcccttggatgtcccagcgccctctctggagggggacctgggttccactcactggaaagaacaagctagaagcggtgaatttcatgccgaacccacagtcattgaaaaagaaattaaaataccccacgaattccacacctccatgaagggcatctcctccaaggagccccggcagcagctggtggaggtcatcgggcagctggaggaaacccttcccgagcgcatgagggaggagctgtccgccctcaccagagaggggcagggtgggccggggagcgtttccgtggatgtcaagaaggtccagggtgctggtggcagttccgtgaccctggttgctgaagtcaacgtctcacaaactgtggatgccgatcggttagacctggaggagctgagcaaagatgaggccagtgagatggagaaggctgtggagtcggtggttcgggagagcctgagcaggcaacgcagcccagcgcctggcagcccagatgaggaaggtggagcggaggccccggctgctggcattcgcttcaggcgttgggccacccgggagctgtacatcccttcaggcgagagcgaggttgctggtggggcctctcacagctcgggacagcgcactccccagggcccagtgtcggccactgtggaggtcagcagccccacaggctttgcccagtcacaggtgctggaggatgtgagccaggctgcaaggcacataaaactcggcccctctgaagtctggaggactgagcgaatgtcatatgaaggacccactgcagaagtggtggaggtaagtgcgggaggtgacctaagtcaggcagcgagcccgaccggagccagccggtctgtgaggcatgtcacgctgggtcccggtcaaagtccactgtccagagaagtcatcttcctaggccctgcccctgcctgtccagaggcatggggctcgccagaacctggcccagcagagtcttctgcagatatggacggatcagggaggcacagcacatttggctgcagacaatttcatgctgaaaaggagattatttttcagggccccatttctgctgcagggaaggttggtgattattttgcaacagaagagtcagtgggtacccagacttctgtcaggcaactccagttaggccctaaagaagggttcagtgggcaaatccagttcacagctccactttcagacaaggtggagttgggtgtcataggagattctgtacacatggaagggttgccagggagcagcacatccatcaggcacatcagcattgggcctcagaggcatcagaccacccagcagatagtttaccatgggctggttccccaactgggggaatctggtgactcagagagcactgtgcacggagagggctcagcagatgtgcaccaggccactcacagtcatacctcgggtagacaaaccgttatgactgaaaagagcaccttccaaagtgtcgtttctgaatctccccaggaggatagtgcaggggacacatcaggggcagaaatgacatcgggtgttagcagatcctttaggcacattcgactaggtcctacagaaacggaaacctctgaacacattgccatccgtggacccgtgtccagaacatttgtgcttgctggttcagcggactcccctgagctaggcaagttagcagacagcagcagaacgctaaggcacattgcaccagggcccaaagaaacttcgtttacctttcagatggatgtgagtaacgtagaggcgatccgcagccggacacaggaagcgggagctctcggtgtgtctgaccgtggttcctggagagacgcggacagtaggaatgaccaggcagttggtgtgagctttaaggcctctgctggggaaggagaccaggcccacagagaacagggcaaggagcaggccatgtttgataagaaggtgcagctccagagaatggtagaccaaaggtcggtgatttcagatgaaaagaaagttgccctcctctatctagacaatgaggaggaggagaatgatgggcattggttttaataagcagaaacattttgttttaatggcagcctgttggcgacgtgccaacatccaaaggccttaacttattttaagaggccgagggagtctatgaaaatctccccttttttacttttttaaagagtactcccggcatggtcaatttcctttatagttaatccgtaaaggtttccagttaattcatgccttaaaaggcactgcaattttatttttgagttgggacttttacaaaacacttttttccctggagtcttctctccacttctggagatgaatttctatgttttgcacctggtcacagacatggcttgcatctgtttgaaactacaattaattatagatgtcaaaacattaaccagattaaagtaatatatttaagagtaaattttgcttgcatgtgctaatatgaaataacagactaacattttaggggaaaaataaatacaatttagactctaaaaagtcttttcaaaaagaaatgggaaataggcagactgtttatgttaaaaaaattcttgctaaatgatttcatctttaggaaaaaattacttgccatatagagctaaattcatcttaagacttgaatgaattgctttctatgtacagaactttaaacaatatagtatttatggcgaggacagctgtagtctgttgtgatatttcacattctatttgcacaggttccctggcactggtagggtagatgattattgggaatcgcttacagtaccatttcattttttggcactaggtcattaagtagcacacagtctgaatgcccttttctggagtggccagttcctatcagactgtgcagacttgcgcttctctgcaccttatcccttagcacccaaacatttaatttcactggtgggaggtagaccttgaagacaatgaagagaatgccgatactcagactgcagctggaccggcaagctggctgtgtacaggaaaattggaagcacacagtggactgtgcctcttaaagatgcctttcccaaccctccattcatgggatgcaggtctttctgagctcaagggtgaaagatgaatacaataacaaccatgaacccacctcacggaagctttttttgcactttgaacagaagtcattgcagttggggtgttttgtccagggaaacagtttattaaatagaaggatgttttggggaaggaactggatatctctcctgcagcccagcaccgagatacccaggacgggcctggggggcgagaaaggcccccatgctcatgggccgcggagtgtggacctgtagataggcaccaccgagtttaagatactgggatgagcatgcttcattggattcattttattttacacgtcagtattgttttaaagtttctgtctgtaaagtgtagcatcatatataaaaagagtttcgctagcagcgcattttttttagttcaggctagcttctttcacataatgctgtctcagctgtatttccagtaacacagcatcatcgcactgactgtggcgcactggggaataacagtctgagctagcaccaccctcagccaggctacaacgacagcactggagggtcttccctctcagattcacctggaggccctcagacccccagggtgcacgtctccccaggtcctgggagtggctaccgcaggtagtttctggagagcacgttttcttcattgataagtggaggagaaatgcagcacagctttcaagatactattttaaaaacaccatgaatcagatagggaaagaaagttgattggaatggcaagtttaaacctttgttgtccatctgccaaatgaactagtgattgtcagactggtatggaggtgactgctttgtaaggttttgtcgtttctaatacagacagagatgtgctgattttgttttagctgtaacaggtaatggtttttggatagatgattgactggtgagaatttggtcaaggtgacagcctcctgtctgatgacaggacagactggtggtgaggagtctaagtgggctcagtttgatgtcagtgtctgggctcatgacttgtaaatggaagctgatgtgaacaggtaattaatattatgacccacttctatttactttgggaaatatcttggatcttaattatcatctgcaagtttcaagaagtattctgccaaaagtatttacaagtatggactcatgagctattgttggttgctaaatgtgaatcacgcgggagtgagtgtgcccttcacactgtgacattgtgacattgtgacaagctccatgtcctttaaaatcagtcactctgcacacaagagaaatcaacttcgtggttggatggggccggaacacaaccagtctttttgtatttattgttactgagacaaaacagtactcactgagtgtttttcagtttcctactggtggttttgatattgtttgtttaagatgtatatttagaatgacatcatctaagaagctgattttgctaaactcctgttccctacaatgggaaatgtcacaagaatgtgcaaaaataaaaatctgaggaaaaaacccaaaaaaaaaaaaaaaaaaaaaaaaaaaaaaaaaaaaaaaacccccaaaaaaaaaaaaaaaaaaaaaaaaaaaaaaaaaaaaaaaaaaaaaagaaaaaaaaaaaaaaaaaaaaaaaaaaaaaaaaaaaaaaaaaaaaaaaaaaacacacacccaagcaacaaaaaaaaaaacaagagatacgacgagcacgagagcggcgcggacagaacagaaaaaaaaagagtgtcggagctcgaccccacaaagaaacataaacagggcaggccctgtagcgtgacaccagcaggaagatacaaaaaataaaggcgatgcgggtggtggacccgaccaactaaaaaaaaaaggaagcggcaggtgaggatagcgacagtacactaccatacaatgtcgagcaatcactatgcaaggacggcacaacaaataaaaaggacgcggcgggggagagtcaacaatacacaccccgccggcggggggtgtaataaaagacttaaacagcagggaacacggcagcacagccgcgga

SEQ ID NO: 308433 - DNA, 459 bp, Homo sapiens
acaaaacacagtgtcatgaaggttattcataattgcattatagaggaatgtagtatgtcataagtactttgtatgtagaaaactgttagaggttcaatattcaactcaagtataaaataataataagaaacacttctgatgttaggttgagttgaatattgaactctaacagttttctacatacaaaacacagtgtcatgaaggttattcataattgcattatagaggaatgtagtatgtcataagtactttgtaaagatttgacattcaactgtagtatccatatgttgcttaaatttccttatgagccccatgatggaaagacttaaagatgaatttgagaaaaattgaaagaaattagattatcaggttctgttaaattgttacatgtatcttgcttaaatttctgtttattaatttatatccacccaagtacataaagcaaatttggaggaaaca

SEQ ID NO: 308434 - DNA, 543 bp, Homo sapiens
  misc_feature (129)..(129): n is a, c, g, or t
  misc_feature (133)..(133): n is a, c, g, or t
  misc_feature (212)..(212): n is a, c, g, or t
gactctcacaaaaacgaacggaactttgcgtcctttgtgttacttggcgagttagatggtaacgaaatacgttataaagtcttctttaagctatctagaacgtagtatagaaggtacgagatgggctcntccntaagatgtaatatgttatcattagcatgtgtttatttcatatgtctcaagtgactatggtcactcaggatatacagtanaatcatctacaaagacatgttcactacatcaagtgtctatatatttatgatgaatgactctacagtttactacaaaacagtcgagtatcatattgcatataagatgttatgtcataagtactttgtaaagatttgacattcaactgtagtatccatatgttgcttaaatttccttatgagccccatgatggaaagacttaaagatgaatttgagaaaaattgaaagaaattagattatcaggttctgttaaattgttacatgtatcttgcttaaatttctgtttattaatttatatccacccaagtacataaagcaaatttggaggaaaca

SEQ ID NO: 308435 - DNA, 2738 bp, Homo sapiens
acgcggtgcccgagccggcctcgttctggctgccgccgtctcgctgaggcggagtaggatgaggcccgcggccgtggctccggcgtcggcgggggcagcagcagctgaggcagcagctgaggcagccgcgacggccgcgcccccccccgctgacctggattaggcccagcagctccgtggccgccgccgccccgcgggggggcggggtggggaagtgcttcgtctccccgcccccccccccccatcgctgcctcgcaggaggcgaacgccgcgaccccagcggagcccgcggcccagccttgatcccccaaccccgggggctggcatgagcggcccctcggcggcaccgtggggcggtggagtcgcctccgcctgatccccggcctgtcgcccgaccccacctcgccaaccgaggcggaccgcggagtgtgcgaacgaccccaccgctgctttctcctcccccagatcacgcaccccagctccggaagatggggaactgcctcaaatcccccacctcggatgacatctccctgcttcacgagtctcagtccgaccgggctagctttggcgaggggacggagccggatcaggagccgccgccgccatatcaggaacaagttccagttccagtctaccacccaacacctagccagactcggctagcaactcagctgactgaagaggaacaaattaggatagctcaaagaataggtcttatacaacatctgcctaaaggagtttatgaccctggaagagatggatcagaaaaaaagatccgggagtgtgtgatctgtatgatggactttgtttatggggacccaattcgatttctgccgtgcatgcacatctatcacctggactgtatagatgactggttgatgagatccttcacgtgcccctcctgcatggagccagttgatgcagcactgctttcatcctatgagactaattgagccagggtctcttatctgacttcaagtgaaccaccattttggtggttttgatcttttgtcactgagcccaaagagccagggattaggaattaagatcgtgcacaaaagtttccttaaaattcctggatggctgcagatgttgggggaaaaagtacgtgatattttagaaacttagtgggaaaagtaggatggtatttttatgtaaagccttgacccaatgtttaaaaatataattgtatttagatcttgttattgctccagtacataggaattgtgtaaagtgttaacagcagctgtatttgtttaaattgtgtgtattgaagattaggaaaaagatagtagttatttttcctaaatgaaataactttcttctcttccccttccccacccgaattcttttctgaagttgctggcatttgggtcaaggttttattaaaagctacattttataacactggcacacacaaaaaagtagttttaagcttgtttgcacagttctttttttccattggaaatggaattcattgccttaggtctttttaaatagtgtattattatcgttggggctggctctatgcttgaaaaccagtttatttataacctgttataagtgctatattctgtttgcagttaggaaatgcagaattcaaagtgatctcctagcttgtaagcaaactgagatgcactatcccttttctataaaaaataagttaatgtgtcaagaaaccaactctattaaggtggggtttaatattaccctttcctatgtgttttatctaattattttggttgttaatatggtgataatggaaagtcaagttaaattttaaatattaagaattctgatttattgagattgaattatgccaccacgtttatgtaaaaatgaaggtggcaccgtggtgagacctaatgagaaatagttactcagttgtaaaaattttgatttattctctttcttctgacctccttgcctcttgtcttgaaccatagcaaaaggatactgcatctctcattactgtagtgctgaggttattgaagttatacaaaacacatctcagtctctgtttcttggaaaggtatctattacatcctgctagctgactgacaaaactaagcagggagaataaagataattgtattttatgttttgcacacaaacgcagaatttgtataaccatatgacttcatagttgtgatctcaaaaaagaaggaatttctcctttgtttcttgcagttaatgtaagaatactttaaatctctaagcttctgaagtgttagaggtagagatggtctagtaaagatgtagtagtaatgttttatccatttagcatgtgtttattttttcatatgtactcaaaggtgacttattggttcacctcagtgatattacagctaaaaaaatcattcattagcaaaaggaaaagtggtctcaacctaacatcagaagtgtttcttattattattttatattgagttgaatattgaactctaacagttttctacatacaaaacacagtgtcatgaaggttattcataattgcattatagaggaatgtagtatgtcataagtactttgtaaagatttgacattcaactgtagtatccatatgttgcttaaatttccttatgagccccatgatggaaagacttaaagatgaatttgagaaaaattgaaagaaattagattatcaggttctgttaaattgttacatgtatcttgcttaaatttctgtttattaatttatatccacccaagtacataaagcaaatttggaggaaaca

SEQ ID NO: 308436 - DNA, 2668 bp, Homo sapiens
acgcggtgcccgagccggcctcgttctggctgccgccgtctcgctgaggcggagtaggatgaggcccgcggccgtggctccggcgtcggcgggggcagcagcagctgaggcagcagctgaggcagccgcgacggccgcgcccccccccgctgacctggattaggcccagcaccatcgctgcctcgcaggaggcgaacgccgcgaccccagcggagcccgcggcccagccttgatcccccaaccccgggggctggcatgagcggcccctcggcggcaccgtggggcggtggagtcgcctccgcctgatccccggcctgtcgcccgaccccacctcgccaaccgaggcggaccgcggagtgtgcgaacgaccccaccgctgctttctcctcccccagatcacgcaccccagctccggaagatggggaactgcctcaaatcccccacctcggatgacatctccctgcttcacgagtctcagtccgaccgggctagctttggcgaggggacggagccggatcaggagccgccgccgccatatcaggaacaagttccagttccagtctaccacccaacacctagccagactcggctagcaactcagctgactgaagaggaacaaattaggatagctcaaagaataggtcttatacaacatctgcctaaaggagtttatgaccctggaagagatggatcagaaaaaaagatccgggagtgtgtgatctgtatgatggactttgtttatggggacccaattcgatttctgccgtgcatgcacatctatcacctggactgtatagatgactggttgatgagatccttcacgtgcccctcctgcatggagccagttgatgcagcactgctttcatcctatgagactaattgagccagggtctcttatctgacttcaagtgaaccaccattttggtggttttgatcttttgtcactgagcccaaagagccagggattaggaattaagatcgtgcacaaaagtttccttaaaattcctggatggctgcagatgttgggggaaaaagtacgtgatattttagaaacttagtgggaaaagtaggatggtatttttatgtaaagccttgacccaatgtttaaaaatataattgtatttagatcttgttattgctccagtacataggaattgtgtaaagtgttaacagcagctgtatttgtttaaattgtgtgtattgaagattaggaaaaagatagtagttatttttcctaaatgaaataactttcttctcttccccttccccacccgaattcttttctgaagttgctggcatttgggtcaaggttttattaaaagctacattttataacactggcacacacaaaaaagtagttttaagcttgtttgcacagttctttttttccattggaaatggaattcattgccttaggtctttttaaatagtgtattattatcgttggggctggctctatgcttgaaaaccagtttatttataacctgttataagtgctatattctgtttgcagttaggaaatgcagaattcaaagtgatctcctagcttgtaagcaaactgagatgcactatcccttttctataaaaaataagttaatgtgtcaagaaaccaactctattaaggtggggtttaatattaccctttcctatgtgttttatctaattattttggttgttaatatggtgataatggaaagtcaagttaaattttaaatattaagaattctgatttattgagattgaattatgccaccacgtttatgtaaaaatgaaggtggcaccgtggtgagacctaatgagaaatagttactcagttgtaaaaattttgatttattctctttcttctgacctccttgcctcttgtcttgaaccatagcaaaaggatactgcatctctcattactgtagtgctgaggttattgaagttatacaaaacacatctcagtctctgtttcttggaaaggtatctattacatcctgctagctgactgacaaaactaagcagggagaataaagataattgtattttatgttttgcacacaaacgcagaatttgtataaccatatgacttcatagttgtgatctcaaaaaagaaggaatttctcctttgtttcttgcagttaatgtaagaatactttaaatctctaagcttctgaagtgttagaggtagagatggtctagtaaagatgtagtagtaatgttttatccatttagcatgtgtttattttttcatatgtactcaaaggtgacttattggttcacctcagtgatattacagctaaaaaaatcattcattagcaaaaggaaaagtggtctcaacctaacatcagaagtgtttcttattattattttatattgagttgaatattgaactctaacagttttctacatacaaaacacagtgtcatgaaggttattcataattgcattatagaggaatgtagtatgtcataagtactttgtaaagatttgacattcaactgtagtatccatatgttgcttaaatttccttatgagccccatgatggaaagacttaaagatgaatttgagaaaaattgaaagaaattagattatcaggttctgttaaattgttacatgtatcttgcttaaatttctgtttattaatttatatccacccaagtacataaagcaaatttggaggaaaca

SEQ ID NO: 308437 - DNA, 3449 bp, Homo sapiens
acgcggtgcccgagccggcctcgttctggctgccgccgtctcgctgaggcggagtaggatgaggcccgcggccgtggctccggcgtcggcgggggcagcagcagctgaggcagcagctgaggcagccgcgacggccgcgcccccccccgctgacctggattaggcccagcagctccgtggccgccgccgccccgcgggggggcggggtggggaagtgcttcgtctccccgcccccccccccccatcgctgcctcgcaggaggcgaacgccgcgaccccagcggagcccgcggcccagccttgatcccccaaccccgggggctggcatgagcggcccctcggcggcaccgtggggcggtggagtcgcctccgcctgatccccggcctgtcgcccgaccccacctcgccaaccgaggcggaccgcggagtgtgcgaacgaccccaccgctgctttctcctcccccagatcacgcaccccagctccggaagatggggaactgcctcaaatcccccacctcggatgacatctccctgcttcacgagtctcagtccgaccgggctagctttggcgaggggacggagccggatcaggagccgccgccgccatatcaggaacaagttccagttccagtctaccacccaacacctagccagactcggctagcaactcagctgactgaagaggaacaaattaggatagctcaaagaataggtcttatacaacatctgcctaaaggagtttatgaccctggaagagatggatcagaaaaaaagatccgggagtgtgtgatctgtatgatggactttgtttatggggacccaattcgatttctgccgtgcatgcacatctatcacctggactgtatagatgactggttgatgagatccttcacgtgcccctcctgcatggagccagttgatgcagcactgctttcatcctatgagactaattgagccagggtctcttatctgacttcaagtgaaccaccattttggtggttttgatcttttgtcactgagcccaaagagccagggattaggaattaagatcgtgcacaaaagtttccttaaaattcctggatggctgcagatgttgggggaaaaagtacgtgatattttagaaacttagtgggaaaagtaggatggtatttttatgtaaagccttgacccaatgtttaaaaatataattgtatttagatcttgttattgctccagtacataggaattgtgtaaagtgttaacagcagctgtatttgtttaaattgtgtgtattgaagattaggaaaaagatagtagttatttttcctaaatgaaataactttcttctcttccccttccccacccgaattcttttctgaagttgctggcatttgggtcaaggttttattaaaagctacattttataacactggcacacacaaaaaagtagttttaagcttgtttgcacagttctttttttccattggaaatggaattcattgccttaggtctttttaaatagtgtattattatcgttggggctggctctatgcttgaaaaccagtttatttataacctgttataagtgctatattctgtttgcagttaggaaatgcagaattcaaagtgatctcctagcttgtaagcaaactgagatgcactatcccttttctataaaaaataagttaatgtgtcaagaaaccaactctattaaggtggggtttaatattaccctttcctatgtgttttatctaattattttggttgttaatatggtgataatggaaagtcaagttaaattttaaatattaagaattctgatttattgagattgaattatgccaccacgtttatgtaaaaatgaaggtggcaccgtggtgagacctaatgagaaatagttactcagttgtaaaaattttgatttattctctttcttctgacctccttgcctcttgtcttgaaccatagcaaaaggatactgcatctctcattactgtagtgctgaggttattgaagttatacaaaacacatctcagtctctgtttcttggaaaggtatctattacatcctgctagctgactgacaaaactaagcagggagaataaagataattgtattttatgttttgcacacaaacgcagaatttgtataaccatatgacttcatagttgtgatctcaaaaaagaaggaatttctcctttgtttcttgcagttaatgtaagaatactttaaatctctaagcttctgaagtgttagaggtagagatggtctagtaaagatgtagtagtaatgttttatccatttagcatgtgtttattttttcatatgtactcaaaggtgacttattggttcacctcagtgatattacagctaaaaaaatcattcattagcaaaaggaaaagtggtctcaacctaacatcagaagtgtttcttattattattttatattgagttgaatattgaactctaacagttttctacatacaaaacacagtgtcatgaaggttattcataattgcattatagaggaatgtagtatgtcataagtactttgtaaagatttgacattcaactgtagtatccatatgttgcttaaatttccttatgagccccatgatggaaagacttaaagatgaatttgagaaaaattgaaagaaattagattatcaggttctgttaaattgttacatgtatcttgcttaaatttctgtttattaatttatatccacccaagtacataaagcaaatttggaggaaacaactgaagttgtgcaatattttctgataattgctttttttattcttgtgttttctacttaaacataatgtctgtgtcatcaagtattatagtcagacttttctttttttctagattgttaaaattggcaaatgaacttttttaaaaatcaaaaaaaaaaaaaaaaaaaaaaaaaaagaaaaaagagggggggcgagagagagaggattacccgaggagggccaaagtttaagggtaccaaggtttttggaacaggggggccaaatagagaacgccaaataaacacaaacgacaggccccggttaaaccacggtacgaacggggacacagcgcacccggggcacactggaaaggaccctcctcggggggggaccaacggggacacataccgaagactctaacgccaaggacaactcaacctccccacgcccacggggcaccccagagcaaacatcgcgcgacaaaccaattgcccacgactaactgacattgcagggggcaggaccaacaacaaacgaggaaccagcacagagaaacaaacgcacgaggcacgacagagagacgaggagggagggggccaggcagcgggagggaagagacgaggacgagcgcgggaggaggcccaggcacgagggccgacgacagcggcaggaaacagagagacacgaagctgaccaccacgccatagacaacgagcaacaacgagcaaccac

SEQ ID NO: 308438 - DNA, 2887 bp, Homo sapiens
acgcggtgcccgagccggcctcgttctggctgccgccgtctcgctgaggcggagtaggatgaggcccgcggccgtggctccggcgtcggcgggggcagcagcagctgaggcagcagctgaggcagccgcgacggccgcgcccccccccgctgacctggattaggcccagcagctccgtggccgccgccgccccgcgggggggcggggtggggaagtgcttcgtctccccgcccccccccccccatcgctgcctcgcaggaggcgaacgccgcgaccccagcggagcccgcggcccagccttgatcccccaaccccgggggctggcatgagcggcccctcggcggcaccgtggggcggtggagtcgcctccgcctgatccccggcctgtcgcccgaccccacctcgccaaccgaggcggaccgcggagtgtgcgaacgaccccaccgctgctttctcctcccccagatcacgcaccccagctccggaagatggggaactgcctcaaatcccccacctcggatgacatctccctgcttcacgagtctcagtccgaccgggctagctttggcgaggggacggagccggatcaggagccgccgccgccatatcaggaacaagttccagttccagtctaccacccaacacctagccagactcggctagcaactcagctgactgaagaggaacaaattaggatagctcaaagaataggtcttatacaacatctgcctaaaggagtttatgaccctggaagagatggatcagaaaaaaagatccgggagtgtgtgatctgtatgatggactttgtttatggggacccaattcgatttctgccgtgcatgcacatctatcacctggactgtatagatgactggttgatgagatccttcacgtgcccctcctgcatggagccagttgatgcagcactgctttcatcctatgagactaattgagccagggtctcttatctgacttcaagtgaaccaccattttggtggttttgatcttttgtcactgagcccaaagagccagggattaggaattaagatcgtgcacaaaagtttccttaaaattcctggatggctgcagatgttgggggaaaaagtacgtgatattttagaaacttagtgggaaaagtaggatggtatttttatgtaaagccttgacccaatgtttaaaaatataattgtatttagatcttgttattgctccagtacataggaattgtgtaaagtgttaacagcagctgtatttgtttaaattgtgtgtattgaagattaggaaaaagatagtagttatttttcctaaatgaaataactttcttctcttccccttccccacccgaattcttttctgaagttgctggcatttgggtcaaggttttattaaaagctacattttataacactggcacacacaaaaaagtagttttaagcttgtttgcacagttctttttttccattggaaatggaattcattgccttaggtctttttaaatagtgtattattatcgttggggctggctctatgcttgaaaaccagtttatttataacctgttataagtgctatattctgtttgcagttaggaaatgcagaattcaaagtgatctcctagcttgtaagcaaactgagatgcactatcccttttctataaaaaataagttaatgtgtcaagaaaccaactctattaaggtggggtttaatattaccctttcctatgtgttttatctaattattttggttgttaatatggtgataatggaaagtcaagttaaattttaaatattaagaattctgatttattgagattgaattatgccaccacgtttatgtaaaaatgaaggtggcaccgtggtgagacctaatgagaaatagttactcagttgtaaaaattttgatttattctctttcttctgacctccttgcctcttgtcttgaaccatagcaaaaggatactgcatctctcattactgtagtgctgaggttattgaagttatacaaaacacatctcagtctctgtttcttggaaaggtatctattacatcctgctagctgactgacaaaactaagcagggagaataaagataattgtattttatgttttgcacacaaacgcagaatttgtataaccatatgacttcatagttgtgatctcaaaaaagaaggaatttctcctttgtttcttgcagttaatgtaagaatactttaaatctctaagcttctgaagtgttagaggtagagatggtctagtaaagatgtagtagtaatgttttatccatttagcatgtgtttattttttcatatgtactcaaaggtgacttattggttcacctcagtgatattacagctaaaaaaatcattcattagcaaaaggaaaagtggtctcaacctaacatcagaagtgtttcttattattattttatattgagttgaatattgaactctaacagttttctacatacaaaacacagtgtcatgaaggttattcataattgcattatagaggaatgtagtatgtcataagtactttgtaaagatttgacattcaactgtagtatccatatgttgcttaaatttccttatgagccccatgatggaaagacttaaagatgaatttgagaaaaattgaaagaaattagattatcaggttctgttaaattgttacatgtatcttgcttaaatttctgtttattaatttatatccacccaagtacataaagcaaatttggaggaaacaactgaagttgtgcaatattttctgataattgctttttttattcttgtgttttctacttaaacataatgtctgtgtcatcaagtattatagtcagacttttctttttttctagattgttaaaattggcaaatgaacttttttaaaaatca

SEQ ID NO: 308439 - DNA, 2568 bp, Homo sapiens
acgcggtgcccgagccggcctcgttctggctgccgccgtctcgctgaggcggagtaggatgaggcccgcggccgtggctccggcgtcggcgggggcagcagcagctgaggcagcagctgaggcagccgcgacggccgcgcccccccccgctgacctggattaggcccagcagctccgtggccgccgccgccccgcgggggggcggggtggggaagtgcttcgtctccccgcccccccccccccatcgctgcctcgcaggaggcgaacgccgcgaccccagcggagcccgcggcccagccttgatcccccaaccccgggggctggcatgagcggcccctcggcggcaccgtggggcggtggagtcgcctccgcctgatccccggcctgtcgcccgaccccacctcgccaaccgaggcggaccgcggagtgtgcgaacgaccccaccgctgctttctcctcccccagatcacgcaccccagctccggaagatggggaactgcctcaaatcccccacctcggatgacatctccctgcttcacgagtctcagtccgaccgggctagctttggcgaggggacggagccggatcaggagccgccgccgccatatcaggtgtgtgatctgtatgatggactttgtttatggggacccaattcgatttctgccgtgcatgcacatctatcacctggactgtatagatgactggttgatgagatccttcacgtgcccctcctgcatggagccagttgatgcagcactgctttcatcctatgagactaattgagccagggtctcttatctgacttcaagtgaaccaccattttggtggttttgatcttttgtcactgagcccaaagagccagggattaggaattaagatcgtgcacaaaagtttccttaaaattcctggatggctgcagatgttgggggaaaaagtacgtgatattttagaaacttagtgggaaaagtaggatggtatttttatgtaaagccttgacccaatgtttaaaaatataattgtatttagatcttgttattgctccagtacataggaattgtgtaaagtgttaacagcagctgtatttgtttaaattgtgtgtattgaagattaggaaaaagatagtagttatttttcctaaatgaaataactttcttctcttccccttccccacccgaattcttttctgaagttgctggcatttgggtcaaggttttattaaaagctacattttataacactggcacacacaaaaaagtagttttaagcttgtttgcacagttctttttttccattggaaatggaattcattgccttaggtctttttaaatagtgtattattatcgttggggctggctctatgcttgaaaaccagtttatttataacctgttataagtgctatattctgtttgcagttaggaaatgcagaattcaaagtgatctcctagcttgtaagcaaactgagatgcactatcccttttctataaaaaataagttaatgtgtcaagaaaccaactctattaaggtggggtttaatattaccctttcctatgtgttttatctaattattttggttgttaatatggtgataatggaaagtcaagttaaattttaaatattaagaattctgatttattgagattgaattatgccaccacgtttatgtaaaaatgaaggtggcaccgtggtgagacctaatgagaaatagttactcagttgtaaaaattttgatttattctctttcttctgacctccttgcctcttgtcttgaaccatagcaaaaggatactgcatctctcattactgtagtgctgaggttattgaagttatacaaaacacatctcagtctctgtttcttggaaaggtatctattacatcctgctagctgactgacaaaactaagcagggagaataaagataattgtattttatgttttgcacacaaacgcagaatttgtataaccatatgacttcatagttgtgatctcaaaaaagaaggaatttctcctttgtttcttgcagttaatgtaagaatactttaaatctctaagcttctgaagtgttagaggtagagatggtctagtaaagatgtagtagtaatgttttatccatttagcatgtgtttattttttcatatgtactcaaaggtgacttattggttcacctcagtgatattacagctaaaaaaatcattcattagcaaaaggaaaagtggtctcaacctaacatcagaagtgtttcttattattattttatattgagttgaatattgaactctaacagttttctacatacaaaacacagtgtcatgaaggttattcataattgcattatagaggaatgtagtatgtcataagtactttgtaaagatttgacattcaactgtagtatccatatgttgcttaaatttccttatgagccccatgatggaaagacttaaagatgaatttgagaaaaattgaaagaaattagattatcaggttctgttaaattgttacatgtatcttgcttaaatttctgtttattaatttatatccacccaagtacataaagcaaatttggaggaaaca

SEQ ID NO: 308440 - DNA, 3501 bp, Homo sapiens
acgcggtgcccgagccggcctcgttctggctgccgccgtctcgctgaggcggagtaggatgaggcccgcggccgtggctccggcgtcggcgggggcagcagcagctgaggcagcagctgaggcagccgcgacggccgcgcccccccccgctgacctggattaggcccagcagctccgtggccgccgccgccccgcgggggggcggggtggggaagtgcttcgtctccccgcccccccccccccatcgctgcctcgcaggaggcgaacgccgcgaccccagcggagcccgcggcccagccttgatcccccaaccccgggggctggcatgagcggcccctcggcggcaccgtggggcggtggagtcgcctccgcctgatccccggcctgtcgcccgaccccacctcgccaaccgaggcggaccgcggagtgtgcgaacgaccccaccgctgctttctcctcccccagatcacgcaccccagctccggaagatggggaactgcctcaaatcccccacctcggatgacatctccctgcttcacgagtctcagtccgaccgggctagctttggcgaggggacggagccggatcaggagccgccgccgccatatcaggaacaagttccagttccagtctaccacccaacacctagccagactcggctagcaactcagctgactgaagaggaacaaattaggatagctcaaagaataggtcttatacaacatctgcctaaaggagtttatgaccctggaagagatggatcagaaaaaaagatccgggagtgtgtgatctgtatgatggactttgtttatggggacccaattcgatttctgccgtgcatgcacatctatcacctggactgtatagatgactggttgatgagatccttcacgtgcccctcctgcatggagccagttgatgcagcactgctttcatcctatgagactaattgagccagggtctcttatctgacttcaagtgaaccaccattttggtggttttgatcttttgtcactgagcccaaagagccagggattaggaattaagatcgtgcacaaaagtttccttaaaattcctggatggctgcagatgttgggggaaaaagtacgtgatattttagaaacttagtgggaaaagtaggatggtatttttatgtaaagccttgacccaatgtttaaaaatataattgtatttagatcttgttattgctccagtacataggaattgtgtaaagtgttaacagcagctgtatttgtttaaattgtgtgtattgaagattaggaaaaagatagtagttatttttcctaaatgaaataactttcttctcttccccttccccacccgaattcttttctgaagttgctggcatttgggtcaaggttttattaaaagctacattttataacactggcacacacaaaaaagtagttttaagcttgtttgcacagttctttttttccattggaaatggaattcattgccttaggtctttttaaatagtgtattattatcgttggggctggctctatgcttgaaaaccagtttatttataacctgttataagtgctatattctgtttgcagttaggaaatgcagaattcaaagtgatctcctagcttgtaagcaaactgagatgcactatcccttttctataaaaaataagttaatgtgtcaagaaaccaactctattaaggtggggtttaatattaccctttcctatgtgttttatctaattattttggttgttaatatggtgataatggaaagtcaagttaaattttaaatattaagaattctgatttattgagattgaattatgccaccacgtttatgtaaaaatgaaggtggcaccgtggtgagacctaatgagaaatagttactcagttgtaaaaattttgatttattctctttcttctgacctccttgcctcttgtcttgaaccatagcaaaaggatactgcatctctcattactgtagtgctgaggttattgaagttatacaaaacacatctcagtctctgtttcttggaaaggtatctattacatcctgctagctgactgacaaaactaagcagggagaataaagataattgtattttatgttttgcacacaaacgcagaatttgtataaccatatgacttcatagttgtgatctcaaaaaagaaggaatttctcctttgtttcttgcagttaatgtaagaatactttaaatctctaagcttctgaagtgttagaggtagagatggtctagtaaagatgtagtagtaatgttttatccatttagcatgtgtttattttttcatatgtactcaaaggtgacttattggttcacctcagtgatattacagctaaaaaaatcattcattagcaaaaggaaaagtggtctcaacctaacatcagaagtgtttcttattattattttatattgagttgaatattgaactctaacagttttctacatacaaaacacagtgtcatgaaggttattcataattgcattatagaggaatgtagtatgtcataagtactttgtaaagatttgacattcaactgtagtatccatatgttgcttaaatttccttatgagccccatgatggaaagacttaaagatgaatttgagaaaaattgaaagaaattagattatcaggttctgttaaattgttacatgtatcttgcttaaatttctgtttattaatttatatccacccaagtacataaagcaaatttggaggaaacaactgaagttgtgcaatattttctgataattgctttttttattcttgtgttttctacttaaacataatgtctgtgtcatcaagtattatagtcagacttttctttttttctagattgttaaaattggcaaatgaacttttttaaaaatcatcttccatgttgcagttagtctttcttttcattacaagtctttcacagaagtttggtggtaatattgaaagaactagcattgggcagaatgtgtcttttttaggcactttatattctcaacatacaatgttaagaaccatcaattttgacttttactaagttgttaaataaagttataatacagctgtgaagggctaaagttagagttgattacataagtaagtattccccatataatcttttaaaaagttgtgtatgattattttaaaatctctctctctaaaaaaaaaaaaaaaaaaaaaaaaaaaaatttgggggggggtgtgggcctggaaaaaggtttttaagaaccttgtggtggggggcgcgggggccccccatgatgggtcagcgtctgacaccactgtggggcgacaaaggtggggcccacaggaagaagaacccgcggacacacacaaacgtgggtgggggttttccccccaaataaaaagcgcccgcggggggacacaccagcggtgttttctgtgaaccaactcccaatgggggtcccgaggggcacacacgcggggctcttcaaccagggggccccagagaaggcgagaatataaagtacc

SEQ ID NO: 308441 - DNA, 1622 bp, Homo sapiens
tgagagaccgtgttgcaatgtgtggcacggtctctcatgagagaccgtgttccaatgtttaaaaatataattgtatttagatcttgttattgctccagtacataggaattgtgtaaagtgttaacagcagctgtatttgtttaaattgtgtgtattgaagattaggaaaaagatagtagttatttttcctaaatgaaataactttcttctcttccccttccccacccgaattcttttctgaagttgctggcatttgggtcaaggttttattaaaagctacattttataacactggcacacacaaaaaagtagttttaagcttgtttgcacagttctttttttccattggaaatggaattcattgccttaggtctttttaaatagtgtattattatcgttggggctggctctatgcttgaaaaccagtttatttataacctgttataagtgctatattctgtttgcagttaggaaatgcagaattcaaagtgatctcctagcttgtaagcaaactgagatgcactatcccttttctataaaaaataagttaatgtgtcaagaaaccaactctattaaggtggggtttaatattaccctttcctatgtgttttatctaattattttggttgttaatatggtgataatggaaagtcaagttaaattttaaatattaagaattctgatttattgagattgaattatgccaccacgtttatgtaaaaatgaaggtggcaccgtggtgagacctaatgagaaatagttactcagttgtaaaaattttgatttattctctttcttctgacctccttgcctcttgtcttgaaccatagcaaaaggatactgcatctctcattactgtagtgctgaggttattgaagttatacaaaacacatctcagtctctgtttcttggaaaggtatctattacatcctgctagctgactgacaaaactaagcagggagaataaagataattgtattttatgttttgcacacaaacgcagaatttgtataaccatatgacttcatagttgtgatctcaaaaaagaaggaatttctcctttgtttcttgcagttaatgtaagaatactttaaatctctaagcttctgaagtgttagaggtagagatggtctagtaaagatgtagtagtaatgttttatccatttagcatgtgtttattttttcatatgtactcaaaggtgacttattggttcacctcagtgatattacagctaaaaaaatcattcattagcaaaaggaaaagtggtctcaacctaacatcagaagtgtttcttattattattttatattgagttgaatattgaactctaacagttttctacatacaaaacacagtgtcatgaaggttattcataattgcattatagaggaatgtagtatgtcataagtactttgtaaagatttgacattcaactgtagtatccatatgttgcttaaatttccttatgagccccatgatggaaagacttaaagatgaatttgagaaaaattgaaagaaattagattatcaggttctgttaaattgttacatgtatcttgcttaaatttctgtttattaatttatatccacccaagtacataaagcaaatttggaggaaaca

SEQ ID NO: 308442 - DNA, 3300 bp, Homo sapiens
acgcggtgcccgagccggcctcgttctggctgccgccgtctcgctgaggcggagtaggatgaggcccgcggccgtggctccggcgtcggcgggggcagcagcagctgaggcagcagctgaggcagccgcgacggccgcgcccccccccgctgacctggattaggcccagcagctccgtggccgccgccgccccgcgggggggcggggtggggaagtgcttcgtctccccgcccccccccccccatcgctgcctcgcaggaggcgaacgccgcgaccccagcggagcccgcggcccagccttgatcccccaaccccgggggctggcatgagcggcccctcggcggcaccgtggggcggtggagtcgcctccgcctgatccccggcctgtcgcccgaccccacctcgccaaccgaggcggaccgcggagtgtgcgaacgaccccaccgctgctttctcctcccccagatcacgcaccccagctccggaagatggggaactgcctcaaatcccccacctcggatgacatctccctgcttcacgagtctcagtccgaccgggctagctttggcgaggggacggagccggatcaggagccgccgccgccatatcaggaacaagttccagttccagtctaccacccaacacctagccagactcggctagcaactcagctgactgaagaggaacaaattaggatagctcaaagaataggtcttatacaacatctgcctaaaggagtttatgaccctggaagagatggatcagaaaaaaagatccgggagtgtgtgatctgtatgatggactttgtttatggggacccaattcgatttctgccgtgcatgcacatctatcacctggactgtatagatgactggttgatgagatccttcacgtgcccctcctgcatggagccagttgatgcagcactgctttcatcctatgagactaattgagccagggtctcttatctgacttcaagtgaaccaccattttggtggttttgatcttttgtcactgagcccaaagagccagggattaggaattaagatcgtgcacaaaagtttccttaaaattcctggatggctgcagatgttgggggaaaaagtacgtgatattttagaaacttagtgggaaaagtaggatggtatttttatgtaaagccttgacccaatgtttaaaaatataattgtatttagatcttgttattgctccagtacataggaattgtgtaaagtgttaacagcagctgtatttgtttaaattgtgtgtattgaagattaggaaaaagatagtagttatttttcctaaatgaaataactttcttctcttccccttccccacccgaattcttttctgaagttgctggcatttgggtcaaggttttattaaaagctacattttataacactggcacacacaaaaaagtagttttaagcttgtttgcacagttctttttttccattggaaatggaattcattgccttaggtctttttaaatagtgtattattatcgttggggctggctctatgcttgaaaaccagtttatttataacctgttataagtgctatattctgtttgcagttaggaaatgcagaattcaaagtgatctcctagcttgtaagcaaactgagatgcactatcccttttctataaaaaataagttaatgtgtcaagaaaccaactctattaaggtggggtttaatattaccctttcctatgtgttttatctaattattttggttgttaatatggtgataatggaaagtcaagttaaattttaaatattaagaattctgatttattgagattgaattatgccaccacgtttatgtaaaaatgaaggtggcaccgtggtgagacctaatgagaaatagttactcagttgtaaaaattttgatttattctctttcttctgacctccttgcctcttgtcttgaaccatagcaaaaggatactgcatctctcattactgtagtgctgaggttattgaagttatacaaaacacatctcagtctctgtttcttggaaaggtatctattacatcctgctagctgactgacaaaactaagcagggagaataaagataattgtattttatgttttgcacacaaacgcagaatttgtataaccatatgacttcatagttgtgatctcaaaaaagaaggaatttctcctttgtttcttgcagttaatgtaagaatactttaaatctctaagcttctgaagtgttagaggtagagatggtctagtaaagatgtagtagtaatgttttatccatttagcatgtgtttattttttcatatgtactcaaaggtgacttattggttcacctcagtgatattacagctaaaaaaatcattcattagcaaaaggaaaagtggtctcaacctaacatcagaagtgtttcttattattattttatattgagttgaatattgaactctaacagttttctacatacaaaacacagtgtcatgaaggttattcataattgcattatagaggaatgtagtatgtcataagtactttgtaaagatttgacattcaactgtagtatccatatgttgcttaaatttccttatgagccccatgatggaaagacttaaagatgaatttgagaaaaattgaaagaaattagattatcaggttctgttaaattgttacatgtatcttgcttaaatttctgtttattaatttatatccacccaagtacataaagcaaatttggaggaaacaaaaaaaaaaaaaaaaaaaaaaaaaaagaaaaaagagggggggcgagagagagaggattacccgaggagggccaaagtttaagggtaccaaggtttttggaacaggggggccaaatagagaacgccaaataaacacaaacgacaggccccggttaaaccacggtacgaacggggacacagcgcacccggggcacactggaaaggaccctcctcggggggggaccaacggggacacataccgaagactctaacgccaaggacaactcaacctccccacgcccacggggcaccccagagcaaacatcgcgcgacaaaccaattgcccacgactaactgacattgcagggggcaggaccaacaacaaacgaggaaccagcacagagaaacaaacgcacgaggcacgacagagagacgaggagggagggggccaggcagcgggagggaagagacgaggacgagcgcgggaggaggcccaggcacgagggccgacgacagcggcaggaaacagagagacacgaagctgaccaccacgccatagacaacgagcaacaacgagcaaccac

SEQ ID NO: 308443 - DNA, 2811 bp, Homo sapiens
acgcggtgcccgagccggcctcgttctggctgccgccgtctcgctgaggcggagtaggatgaggcccgcggccgtggctccggcgtcggcgggggcagcagcagctgaggcagcagctgaggcagccgcgacggccgcgcccccccccgctgacctggattaggcccagcagctccgtggccgccgccgccccgcgggggggcggggtggggaagtgcttcgtctccccgcccccccccccccatcgctgcctcgcaggaggcgaacgccgcgaccccagcggagcccgcggcccagccttgatcccccaaccccgggggctggcatgagcggcccctcggcggcaccgtggggcggtggagtcgcctccgcctgatccccggcctgtcgcccgaccccacctcgccaaccgaggcggaccgcggagtgtgcgaacgaccccaccgctgctttctcctcccccagatcacgcaccccagctccggaagatggggaactgcctcaaatcccccacctcggatgacatctccctgcttcacgagtctcagtccgaccgggctagctttggcgaggggacggagccggatcaggagccgccgccgccatatcaggaacaagttccagttccagtctaccacccaacacctagccagactcggctagcaactcagctgactgaagaggaacaaattaggatagctcaaagaataggtcttatacaacatctgcctaaaggagtttatgaccctggaagagatggatcagaaaaaaagatccgggagtgtgtgatctgtatgatggactttgtttatggggacccaattcgatttctgccgtgcatgcacatctatcacctggactgtatagatgactggttgatgagatccttcacgtgcccctcctgcatggagccagttgatgcagcactgctttcatcctatgagactaattgagccagggtctcttatctgacttcaagtgaaccaccattttggtggttttgatcttttgtcactgagcccaaagagccagggattaggaattaagatcgtgcacaaaagtttccttaaaattcctggatggctgcagatgttgggggaaaaagtacgtgatattttagaaacttagtgggaaaagtaggatggtatttttatgtaaagccttgacccaatgtttaaaaatataattgtatttagatcttgttattgctccagtacataggaattgtgtaaagtgttaacagcagctgtatttgtttaaattgtgtgtattgaagattaggaaaaagatagtagttatttttcctaaatgaaataactttcttctcttccccttccccacccgaattcttttctgaagttgctggcatttgggtcaaggttttattaaaagctacattttataacactggcacacacaaaaaagtagttttaagcttgtttgcacagttctttttttccattggaaatggaattcattgccttaggtctttttaaatagtgtattattatcgttggggctggctctatgcttgaaaaccagtttatttataacctgttataagtgctatattctgtttgcagttaggaaatgcagaattcaaagtgatctcctagcttgtaagcaaactgagatgcactatcccttttctataaaaaataagttaatgtgtcaagaaaccaactctattaaggtggggtttaatattaccctttcctatgtgttttatctaattattttggttgttaatatggtgataatggaaagtcaagttaaattttaaatattaagaattctgatttattgagattgaattatgccaccacgtttatgtaaaaatgaaggtggcaccgtggtgagacctaatgagaaatagttactcagttgtaaaaattttgatttattctctttcttctgacctccttgcctcttgtcttgaaccatagcaaaaggatactgcatctctcattactgtagtgctgaggttattgaagttatacaaaacacatctcagtctctgtttcttggaaaggtatctattacatcctgctagctgactgacaaaactaagcagggagaataaagataattgtattttatgttttgcacacaaacgcagaatttgtataaccatatgacttcatagttgtgatctcaaaaaagaaggaatttctcctttgtttcttgcagttaatgtaagaatactttaaatctctaagcttctgaagtgttagaggtagagatggtctagtaaagatgtagtagtaatgttttatccatttagcatgtgtttattttttcatatgtactcaaaggtgacttattggttcacctcagtgatattacagctaaaaaaatcattcattagcaaaaggaaaagtggtctcaacctaacatcagaagtgtttcttattattattttatattgagttgaatattgaactctaacagttttctacatacaaaacacagtgtcatgaaggttattcataattgcattatagaggaatgtagtatgtcataagtactttgtaaagatttgacattcaactgtagtatccatatgttgcttaaatttccttatgagccccatgatggaaagacttaaagatgaatttgagaaaaattgaaagaaattagattatcaggttctgttaaattgttacatgtatcttgcttaaatttctgtttattaatttatatccacccaagtacataaagcaaatttggaggaaacacccaataacataacttcgaggggggccccggaccctttgccctatagtggagccgattaccatccccggccct

SEQ ID NO: 308444 - DNA, 1989 bp, Homo sapiens
acgcggtgcccgagccggcctcgttctggctgccgccgtctcgctgaggcggagtaggatgaggcccgcggccgtggctccggcgtcggcgggggcagcagcagctgaggcagcagctgaggcagccgcgacggccgcgcccccccccgctgacctggattaggcccagcagctccgtggccgccgccgccccgcgggggggcggggtggggaagtgcttcgtctccccgcccccccccccccatcgctgcctcgcaggaggcgaacgccgcgaccccagcggagcccgcggcccagccttgatcccccaaccccgggggctggcatgagcggcccctcggcggcaccgtggggcggtggagtcgcctccgcctgatccccggcctgtcgcccgaccccacctcgccaaccgaggcggaccgcggagtgtgcgaacgaccccaccgctgctttctcctcccccagatcacgcaccccagctccggaagatggggaactgcctcaaatcccccacctcggatgacatctccctgcttcacgagtctcagtccgaccgggctagctttggcgaggggacggagccggatcaggagccgccgccgccatatcaggaacaagttccagttccagtctaccacccaacacctagccagactcggctagcaactcagctgactgaagaggaacaaattaggatagctcaaagaataggtcttatacaacatctgcctaaaggagtttatgaccctggaagagatggatcagaaaaaaagatccgggagtgtgtgatctgtatgatggactttgtttatggggacccaattcgatttctgccgtgcatgcacatctatcacctggactgtatagatgactggttgatgagatccttcacgtgcccctcctgcatggagccagttgatgcagcactgctttcatcctatgagactaattgagccagggtctcttatctgacttcaagtgaaccaccattttggtggttttgatcttttgtcactgagcccaaagagccagggattaggaattaagatcgtgcacaaaagtttccttaaaattcctggatggctgcagatgttgggggaaaaagtacgtgatattttagaaacttagtgggaaaagtaggatggtatttttatgtaaagccttgacccaatgtttaaaaatataattgtatttagatcttgttattgctccagtacataggaattgtgtaaagtgttaacagcagctgtatttgtttaaattgtgtgtattgaagattaggaaaaagatagtagttatttttcctaaatgaaataactttcttctcttccccttccccacccgaattcttttctgaagttgctggcatttgggtcaaggttttattaaaagctacattttataacactggcacacacaaaaaagtagttttaagcttgtttgcacagttctttttttccattggaaatggaattcattgccttaggtctttttaaatagtgtattattatcgttggggctggctctatgcttgaaaaccagtttatttataacctgttataagtgctatattctgtttgcagttaggaaatgcagaattcaaagtgatctcctagcttgtaagcaaactgagatgcactatcccttttctataaaaaataagttaatgtgtcaagaaaccaactctattaaggtggggtttaatattaccctttcctatgtgttttatctaattattttggttgttaatatggtgataatgtgatagccggctatcacattatccctataaggtctaaaggtgttattaaggaatatgtggctaaagaggctactacttgaatcttgttaatgaatagaaataaccgtccattttgttacacagtaatataacccctaactggtaaataaaagcacaactagccgggcgcagtggtcacgcgtgtaatcccagcactttggttgatatgtgatagccgggatcctcta

SEQ ID NO: 308445 - DNA, 1680 bp, Homo sapiens
acgcggtgcccgagccggcctcgttctggctgccgccgtctcgctgaggcggagtaggatgaggcccgcggccgtggctccggcgtcggcgggggcagcagcagctgaggcagcagctgaggcagccgcgacggccgcgcccccccccgctgacctggattaggcccagcagctccgtggccgccgccgccccgcgggggggcggggtggggaagtgcttcgtctccccgcccccccccccccatcgctgcctcgcaggaggcgaacgccgcgaccccagcggagcccgcggcccagccttgatcccccaaccccgggggctggcatgagcggcccctcggcggcaccgtggggcggtggagtcgcctccgcctgatccccggcctgtcgcccgaccccacctcgccaaccgaggcggaccgcggagtgtgcgaacgaccccaccgctgctttctcctcccccagatcacgcaccccagctccggaagatggggaactgcctcaaatcccccacctcggatgacatctccctgcttcacgagtctcagtccgaccgggctagctttggcgaggggacggagccggatcaggagccgccgccgccatatcaggaacaagttccagttccagtctaccacccaacacctagccagactcggctagcaactcagctgactgaagaggaacaaattaggatagctcaaagaataggtcttatacaacatctgcctaaaggagtttatgaccctggaagagatggatcagaaaaaaagatccgggagtgtgtgatctgtatgatggactttgtttatggggacccaattcgatttctgccgtgcatgcacatctatcacctggactgtatagatgactggttgatgagatccttcacgtgcccctcctgcatggagccagttgatgcagcactgctttcatcctatgagactaattgagccagggtctcttatctgacttcaagtgaaccaccattttggtggttttgatcttttgtcactgagcccaaagagccagggattaggaattaagatcgtgcacaaaagtttccttaaaattcctggatggctgcagatgttgggggaaaaagtacgtgatattttagaaacttagtgggaaaagtaggatggtatttttatgtaaagccttgacccaatgtttaaaaatataattgtatttagatcttgttattgctccagtacataggaattgtgtaaagtgttaacagcagctgtatttgtttaaattgtgtgtattgaagattaggaaaaagatagtagttatttttcctaaatgaaataactttcttctcttccccttccccacccgaattcttttctgaagttgctggcatttgggtcaaggttttattaaaagctacattttataacactggcacacacaaaaaagtagttttaagcttgtttgcacagttctttttttccattggaaatggaattcattgccttaggtctttttaaatagtgtattattatcgttggggctggctctatgcttgaaaaccagtttatttataacctgttataagtgctatattctgttcagctagagaacgcgaaataaagggggtctctactgtcaggcaatcggatgcctattccttcttataacgggtattcataaattggcgcaaatgggagatgg

SEQ ID NO: 308446 - DNA, 1364 bp, Homo sapiens
acgcggtgcccgagccggcctcgttctggctgccgccgtctcgctgaggcggagtaggatgaggcccgcggccgtggctccggcgtcggcgggggcagcagcagctgaggcagcagctgaggcagccgcgacggccgcgcccccccccgctgacctggattaggcccagcagctccgtggccgccgccgccccgcgggggggcggggtggggaagtgcttcgtctccccgcccccccccccccatcgctgcctcgcaggaggcgaacgccgcgaccccagcggagcccgcggcccagccttgatcccccaaccccgggggctggcatgagcggcccctcggcggcaccgtggggcggtggagtcgcctccgcctgatccccggcctgtcgcccgaccccacctcgccaaccgaggcggaccgcggagtgtgcgaacgaccccaccgctgctttctcctcccccagatcacgcaccccagctccggaagatggggaactgcctcaaatcccccacctcggatgacatctccctgcttcacgagtctcagtccgaccgggctagctttggcgaggggacggagccggatcaggagccgccgccgccatatcaggaacaagttccagttccagtctaccacccaacacctagccagactcggctagcaactcagctgactgaagaggaacaaattaggatagctcaaagaataggtcttatacaacatctgcctaaaggagtttatgaccctggaagagatggatcagaaaaaaagatccgggagtgtgtgatctgtatgatggactttgtttatggggacccaattcgatttctgccgtgcatgcacatctatcacctggactgtatagatgactggttgatgagatccttcacgtgcccctctgcagcactgctttcatcctatgagactaattgagccagggtctcttatctgacttcaagtgaaccaccattttggtggttttgatcttttgtcactgagcccaaagagccagggattaggaattaagatcgtgcacaaaagtttccttaaaattcctggatggctgcagatgttgggggaaaaagtacgtgatattttagaaacttagtgggaaaagtaggatggtatttttatgtaaagccttgacccaatgtttaaaaatataattgtatttagatcttgttattgctccagtacataggaattgtgtaaagtgttaacagcagctgtatttgtttaaattgtgtgtattgaagattcgtaccctaatttttcttaagttgttgcattaggtcaagtcttattaaagcttctcttatacattgccttacataatagtctttatctttttgccactctttt

SEQ ID NO: 308447 - DNA, 1098 bp, Homo sapiens
catgaaggttattcataacactgtgttttgtatgtagaaaactgttagagttcaatatacaaaacacagtgtcatgaaggttattcataattgcattatagaggaatgtagtatgtcataagtactttgtaaagatttgacattcaactgtagtatccatatgttgcttaaatttccttatgagccccatgatggaaagacttaaagatgaatttgagaaaaattgaaagaaattagattatcaggttctgttaaattgttacatgtatcttgcttaaatttctgtttattaatttatatccacccaagtacataaagcaaatttggaggaaacaactgaagttgtgcaatattttctgataattgctttttttattcttgtgttttctacttaaacataatgtctgtgtcatcaagtattatagtcagacttttctttttttctagattgttaaaattggcaaatgaacttttttaaaaatcatcttccatgttgcagttagtctttcttttcattacaagtctttcacagaagtttggtggtaatattgaaagaactagcattgggcagaatgtgtcttttttaggcactttatattctcaacatacaatgttaagaaccatcaattttgacttttactaagttgttaaataaagttataatacagctgtgaagggctaaagttagagttgattacataagtaagtattccccatataatcttttaaaaagttgtgtatgattattttaaaatctctctctctaaaaaaaaaaaaaaaaaaaaaaaaaaaaatttgggggggggtgtgggcctggaaaaaggtttttaagaaccttgtggtggggggcgcgggggccccccatgatgggtcagcgtctgacaccactgtggggcgacaaaggtggggcccacaggaagaagaacccgcggacacacacaaacgtgggtgggggttttccccccaaataaaaagcgcccgcggggggacacaccagcggtgttttctgtgaaccaactcccaatgggggtcccgaggggcacacacgcggggctcttcaaccagggggccccagagaaggcgagaatataaagtacc

SEQ ID NO: 308448 - DNA, 3255 bp, Homo sapiens
  misc_feature (1)..(2): n is a, c, g, or t
  misc_feature (4)..(4): n is a, c, g, or t
  misc_feature (7)..(8): n is a, c, g, or t
  misc_feature (11)..(11): n is a, c, g, or t
  misc_feature (13)..(13): n is a, c, g, or t
nnanatnngcntnaaggtaaaagaaaatcgcttaagacgtgagaaagaactggagtaccagagaatagaaaagaccctgaaaaaatcggccttcttggaggctcagtgtctggtgcaagaagagaagaaaaggaaggctctggaggccaagaaagaggaagaggagattcaaagggagatggtgaagctgcggagggagataattgagaggagacgcactgtgaaagcagcatggaaaatagagaagaaaaggcaagaagagaattctcaaaatagttcagaaaaagtcatgtttcaaagtactcacattcttccagatgaggaaaaaatggtgaaggaaagaaaaaggaaattgaaagaagtattaatccaaactttcaaagaaaatcaacagtgtcaaaaacggtatttcgctgcctggcacaagctgattcttgatcataggattaagctggggaaagctgggaccctgtctgactggaagattcagctgaaggtcctgcgggcctggagagactacacaagattccagaagttggagcgggagactcaagccttggaaaatgatcttagggaagaaaacagaaaacaacaactggccactgagtataaccggaaacaagttctccgacactgctttacagaatggcagcattggcatggcgccgagctcctgaagagagagctggctctcacaaaagaggaaactaggaagaagatggatgcactgctgcaggcagcatcactggggaaactcagtgccaatgggttatcaggcatcagtctacctgaggaggcaacagccattggtgggtccaccagtaaaaaatggacaggagactgctgtgccccctttgtgggaaaagcctcccttgggaagcagtggttgtatgctcagtcctcccctgggaagaacaacaacaggcaacttgcagggttcccttcagaatgtctctctgagtgcacctggcaataagcagcacaagaccctgggtgctgaaccctctcaacagcctggcagcaacgagacactcagaactaccagccagaaagcagaaccgctttgcttgggtcatttccacaaccgccatgtcttccagcaacagctgattgagaagcaaaagaagaaacttcaggaacagcagaaaacaattctcgagctgaagaaaaacctgcagctggcagaggctcagtgggcagcagagcatgccttagcagtcacagaagcacagagccacctgctgtcaaagcccagagaagaggaaccaagaacctgccagatgcttgtgaattcacctgttgcttcccctgggactgaaggcagaagtgactcccgaaattctctttctggactcagaaggaaaccaaagcaattgatgacaccgcatcccatactaaaagctatggaagagagagcaattcaacgagctgaatgtaggcggatcttggcagagaagaagaaaaaacaagaagaagaaaaattggcccagttaaaggcccaagaggaggaacgtcagaaaagggaggcagaagaaaaggaggcacagcttgaaagaaaacgagaagagaagagactgaagaaaatgaaagaacttgagaagcagaagagaattaagaggaaccagcagctggaagcaatagccaaagaacattatgaaagggtcttgctaaggaaaaaaggtctagagccttggaagagattgagaatgcaaagcaaacaaaacatccaggtggcagaagaacattactctttgttcctgcagaggaaatacatgctgacgtggttccagcgtagtcaggaaagtctggctagaaagatggcccaggctgatcaattttattcccaaatactgcttaagagagtcatccagagctggctacagtacgtgattgatctgcaggaagaagtaagaaaattttgtgtacattttcttcaaaagaagattttcagggcctggtttaacatggtcagggaggtgaagatcgattctcagggcaagcatgagattgcagcggagcacagtgacaggaggatcctctggatcacccttcggacatggaagaagtttgtaaaatttatgaaagaggaaagagtaaaagaagaaaggcgacagcaacttcgtaggaaggtagttgaaattcttccagacttccaggtacctggaaggtaccacgagctatatcagcaatcagatacttggtccttgagtaagacaagtctggtgaacgaatgagccagattagtgtaatatttaggacaggaagctcgactagtctgtatgtgtgttatctccacccacccacacacatacatacatacacctggtttattctctacgagctacttcttagatcaaaggaattattttgagaatttttattcccttctttgacttttcctggattgctagtcattcactatagcatttatcacagtgggatcatccaaaggaacattctagagatcgtctgttcaaatatatcctatatatttttagcatagtaaactttaaaaaggacaagtgtttgcctgactgagcctgtgaagaaaatgtgtccgtatagcacgacaggagttgctgatgtgaccttaatgaaacagaaataaacaggggtgagtgctcggaaaggaagggcgggccaaggcactcagccttctagtgcagtagcatcagtgacacgcaccccaccagacctcgtccactttcaccacccctgaaggcagaccatgtatgaaaaggttctctacacagctgctgcagaggacagcagcttatcctgatttcagagaaactgaggcaccagagatgcttctcttccgtgcaccttgataagcatgaaggacattccaaaaggtaataactctatcatgacagtccagcaattcattaaattatctgttcatgctcccacctgcaactgctgaataatacactcagtttgtcttctagtactcagctcagtttgatctagatattgagatacctatcttgaattcaaagaatgttttcatctttaagatgctataaagactgataaaatgctctcttctatgaattgtgttagagaattacctgctagaaaaataatttttcattataaaatacacatttattatataacaaattcaagtagtccataaatgcatatggtaaaatgagaaagtcctgtgcagtcctgagatgattactcttatttggtgtgctgaaaatttgagttgacaaaataaaattctgtggttttttaagtgaaaaa

SEQ ID NO: 308449 - DNA, 818 bp, Homo sapiens
  misc_feature (734)..(734): n is a, c, g, or t
gagagagagagagagagagagagagagagagagagagagagagagagagagagagagagagagagagaatttaatagcctgtcaagaacaggagtctgacactcaaattcattcagatgccagttctccaaatgcctggtacaattccatttcctgcccatctgtatatccaggccttaaaactagattcaaatatattcatcgtgaccccaaactttagtttgtttgttgttattcttatatatacagacatatgtacagtgacttaagaaaaattagcagattcaataggatttgaggaacgattctactctcaaagtacttgttagatgtaattaaagttttctgcattcatcaaacatataatcaaattagaattctggtttctgggtttcatatactaaaagtatcatcaaggcacattataaatcagtaaacaattattttaataaaaatgtaaacaaaataattaatttataaattgttcctcattgctgaggatgggataataggtctttaacctgtagagtatataagttctgtttatctctatatattttctgagattgtgaacattcaacttacaagaaaaccctaataataacactaaattttactatgaaatggagacatttctcttgcagtattcctcatattttttcaatataaaaaatattagaactctgttactattttctagcttgagaagagaatcacgacgatgaggggttggngaagagaaacaaaagaatgtcggtaggccaaggaggtcaagggcaaggggtttaaacaaagcatcgttcaattcctggtcttgt

SEQ ID NO: 308450 - DNA, 839 bp, Homo sapiens
ctatcctaaacataaaagatcacatttctgttcaaattgagggttctgatatttctgggttctaatctcaatcaggcccagttaaaggcccaagaggaggaacgtcagaaaagggaggcagaagaaaaggaggcacagcttgaaagaaaacgagaagagaagagactgaagaaaatgaaagaacttgagaagcagaagagaattaagaggaaccagcagctggaagcaatagccaaagaacattatgaaagggtcttgctaaggaaaaaaggtctagagccttggaagagattgagaatgcaaagcaaacaaaacatccaggtggcagaagaacattactctttgttcctgcagaggaaatacatgctgacgtggttccagcgtagtcaggaaagtctggctagaaagatggcccaggctgatcaattttattcccaaatactgcttaagagagtcatccagagctggctacaggtaaggacatagggaagggtaccttaaatacatctcattgctcaattctatttaagaaaactaaatgaaatccagaatgtccagggtcattatgttttttcaagaacaaaagagtagtcaatcccattcactgctttgaaataaatgtgaaaatggtaaatcagtgttttattagtgtaaaatcctaagcctgtgtttgtttcacggagtgtgtataaactgtaagttatcattccatcagcttttgtttttatagtcatttcttgtttcttgtctcacagtgctcaagtgatttagaaacttaccccttcaatcttataactgtttctattcatgtgttctcttaccatttttaggatacatta

SEQ ID NO: 308451 - DNA, 628 bp, Homo sapiens
ccttccaacatctcatttcttgaagagactatcctttctccagcgtatactcttggtaactttgtcaaaaatcagttcaccatagatgtataaatttatttctggcttctttattccattccatttgtctatgtgtcttgttttatgccagtaccgtgttcttttggttaccagagccctgtagtgaaatttcaaataaggtaatgtgattcttccagttttgttatttttttttctcagaatggctttggatatttttgttttttttgtgtgtgtggttccatataaatgttaggattagttttttgtttgttttagatttctgtgaagagtgtcattggtattttgttagggattgcctcaaatctgtagtattttggatagtaagaaaattttgtgtacattttcttcaaaagaagattttcagggcctggtttaacatggtcagggaggtgaagatcgattctcagggcaagcatgagattgcagcggagcacagtgacaggtgaggttttgatagtgaggaaaattcactctctgacttcacaattgctcagcaatatattctgctcctacaatgtgtctgcagagatgagctggaggctaggagagcggggaaacaccagtc

SEQ ID NO: 308452 - DNA, 2554 bp, Homo sapiens
gagagagagagagagagagagagagagagagagagagagagagagagagagagagagagagagagagaatttaatagcctgtcaagaacaggagtctgacactcaaattcattcagatgccagttctccaaatgcctggtacaattccatttcctgcccatctgtatatccaggccttaaaactagattcaaatatattcatcgtgaccccaaactttagtttgtttgttgttattcttatatatacagacatatgtacagtgacttaagaaaaattagcagattcaataggatttgaggaacgattctactctcaaagtacttgttagatgtaattaaagttttctgcattcatcaaacatataatcaaattagaattctggtttctgggtttcatatactaaaagtatcatcaaggcacattataaatcagtaaacaattattttaataaaaatgtaaacaaaataattaatttataaattgttcctcattgctgaggatgggataataggtctttaacctgtagagtatataagttctgtttatctctatatattttctgagattgtgaacattcaacttacaagaaaaccctaataataacactaaattttactatgaaatggagacatttctcttgcagtattcctcatattttttcaatataaaaaatattagaactctgttactattttctagctatggaagagagagcaattcaacgagctgaatgtaggcggatcttggcagagaagaagaaaaaacaagaagaagaaaaattggcccagttaaaggcccaagaggaggaacgtcagaaaagggaggcagaagaaaaggaggcacagcttgaaagaaaacgagaagagaagagactgaagaaaatgaaagaacttgagaagcagaagagaattaagaggaaccagcagctggaagcaatagccaaagaacattatgaaagggtcttgctaaggaaaaaaggtctagagccttggaagagattgagaatgcaaagcaaacaaaacatccaggtggcagaagaacattactctttgttcctgcagaggaaatacatgctgacgtggttccagcgtagtcaggaaagtctggctagaaagatggcccaggctgatcaattttattcccaaatactgcttaagagagtcatccagagctggctacagtacgtgattgatctgcaggaagaagtaagaaaattttgtgtacattttcttcaaaagaagattttcagggcctggtttaacatggtcagggaggtgaagatcgattctcagggcaagcatgagattgcagcggagcacagtgacaggaggatcctctggatcacccttcggacatggaagaagtttgtaaaatttatgaaagaggaaagagtaaaagaagaaaggcgacagcaacttcgtaggaaggtagttgaaattcttccagacttccaggtacctggaaggtaccacgagctatatcagcaatcagatacttggtccttgagtaagacaagtctggtgaacgaatgagccagattagtgtaatatttaggacaggaagctcgactagtctgtatgtgtgttatctccacccacccacacacatacatacatacacctggtttattctctacgagctacttcttagatcaaaggaattattttgagaatttttattcccttctttgacttttcctggattgctagtcattcactatagcatttatcacagtgggatcatccaaaggaacattctagagatcgtctgttcaaatatatcctatatatttttagcatagtaaactttaaaaaggacaagtgtttgcctgactgagcctgtgaagaaaatgtgtccgtatagcacgacaggagttgctgatgtgaccttaatgaaacagaaataaacaggggtgagtgctcggaaaggaagggcgggccaaggcactcagccttctagtgcagtagcatcagtgacacgcaccccaccagacctcgtccactttcaccacccctgaaggcagaccatgtatgaaaaggttctctacacagctgctgcagaggacagcagcttatcctgatttcagagaaactgaggcaccagagatgcttctcttccgtgcaccttgataagcatgaaggacattccaaaaggtaataactctatcatgacagtccagcaattcattaaattatctgttcatgctcccacctgcaactgctgaataatacactcagtttgtcttctagtactcagctcagtttgatctagatattgagatacctatcttgaattcaaagaatgttttcatctttaagatgctataaagactgataaaatgctctcttctatgaattgtgttagagaattacctgctagaaaaataatttttcattataaaatacacatttattatataacaaattcaagtagtccataaatgcatatggtaaaatgagaaagtcctgtgcagtcctgagatgattactcttatttggtgtgctgaaaatttgagttgacaaaataaaattctgtggttttttaagtgaaaaa

SEQ ID NO: 308453 - DNA, 2832 bp, Homo sapiens
  misc_feature (1)..(2): n is a, c, g, or t
  misc_feature (4)..(4): n is a, c, g, or t
  misc_feature (7)..(8): n is a, c, g, or t
  misc_feature (11)..(11): n is a, c, g, or t
  misc_feature (13)..(13): n is a, c, g, or t
nnanatnngcntnaaggtaaaagaaaatcgcttaagacgtgagaaagaactggagtaccagagaatagaaaagaccctgaaaaaatcggccttcttggaggctcagtgtctggtgcaagaagagaagaaaaggaaggctctggaggccaagaaagaggaagaggagattcaaagggagatggtgaagctgcggagggagataattgagaggagacgcactgtgaaagcagcatggaaaatagagaagaaaaggcaagaagagaattctcaaaatagttcagaaaaagtcatgtttcaaagtactcacattcttccagatgaggaaaaaatggtgaaggaaagaaaaaggaaattgaaagaagtattaatccaaactttcaaagaaaatcaacagtgtcaaaaacggtatttcgctgcctggcacaagctgattcttgatcataggattaagctggggaaagctgggaccctgtctgactggaagattcagctgaaggtcctgcgggcctggagagactacacaagattccagaagttggagcgggagactcaagccttggaaaatgatcttagggaagaaaacagaaaacaacaactggccactgagtataaccggaaacaagttctccgacactgctttacagaatggcagcattggcatggcgccgagctcctgaagagagagctggctctcacaaaagaagaaacttcaggaacagcagaaaacaattctcgagctgaagaaaaacctgcagctggcagaggctcagtgggcagcagagcatgccttagcagtcacagaagcacagagccacctgctgtcaaagcccagagaagaggaaccaagaacctgccagatgcttgtgaattcacctgttgcttcccctgggactgaaggcagaagtgactcccgaaattctctttctggactcagaaggaaaccaaagcaattgatgacaccgcatcccatactaaaagctatggaagagagagcaattcaacgagctgaatgtaggcggatcttggcagagaagaagaaaaaacaagaagaagaaaaattggcccagttaaaggcccaagaggaggaacgtcagaaaagggaggcagaagaaaaggaggcacagcttgaaagaaaacgagaagagaagagactgaagaaaatgaaagaacttgagaagcagaagagaattaagaggaaccagcagctggaagcaatagccaaagaacattatgaaagggtcttgctaaggaaaaaaggtctagagccttggaagagattgagaatgcaaagcaaacaaaacatccaggtggcagaagaacattactctttgttcctgcagaggaaatacatgctgacgtggttccagcgtagtcaggaaagtctggctagaaagatggcccaggctgatcaattttattcccaaatactgcttaagagagtcatccagagctggctacagtacgtgattgatctgcaggaagaagtaagaaaattttgtgtacattttcttcaaaagaagattttcagggcctggtttaacatggtcagggaggtgaagatcgattctcagggcaagcatgagattgcagcggagcacagtgacaggaggatcctctggatcacccttcggacatggaagaagtttgtaaaatttatgaaagaggaaagagtaaaagaagaaaggcgacagcaacttcgtaggaaggtagttgaaattcttccagacttccaggtacctggaaggtaccacgagctatatcagcaatcagatacttggtccttgagtaagacaagtctggtgaacgaatgagccagattagtgtaatatttaggacaggaagctcgactagtctgtatgtgtgttatctccacccacccacacacatacatacatacacctggtttattctctacgagctacttcttagatcaaaggaattattttgagaatttttattcccttctttgacttttcctggattgctagtcattcactatagcatttatcacagtgggatcatccaaaggaacattctagagatcgtctgttcaaatatatcctatatatttttagcatagtaaactttaaaaaggacaagtgtttgcctgactgagcctgtgaagaaaatgtgtccgtatagcacgacaggagttgctgatgtgaccttaatgaaacagaaataaacaggggtgagtgctcggaaaggaagggcgggccaaggcactcagccttctagtgcagtagcatcagtgacacgcaccccaccagacctcgtccactttcaccacccctgaaggcagaccatgtatgaaaaggttctctacacagctgctgcagaggacagcagcttatcctgatttcagagaaactgaggcaccagagatgcttctcttccgtgcaccttgataagcatgaaggacattccaaaaggtaataactctatcatgacagtccagcaattcattaaattatctgttcatgctcccacctgcaactgctgaataatacactcagtttgtcttctagtactcagctcagtttgatctagatattgagatacctatcttgaattcaaagaatgttttcatctttaagatgctataaagactgataaaatgctctcttctatgaattgtgttagagaattacctgctagaaaaataatttttcattataaaatacacatttattatataacaaattcaagtagtccataaatgcatatggtaaaatgagaaagtcctgtgcagtcctgagatgattactcttatttggtgtgctgaaaatttgagttgacaaaataaaattctgtggttttttaagtgaaaaa

SEQ ID NO: 308454 - DNA, 1691 bp, Homo sapiens
  misc_feature (1)..(2): n is a, c, g, or t
  misc_feature (4)..(4): n is a, c, g, or t
  misc_feature (7)..(8): n is a, c, g, or t
  misc_feature (11)..(11): n is a, c, g, or t
  misc_feature (13)..(13): n is a, c, g, or t
nnanatnngcntnaaggtaaaagaaaatcgcttaagacgtgagaaagaactggagtaccagagaatagaaaagaccctgaaaaaatcggccttcttggaggctcagtgtctggtgcaagaagagaagaaaaggaaggctctggaggccaagaaagaggaagaggagattcaaagggagatggtgaagctgcggagggagataattgagaggagacgcactgtgaaagcagcatggaaaatagagaagaaaaggcaagaagagaattctcaaaatagttcagaaaaagtcatgtttcaaagtactcacattcttccagatgaggaaaaaatggtgaaggaaagaaaaaggaaattgaaagaagtattaatccaaactttcaaagaaaatcaacagtgtcaaaaacggtatttcgctgcctggcacaagctgattcttgatcataggattaagctggggaaagctgggaccctgtctgactggaagattcagctgaaggtcctgcgggcctggagagactacacaagattccagaagttggagcgggagactcaagccttggaaaatgatcttagggaagaaaacagaaaacaacaactggccactgagtataaccggaaacaagttctccgacactgctttacagaatggcagcattggcatggcgccgagctcctgaagagagagctggctctcacaaaagaggaaactaggaagaagatggatgcactgctgcaggcagcatcactggggaaactcagtgccaatgggttatcaggcatcagtctacctgaggaggcaacagccattggtgggtccaccagtaaaaaatggacaggagactgctgtgccccctttgtgggaaaagcctcccttgggaagcagtggttgtatgctcagtcctcccctgggaagaacaacaacaggcaacttgcagggttcccttcagaatgtctctctgagtgcacctggcaataagcagcacaagaccctgggtgctgaaccctctcaacagcctggcagcaacgagacactcagaactaccagccagaaagcagaaccgctttgcttgggtcatttccacaaccgccatgtcttccagcaacagctgattgagaagcaaaagaagaaacttcaggaacagcagaaaacaattctcgagctgaagaaaaacctgcagctggcagaggctcagtgggcagcagagcatgccttagcagtcacagaagcacagagccacctgctgtcaaagcccagagaagaggaaccaagaacctgccagatgcttgtgaattcacctgttgcttcccctgggactgaaggcagaagtgactcccgaaattctctttctggactcagaaggaaaccaaagcaattgatgacaccgcatcccatactaaaaggcagggctgtcctcggtggtggccttggtggttgttatcttctctcctagagtagaatgtgtacactgggactgaattctggcaactcttgaggttttgagacttggcagaacctgacatcaaaaatctcagaatggtagacatgtgaggagtggagtacaccagagagccccactacttttttcctgccccttttgccaacctttttggcattcccagccaacacacacacaaaaaaacatagctgaaaggtatatcatttttctgtaatttgagatttggattgtgaa

SEQ ID NO: 308455 - DNA, 637 bp, Homo sapiens
  misc_feature (1)..(2): n is a, c, g, or t
  misc_feature (4)..(4): n is a, c, g, or t
  misc_feature (7)..(8): n is a, c, g, or t
  misc_feature (11)..(11): n is a, c, g, or t
  misc_feature (13)..(13): n is a, c, g, or t
nnanatnngcntnaaggtaaaagaaaatcgcttaagacgtgagaaagaactggagtaccagagaatagaaaagaccctgaaaaaatcggccttcttggaggctcagtgtctggtgcaagaagagaagaaaaggaaggctctggaggccaagaaagaggaagaggagattcaaagggagatggtgaagctgcggagggagataattgagaggagacgcactgtgaaagcagcatggaaaatagagaagaaaaggcaagaagagaattctcaaaatagttcagaaaaagtcatgtttcaaagtactcacattcttccagatgaggaaaaaatggtgaaggaaagaaaaaggaaattgaaagaagtattaatccaaactttcaaagaaaatcaacagtgtcaaaaacggtatttcgctgcctggcacaagctgattcttgatcataggattaagctggggaaagctgggaccctgtctgactggaagattcagctgaaggtcctgcgggcctggagagactacacaagattccagaagttggagcgggagactcaagccttggaaaatgatcttagggaagaaaacagaaacacactggcactggtatacgaacagtctcgacctgcttacgatgcagca

SEQ ID NO: 308456 - DNA, 327 bp, Homo sapiens
caatccctgatgaaagcaagagagctaacaactattattggttttatatttaaaaactaagttgacagatacagacaaaaggctatacacagggtttcaaatagccatttttagaaagagcatataaaggtttatgttatctaaggtatatactccataatgtatattttaaaataactgaaagagtaaatttcaaatgtctcaccataaaaaatgataggtaaatgaagtgatagacatgttagtttgatttaatcattccacatcatatacatatatcaaaacatcatcacattgtaccccataaatgtatacgataatttttca

SEQ ID NO: 308457 - DNA, 1466 bp, Homo sapiens
tttttttaaaggtgagtacttagtggtagaaaacacaatgattagtagttgatgtcattaccctgatttgagacaaggtgccagattaacccactatcaatgaaaacagtgcaaaaggaaaatcagtataatcttagtataataaagatcttagtattttagtataataaagagaattctgaccatacaaatcccctgaaaggttttcagaaatccccacttcacactttgaaaaccacctctctagaatgatgggttctgttttctctaagaaggtaaggcctgagtagaggatagagaatagtaaagagacaattaactagaaaaaagtagacatacagcacgcagggaagggtctgggtgaagttgaaaaccatgaatttacagtggcaccagtgtgtaatttttttttaaatttttttattctgcagtaatcagaaactgaggcttagtggagagaaaataaatggatgaattcagaactgacgttttcatttggcagaccaaagagtaccacaatttttgcttatatatttgggttacctgtgtattctctatctccccagcttgttgtaagttccctgagggcatgaaccatgcacactttgctcaccatgtctgcccatcaacttccacagagcatcaagtaatgtaggtactttgcaaatatttattaaacatgcataaacaggtctggtatggtggctcaggcctgtaatcccagcactttgggaggctaacgtgggaagatcactggagcccaggagtttggggttgcagtgagctatgactgcaccattgcgtactccagcctgggcaacaaagcaagactgtcttgaaaaaataataaatgaataaataatgatgaataaatgaatgaatccattaataaatcaggaattttagaatggcattgtgataagctgactatataatttaaagcaaacttactgagaacagtttagtgtttgctatggttgcaaggaaaaaaattgattgtatttataatttgtttataggttatttataaaacacttaagcctcttttaatcatggctcccactccagcacaacttgtggacgagaaagggaaaaatgactgaggtttactctcttaccactctgtatgtgtgtgagagaataagagtccacagaaattgctcttttgtactccacgaatatgaggaagtatgagtagaggggaactggtacagaacagaagttattttgggtaagatcaagggcaggatgtaagaaaactagttttcagttacaagggaataaccattgggaatagagctgtgcttcagtgaagtactcaaatggtttaatccagggtaaacctcatgttctgggcagtcgtgccccctgtagtgctttaattcactatgggaaaacatccaatctgtgttttacaaaaaagtactttttggaacccagtacctactagcagagaggacctcctg

SEQ ID NO: 308458 - DNA, 635 bp, Homo sapiens
ggcccggaggaagatgatctcttcagggcgggtgaactcgcggaaggtaggcagcgagatgacggtgtgggagatggtgtgcacggggtcgaacacgcatgtgacatcgttggggcggcaggacttgagtactggttctgagggctggtctgccgcacagccgcaggtgcacctccaggccaaatcattgctgccagtgactgtggtctgtacttgtttataccctcagacttttttaatgttaggtatttgtagcattaggccaacatgtattaagctgagccagatgaataagtccatctgatgtattttcggtgtttaaaaaatgagcccagttgctcaactgtttggttgaaaaccttgctcattttttaatgcgaaggctaagtgtcaccccctttctctgcctctggctgggccttgctaagggccaaggaaagaaagacattttttagggggcagccagtccaaatgccaaaagaagaccagttcttgccctgattgtatgaaatttgacattttggcactttttttttttttttgttcaccaggggaatggctgggatttctcggcactctgcatcatccatcttttcttataggtgggaaaataaacaactttgtgatcctcctga

SEQ ID NO: 308459 - DNA, 2297 bp, Homo sapiens
ccctcctcccgggcgggataattgaacggcgcggccctggcccagcgttggctgccgaggctcggccggagcgtggagcccgcgccgctgccccaggaccgcgcccgcgcctttgtccgccgccgcccaccgcccgtcgcccgccgcccatggagcgcgccgcgccgtcgcgccgggtcccgcttccgctgctgctgctcggcggccttgcgctgctggcggccggagtggacgcggatgtcctcctggaggcctgctgtgcggacggacaccggatggccactcatcagaaggactgctcgctgccatatgctacggaatccaaagaatgcaggatggtgcaggagcagtgctgccacagccagctggaggagctgcactgtgccacgggcatcagcctggccaacgagcaggaccgctgtgccacgccccacggtgacaacgccagcctggaggccacatttgtgaagaggtgctgccattgctgtctgctggggagggcggcccaggcccagggccagagctgcgagtacagcctcatggttggctaccagtgtggacaggtcttccgggcatgctgtgtcaagagccaggagaccggagatttggatgtcgggggcctccaagaaacggataagatcattgaggttgaggaggaacaagaggacccatatctgaatgaccgctgccgaggaggcgggccctgcaagcagcagtgccgagacacgggtgacgaggtggtctgctcctgcttcgtgggctaccagctgctgtctgatggtgtctcctgtgaagatgtcaatgaatgcatcacgggcagccacagctgccggcttggagaatcctgcatcaacacagtgggctctttccgctgccagcgggacagcagctgcgggactggctatgagctcacagaggacaatagctgcaaagatattgacgagtgtgagagtggtattcataactgcctccccgattttatctgtcagaatactctgggatccttccgctgccgacccaagctacagtgcaagagtggctttatacaagatgctctaggcaactgtattgatatcaatgagtgtttgagtatcagtgccccgtgccctatcgggcatacatgcatcaacacagagggctcctacacgtgccagaagaacgtgcccaactgtggccgtggctaccatctcaacgaggagggaacgcgctgtgttgatgtggacgagtgcgcgccacctgctgagccctgtgggaagggacatcgctgcgtgaactctcccggcagtttccgctgcgaatgcaagacgggttactattttgacggcatcagcaggatgtgtgtcgatgtcaacgagtgccagcgctaccccgggcgcctgtgtggccacaagtgcgagaacacgctgggctcctacctctgcagctgttccgtgggcttccggctctctgtggatggcaggtcatgtgaagacatcaatgagtgcagcagcagcccctgtagccaggagtgtgccaacgtctacggctcctaccagtgttactgccggcgaggctaccagctcagcgatgtggatggagtcacctgtgaagacatcgacgagtgcgccctgcccaccgggggccacatctgctcctaccgctgcatcaacatccctggaagcttccagtgcagctgcccctcgtctggctacaggctggcccccaatggccgcaactgccaagacattgatgagtgtgtgactggcatccacaactgctccatcaacgagacctgcttcaacatccagggcggcttccgctgcctggccttcgagtgccctgagaactaccgccgctccgcagccacccgctgtgagcgcttgccttgccatgagaatcgggagtgctccaagctgcctctgagaataacctactaccacctctctttccccaccaacatccaagcgcccgcggtggttttccgcatgggcccctccagtgctgtccccggggacagcatgcagctggccatcaccggcggcaatgaggagggctttttcaccacccggaaggtgagcccccacagtggggtggtggccctcaccaagcctgtccccgagcccagggacttgctcctgaccgtcaagatggatctctctcgccacggcaccgtcagctcctttgtggccaagcttttcatctttgtgtctgcagagctctgagcactcgcttcgcgtcgcggggtctccctcctgttgctttcctaaccctgccctccggggcgttaataaagtcttagcaagcgtcccacacagtga

SEQ ID NO: 308460 - DNA, 2950 bp, Homo sapiens
ccctcctcccgggcgggataattgaacggcgcggccctggcccagcgttggctgccgaggctcggccggagcgtggagcccgcgccgctgccccaggaccgcgcccgcgcctttgtccgccgccgcccaccgcccgtcgcccgccgcccatggagcgcgccgcgccgtcgcgccgggtcccgcttccgctgctgctgctcggcggccttgcgctgctggcggccggagtggacgcggatgtcctcctggaggcctgctgtgcggacggacaccggatggccactcatcagaaggactgctcgctgccatatgctacggaatccaaagaatgcaggatggtgcaggagcagtgctgccacagccagctggaggagctgcactgtgccacgggcatcagcctggccaacgagcaggaccgctgtgccacgccccacggtgacaacgccagcctggaggccacatttgtgaagaggtgctgccattgctgtctgctggggagggcggcccaggcccagggccagagctgcgagtacagcctcatggttggctaccagtgtggacaggtcttccgggcatgctgtgtcaagagccaggagaccggagatttggatgtcgggggcctccaagaaacggataagatcattgaggttgaggaggaacaagaggacccatatctgaatgaccgctgccgaggaggcgggccctgcaagcagcagtgccgagacacgggtgacgaggtggtctgctcctgcttcgtgggctaccagctgctgtctgatggtgtctcctgtgaagatgtcaatgaatgcatcacgggcagccacagctgccggcttggagaatcctgcatcaacacagtgggctctttccgctgccagcgggacagcagctgcgggactggctatgagctcacagaggacaatagctgcaaagatattgacgagtgtgagagtggtattcataactgcctccccgattttatctgtcagaatactctgggatccttccgctgccgacccaagctacagtgcaagagtggctttatacaagatgctctaggcaactgtattgatatcaatgagtgtttgagtatcagtgccccgtgccctatcgggcatacatgcatcaacacagagggctcctacacgtgccagaagaacgtgcccaactgtggccgtggctaccatctcaacgaggagggaacgcgctgtgttgatgtggacgagtgcgcgccacctgctgagccctgtgggaagggacatcgctgcgtgaactctcccggcagtttccgctgcgaatgcaagacgggttactattttgacggcatcagcaggatgtgtgtcgatgtcaacgagtgccagcgctaccccgggcgcctgtgtggccacaagtgcgagaacacgctgggctcctacctctgcagctgttccgtgggcttccggctctctgtggatggcaggtcatgtgaagacatcaatgagtgcagcagcagcccctgtagccaggagtgtgccaacgtctacggctcctaccagtgttactgccggcgaggctaccagctcagcgatgtggatggagtcacctgtgaagacatcgacgagtgcgccctgcccaccgggggccacatctgctcctaccgctgcatcaacatccctggaagcttccagtgcagctgcccctcgtctggctacaggctggcccccaatggccgcaactgccaagacattgatgagtgtgtgactggcatccacaactgctccatcaacgagacctgcttcaacatccagggcggcttccgctgcctggccttcgagtgccctgagaactaccgccgctccgcagccacgctccagcaggagaagacagacacggtccgctgcatcaagtcctgccgccccaacgatgtcacatgcgtgttcgaccccgtgcacaccatctcccacaccgtcatctcgctgcctaccttccgcgagttcacccgccctgaagagatcatcttcctccgggccatcacgccaccgcatcctgccagccaggctaacatcatcttcgacatcacggaagggaacctgcgggactcttttgacatcatcaagcgttacatggacggcatgaccgtgggtgtcgtgcgccaggtgcggcccatcgtgggcccatttcatgccgtcctgaagctggagatgaactatgtggtcgggggcgtggtctcccaccgaaatgttgtcaacgtccacatcttcgtctctgagtactggttctgagggctggtctgccgcacagccgcaggtgcacctccaggccaaatcattgctgccagtgactgtggtctgtacttgtttataccctcagacttttttaatgttaggtatttgtagcattaggccaacatgtattaagctgagccagatgaataagtccatctgatgtattttcggtgtttaaaaaatgagcccagttgctcaactgtttggttgaaaaccttgctcattttttaatgcgaaggctaagtgtcaccccctttctctgcctctggctgggccttgctaagggccaaggaaagaaagacattttttagggggcagccagtccaaatgccaaaagaagaccagttcttgccctgattgtatgaaatttgacattttggcactttttttttttttttggccaatcagattttctatgttctaaggacatggctgctgtagaatagcacagacgtggatgataaattatccccagaagcagcatgacagaatgcctcggggagcacttggaagggaaattgcagttctgttgaaatagaggaaaatcccttggtaaagacacagcctgttaggctcgtgtgggcctccagtatgttcaccaggggaatggctgggatttctcggcactctgcatcatccatcttttcttataggtgggaaaataaacaactttgtgatcctcctga

SEQ ID NO: 308461 - DNA, 2035 bp, Homo sapiens
gtccgttggcagcgcacgttatgaacggactgctcgctgtctcatatgctacgtgaatcctaaagaatgcaggatggtgcaggagcagtgctgccacagccagctggaggagctgcactgtgccacgggcatcagcctggccaacgagcaggaccgctgtgccacgccccacggtgacaacgccagcctggaggccacatttgtgaagaggtgctgccattgctgtctgctggggagggcggcccaggcccagggccagagctgcgagtacagcctcatggttggctaccagtgtggacaggtcttccgggcatgctgtgtcaagagccaggagaccggagatttggatgtcgggggcctccaagaaacggataagatcattgaggttgaggaggaacaagaggacccatatctgaatgaccgctgccgaggaggcgggccctgcaagcagcagtgccgagacacgggtgacgaggtggtctgctcctgcttcgtgggctaccagctgctgtctgatggtgtctcctgtgaagatgtcaatgaatgcatcacgggcagccacagctgccggcttggagaatcctgcatcaacacagtgggctctttccgctgccagcgggacagcagctgcgggactggctatgagctcacagaggacaatagctgcaaagatattgacgagtgtgagagtggtattcataactgcctccccgattttatctgtcagaatactctgggatccttccgctgccgacccaagctacagtgcaagagtggctttatacaagatgctctaggcaactgtattgatatcaatgagtgtttgagtatcagtgccccgtgccctatcgggcatacatgcatcaacacagagggctcctacacgtgccagaagaacgtgcccaactgtggccgtggctaccatctcaacgaggagggaacgcgctgtgttgatgtggacgagtgcgcgccacctgctgagccctgtgggaagggacatcgctgcgtgaactctcccggcagtttccgctgcgaatgcaagacgggttactattttgacggcatcagcaggatgtgtgtcgatgtcaacgagtgccagcgctaccccgggcgcctgtgtggccacaagtgcgagaacacgctgggctcctacctctgcagctgttccgtgggcttccggctctctgtggatggcaggtcatgtgaagacatcaatgagtgcagcagcagcccctgtagccaggagtgtgccaacgtctacggctcctaccagtgttactgccggcgaggctaccagctcagcgatgtggatggagtcacctgtgaagacatcgacgagtgcgccctgcccaccgggggccacatctgctcctaccgctgcatcaacatccctggaagcttccagtgcagctgcccctcgtctggctacaggctggcccccaatggccgcaactgccaagacattgatgagtgtgtgactggcatccacaactgctccatcaacgagacctgcttcaacatccagggcggcttccgctgcctggccttcgagtgccctgagaactaccgccgctccgcagccacccgctgtgagcgcttgccttgccatgagaatcgggagtgctccaagctgcctctgagaataacctactaccacctctctttccccaccaacatccaagcgcccgcggtggttttccgcatgggcccctccagtgctgtccccggggacagcatgcagctggccatcaccggcggcaatgaggagggctttttcaccacccggaaggtgagcccccacagtggggtggtggccctcaccaagcctgtccccgagcccagggacttgctcctgaccgtcaagatggatctctctcgccacggcaccgtcagctcctttgtggccaagcttttcatctttgtgtctgcagagctctgagcactcgcttcgcgtcgcggggtctccctcctgttgctttcctaaccctgccctccggggcgttaataaagtcttagcaagcgtcccacacagtga

SEQ ID NO: 308462 - DNA, 1821 bp, Homo sapiens
ggcacgaggggccgccctccccagcagacagcaatggcagcacctcttcacaaatgtggcctcatggttggctaccagtgtggacaggtcttccgggcatgctgtgtcaagagccaggagaccggagatttggatgtcgggggcctccaagaaacggataagatcattgaggttgaggaggaacaagaggacccatatctgaatgaccgctgccgaggaggcgggccctgcaagcagcagtgccgagacacgggtgacgaggtggtctgctcctgcttcgtgggctaccagctgctgtctgatggtgtctcctgtgaagatgtcaatgaatgcatcacgggcagccacagctgccggcttggagaatcctgcatcaacacagtgggctctttccgctgccagcgggacagcagctgcgggactggctatgagctcacagaggacaatagctgcaaagatattgacgagtgtgagagtggtattcataactgcctccccgattttatctgtcagaatactctgggatccttccgctgccgacccaagctacagtgcaagagtggctttatacaagatgctctaggcaactgtattgatatcaatgagtgtttgagtatcagtgccccgtgccctatcgggcatacatgcatcaacacagagggctcctacacgtgccagaagaacgtgcccaactgtggccgtggctaccatctcaacgaggagggaacgcgctgtgttgatgtggacgagtgcgcgccacctgctgagccctgtgggaagggacatcgctgcgtgaactctcccggcagtttccgctgcgaatgcaagacgggttactattttgacggcatcagcaggatgtgtgtcgatgtcaacgagtgccagcgctaccccgggcgcctgtgtggccacaagtgcgagaacacgctgggctcctacctctgcagctgttccgtgggcttccggctctctgtggatggcaggtcatgtgaagacatcaatgagtgcagcagcagcccctgtagccaggagtgtgccaacgtctacggctcctaccagtgttactgccggcgaggctaccagctcagcgatgtggatggagtcacctgtgaagacatcgacgagtgcgccctgcccaccgggggccacatctgctcctaccgctgcatcaacatccctggaagcttccagtgcagctgcccctcgtctggctacaggctggcccccaatggccgcaactgccaagacattgatgagtgtgtgactggcatccacaactgctccatcaacgagacctgcttcaacatccagggcggcttccgctgcctggccttcgagtgccctgagaactaccgccgctccgcagccacccgctgtgagcgcttgccttgccatgagaatcgggagtgctccaagctgcctctgagaataacctactaccacctctctttccccaccaacatccaagcgcccgcggtggttttccgcatgggcccctccagtgctgtccccggggacagcatgcagctggccatcaccggcggcaatgaggagggctttttcaccacccggaaggtgagcccccacagtggggtggtggccctcaccaagcctgtccccgagcccagggacttgctcctgaccgtcaagatggatctctctcgccacggcaccgtcagctcctttgtggccaagcttttcatctttgtgtctgcagagctctgagcactcgcttcgcgtcgcggggtctccctcctgttgctttcctaaccctgccctccggggcgttaataaagtcttagcaagcgtcccacacagtga

SEQ ID NO: 308463 - DNA, 1734 bp, Homo sapiens
tacagttgcgactgtgttcacacgccggaaacgtagatcttggatgtcgagtgtgctccagcggacacggataagatcattgaggttgaggaggaacaagaggacccatatctgaatgaccgctgccgaggaggcgggccctgcaagcagcagtgccgagacacgggtgacgaggtggtctgctcctgcttcgtgggctaccagctgctgtctgatggtgtctcctgtgaagatgtcaatgaatgcatcacgggcagccacagctgccggcttggagaatcctgcatcaacacagtgggctctttccgctgccagcgggacagcagctgcgggactggctatgagctcacagaggacaatagctgcaaagatattgacgagtgtgagagtggtattcataactgcctccccgattttatctgtcagaatactctgggatccttccgctgccgacccaagctacagtgcaagagtggctttatacaagatgctctaggcaactgtattgatatcaatgagtgtttgagtatcagtgccccgtgccctatcgggcatacatgcatcaacacagagggctcctacacgtgccagaagaacgtgcccaactgtggccgtggctaccatctcaacgaggagggaacgcgctgtgttgatgtggacgagtgcgcgccacctgctgagccctgtgggaagggacatcgctgcgtgaactctcccggcagtttccgctgcgaatgcaagacgggttactattttgacggcatcagcaggatgtgtgtcgatgtcaacgagtgccagcgctaccccgggcgcctgtgtggccacaagtgcgagaacacgctgggctcctacctctgcagctgttccgtgggcttccggctctctgtggatggcaggtcatgtgaagacatcaatgagtgcagcagcagcccctgtagccaggagtgtgccaacgtctacggctcctaccagtgttactgccggcgaggctaccagctcagcgatgtggatggagtcacctgtgaagacatcgacgagtgcgccctgcccaccgggggccacatctgctcctaccgctgcatcaacatccctggaagcttccagtgcagctgcccctcgtctggctacaggctggcccccaatggccgcaactgccaagacattgatgagtgtgtgactggcatccacaactgctccatcaacgagacctgcttcaacatccagggcggcttccgctgcctggccttcgagtgccctgagaactaccgccgctccgcagccacccgctgtgagcgcttgccttgccatgagaatcgggagtgctccaagctgcctctgagaataacctactaccacctctctttccccaccaacatccaagcgcccgcggtggttttccgcatgggcccctccagtgctgtccccggggacagcatgcagctggccatcaccggcggcaatgaggagggctttttcaccacccggaaggtgagcccccacagtggggtggtggccctcaccaagcctgtccccgagcccagggacttgctcctgaccgtcaagatggatctctctcgccacggcaccgtcagctcctttgtggccaagcttttcatctttgtgtctgcagagctctgagcactcgcttcgcgtcgcggggtctccctcctgttgctttcctaaccctgccctccggggcgttaataaagtcttagcaagcgtcccacacagtga

SEQ ID NO: 308464 - DNA, 2242 bp, Homo sapiens
ccctcctcccgggcgggataattgaacggcgcggccctggcccagcgttggctgccgaggctcggccggagcgtggagcccgcgccgctgccccaggaccgcgcccgcgcctttgtccgccgccgcccaccgcccgtcgcccgccgcccatggagcgcgccgcgccgtcgcgccgggtcccgcttccgctgctgctgctcggcggccttgcgctgctggcggccggagtggacgcggatgtcctcctggaggcctgctgtgcggacggacaccggatggccactcatcagaaggactgctcgctgccatatgctacggaatccaaagaatgcaggatggtgcaggagcagtgctgccacagccagctggaggagctgcactgtgccacgggcatcagcctggccaacgagcaggaccgctgtgccacgccccacggtgacaacgccagcctggaggccacatttgtgaagaggtgctgccattgctgtctgctggggagggcggcccaggcccagggccagagctgcgagtacagcctcatggttggctaccagtgtggacaggtcttccgggcatgctgtgtcaagagccaggagaccggagatttggatgtcgggggcctccaagaaacggataagatcattgaggttgaggaggaacaagaggacccatatctgaatgaccgctgccgaggaggcgggccctgcaagcagcagtgccgagacacgggtgacgaggtggtctgctcctgcttcgtgggctaccagctgctgtctgatggtgtctcctgtgaagatgtcaatgaatgcatcacgggcagccacagctgccggcttggagaatcctgcatcaacacagtgggctctttccgctgccagcgggacagcagctgcgggactggctatgagctcacagaggacaatagctgcaaaggaatactctgggatccttccgctgccgacccaagctacagtgcaagagtggctttatacaagatgctctaggcaactgtattgatatcaatgagtgtttgagtatcagtgccccgtgccctatcgggcatacatgcatcaacacagagggctcctacacgtgccagaagaacgtgcccaactgtggccgtggctaccatctcaacgaggagggaacgcgctgtgttgatgtggacgagtgcgcgccacctgctgagccctgtgggaagggacatcgctgcgtgaactctcccggcagtttccgctgcgaatgcaagacgggttactattttgacggcatcagcaggatgtgtgtcgatgtcaacgagtgccagcgctaccccgggcgcctgtgtggccacaagtgcgagaacacgctgggctcctacctctgcagctgttccgtgggcttccggctctctgtggatggcaggtcatgtgaagacatcaatgagtgcagcagcagcccctgtagccaggagtgtgccaacgtctacggctcctaccagtgttactgccggcgaggctaccagctcagcgatgtggatggagtcacctgtgaagacatcgacgagtgcgccctgcccaccgggggccacatctgctcctaccgctgcatcaacatccctggaagcttccagtgcagctgcccctcgtctggctacaggctggcccccaatggccgcaactgccaagacattgatgagtgtgtgactggcatccacaactgctccatcaacgagacctgcttcaacatccagggcggcttccgctgcctggccttcgagtgccctgagaactaccgccgctccgcagccacccgctgtgagcgcttgccttgccatgagaatcgggagtgctccaagctgcctctgagaataacctactaccacctctctttccccaccaacatccaagcgcccgcggtggttttccgcatgggcccctccagtgctgtccccggggacagcatgcagctggccatcaccggcggcaatgaggagggctttttcaccacccggaaggtgagcccccacagtggggtggtggccctcaccaagcctgtccccgagcccagggacttgctcctgaccgtcaagatggatctctctcgccacggcaccgtcagctcctttgtggccaagcttttcatctttgtgtctgcagagctctgagcactcgcttcgcgtcgcggggtctccctcctgttgctttcctaaccctgccctccggggcgttaataaagtcttagcaagcgtcccacacagtga

SEQ ID NO: 308465 - DNA, 1807 bp, Homo sapiens
agaggatccccgttcgctactgtgtggggtagagggaggaatgatggagggtaggagagccttgagcctgcgagaagagtctcctagaatagagaagctgaggttaaagttgtggaagacagtggggataactgagtgacagataatcaggagaagaaaaggagatccagaatcatgacagagagatgacctttgccaagagcacagccatctttcactgtcacagagaggtaggacaaaacgattggtgttcaagaattggtttgtaggctaccagctgctgtctgatggtgtctcctgtgaagatgtcaatgaatgcatcacgggcagccacagctgccggcttggagaatcctgcatcaacacagtgggctctttccgctgccagcgggacagcagctgcgggactggctatgagctcacagaggacaatagctgcaaagatattgacgagtgtgagagtggtattcataactgcctccccgattttatctgtcagaatactctgggatccttccgctgccgacccaagctacagtgcaagagtggctttatacaagatgctctaggcaactgtattgatatcaatgagtgtttgagtatcagtgccccgtgccctatcgggcatacatgcatcaacacagagggctcctacacgtgccagaagaacgtgcccaactgtggccgtggctaccatctcaacgaggagggaacgcgctgtgttgatgtggacgagtgcgcgccacctgctgagccctgtgggaagggacatcgctgcgtgaactctcccggcagtttccgctgcgaatgcaagacgggttactattttgacggcatcagcaggatgtgtgtcgatgtcaacgagtgccagcgctaccccgggcgcctgtgtggccacaagtgcgagaacacgctgggctcctacctctgcagctgttccgtgggcttccggctctctgtggatggcaggtcatgtgaagacatcaatgagtgcagcagcagcccctgtagccaggagtgtgccaacgtctacggctcctaccagtgttactgccggcgaggctaccagctcagcgatgtggatggagtcacctgtgaagacatcgacgagtgcgccctgcccaccgggggccacatctgctcctaccgctgcatcaacatccctggaagcttccagtgcagctgcccctcgtctggctacaggctggcccccaatggccgcaactgccaagacattgatgagtgtgtgactggcatccacaactgctccatcaacgagacctgcttcaacatccagggcggcttccgctgcctggccttcgagtgccctgagaactaccgccgctccgcagccacccgctgtgagcgcttgccttgccatgagaatcgggagtgctccaagctgcctctgagaataacctactaccacctctctttccccaccaacatccaagcgcccgcggtggttttccgcatgggcccctccagtgctgtccccggggacagcatgcagctggccatcaccggcggcaatgaggagggctttttcaccacccggaaggtgagcccccacagtggggtggtggccctcaccaagcctgtccccgagcccagggacttgctcctgaccgtcaagatggatctctctcgccacggcaccgtcagctcctttgtggccaagcttttcatctttgtgtctgcagagctctgagcactcgcttcgcgtcgcggggtctccctcctgttgctttcctaaccctgccctccggggcgttaataaagtcttagcaagcgtcccacacagtga

SEQ ID NO: 308466 - DNA, 2813 bp, Homo sapiens
ccctcctcccgggcgggataattgaacggcgcggccctggcccagcgttggctgccgaggctcggccggagcgtggagcccgcgccgctgccccaggaccgcgcccgcgcctttgtccgccgccgcccaccgcccgtcgcccgccgcccatggagcgcgccgcgccgtcgcgccgggtcccgcttccgctgctgctgctcggcggccttgcgctgctggcggccggagtggacgcggatgtcctcctggaggcctgctgtgcggacggacaccggatggccactcatcagaaggactgctcgctgccatatgctacggaatccaaagaatgcaggatggtgcaggagcagtgctgccacagccagctggaggagctgcactgtgccacgggcatcagcctggccaacgagcaggaccgctgtgccacgccccacggtgacaacgccagcctggaggccacatttgtgaagaggtgctgccattgctgtctgctggggagggcggcccaggcccagggccagagctgcgagtacagcctcatggttggctaccagtgtggacaggtcttccgggcatgctgtgtcaagagccaggagaccggagatttggatgtcgggggcctccaagaaacggataagatcattgaggttgaggaggaacaagaggacccatatctgaatgaccgctgccgaggaggcgggccctgcaagcagcagtgccgagacacgggtgacgaggtggtctgctcctgcttcgtgggctaccagctgctgtctgatggtgtctcctgtgaagatgtcaatgaatgcatcacgggcagccacagctgccggcttggagaatcctgcatcaacacagtgggctctttccgctgccagcgggacagcagctgcgggactggctatgagctcacagaggacaatagctgcaaagatattgacgagtgtgagagtggtattcataactgcctccccgattttatctgtcagaatactctgggatccttccgctgccgacccaagctacagtgcaagagtggctttatacaagatgctctaggcaactgtattgatatcaatgagtgtttgagtatcagtgccccgtgccctatcgggcatacatgcatcaacacagagggctcctacacgtgccagaagaacgtgcccaactgtggccgtggctaccatctcaacgaggagggaacgcgctgtgttgatgtggacgagtgcgcgccacctgctgagccctgtgggaagggacatcgctgcgtgaactctcccggcagtttccgctgcgaatgcaagacgggttactattttgacggcatcagcaggatgtgtgtcgatgtcaacgagtgccagcgctaccccgggcgcctgtgtggccacaagtgcgagaacacgctgggctcctacctctgcagctgttccgtgggcttccggctctctgtggatggcaggtcatgtgaagacatcaatgagtgcagcagcagcccctgtagccaggagtgtgccaacgtctacggctcctaccagtgttactgccggcgaggctaccagctcagcgatgtggatggagtcacctgtgaagacatcgacgagtgcgccctgcccaccgggggccacatctgctcctaccgctgcatcaacatccctggaagcttccagtgcagctgcccctcgtctggctacaggctggcccccaatggccgcaactgccaagacattgatgagtgtgtgactggcatccacaactgctccatcaacgagacctgcttcaacatccagggcggcttccgctgcctggccttcgagtgccctgagaactaccgccgctccgcagccacgctccagcaggagaagacagacacggtccgctgcatcaagtcctgccgccccaacgatgtcacatgcgtgttcgaccccgtgcacaccatctcccacaccgtcatctcgctgcctaccttccgcgagttcacccgccctgaagagatcatcttcctccgggccatcacgccaccgcatcctgccagccaggctaacatcatcttcgacatcacggaagggaacctgcgggactcttttgacatcatcaagcgttacatggacggcatgaccgtgggtgtcgtgcgccaggtgcggcccatcgtgggcccatttcatgccgtcctgaagctggagatgaactatgtggtcgggggcgtggtctcccaccgaaatgttgtcaacgtccacatcttcgtctctgagtactggttctgagggctggtctgccgcacagccgcaggtgcacctccaggccaaatcattgctgccagtgactgtggtctgtacttgtttataccctcagacttttttaatgttaggtatttgtagcattaggccaacatgtattaagctgagccagatgaataagtccatctgatgtattttcggtgtttaaaaaatgagcccagttgctcaactgtttggttgaaaaccttgctcattttttaatgcgaaggctaagtgtcaccccctttctctgcctctggctgggccttgctaagggccaaggaaagaaagacattttttagggggcagccagtccaaatgccaaaagaagaccagttcttgccctgattgtatgaaatttgacattttggcactttttttttttttttgggccacccatttttcctttttcctagggcctgggcggtggtaaaatcgcacaccgttgtatactattttccccccaaacgcactttcacaaattccctgcggggcacctatttgacgggaaattggccttctctgtggaattagagaaaa

SEQ ID NO: 308467 - DNA, 1593 bp, Homo sapiens
gggtgatctagaggatccgcctcgaaagacattaccttgaaagacatcttcgtgggctaccagctgctgtctgatggtgtctcctgtgaagatgtcaatgaatgcatcacgggcagccacagctgccggcttggagaatcctgcatcaacacagtgggctctttccgctgccagcgggacagcagctgcgggactggctatgagctcacagaggacaatagctgcaaagatattgacgagtgtgagagtggtattcataactgcctccccgattttatctgtcagaatactctgggatccttccgctgccgacccaagctacagtgcaagagtggctttatacaagatgctctaggcaactgtattgatatcaatgagtgtttgagtatcagtgccccgtgccctatcgggcatacatgcatcaacacagagggctcctacacgtgccagaagaacgtgcccaactgtggccgtggctaccatctcaacgaggagggaacgcgctgtgttgatgtggacgagtgcgcgccacctgctgagccctgtgggaagggacatcgctgcgtgaactctcccggcagtttccgctgcgaatgcaagacgggttactattttgacggcatcagcaggatgtgtgtcgatgtcaacgagtgccagcgctaccccgggcgcctgtgtggccacaagtgcgagaacacgctgggctcctacctctgcagctgttccgtgggcttccggctctctgtggatggcaggtcatgtgaagacatcaatgagtgcagcagcagcccctgtagccaggagtgtgccaacgtctacggctcctaccagtgttactgccggcgaggctaccagctcagcgatgtggatggagtcacctgtgaagacatcgacgagtgcgccctgcccaccgggggccacatctgctcctaccgctgcatcaacatccctggaagcttccagtgcagctgcccctcgtctggctacaggctggcccccaatggccgcaactgccaagacattgatgagtgtgtgactggcatccacaactgctccatcaacgagacctgcttcaacatccagggcggcttccgctgcctggccttcgagtgccctgagaactaccgccgctccgcagccacccgctgtgagcgcttgccttgccatgagaatcgggagtgctccaagctgcctctgagaataacctactaccacctctctttccccaccaacatccaagcgcccgcggtggttttccgcatgggcccctccagtgctgtccccggggacagcatgcagctggccatcaccggcggcaatgaggagggctttttcaccacccggaaggtgagcccccacagtggggtggtggccctcaccaagcctgtccccgagcccagggacttgctcctgaccgtcaagatggatctctctcgccacggcaccgtcagctcctttgtggccaagcttttcatctttgtgtctgcagagctctgagcactcgcttcgcgtcgcggggtctccctcctgttgctttcctaaccctgccctccggggcgttaataaagtcttagcaagcgtcccacacagtga

SEQ ID NO: 308468 - DNA, 1515 bp, Homo sapiens
cagcggaaagagcccactgtgttgatgcaggattctccaagccggcagctgtggctgcccgtgatgcattcattgacatcttcacaggagacaccatcagacagcagctgcgggactggctatgagctcacagaggacaatagctgcaaagatattgacgagtgtgagagtggtattcataactgcctccccgattttatctgtcagaatactctgggatccttccgctgccgacccaagctacagtgcaagagtggctttatacaagatgctctaggcaactgtattgatatcaatgagtgtttgagtatcagtgccccgtgccctatcgggcatacatgcatcaacacagagggctcctacacgtgccagaagaacgtgcccaactgtggccgtggctaccatctcaacgaggagggaacgcgctgtgttgatgtggacgagtgcgcgccacctgctgagccctgtgggaagggacatcgctgcgtgaactctcccggcagtttccgctgcgaatgcaagacgggttactattttgacggcatcagcaggatgtgtgtcgatgtcaacgagtgccagcgctaccccgggcgcctgtgtggccacaagtgcgagaacacgctgggctcctacctctgcagctgttccgtgggcttccggctctctgtggatggcaggtcatgtgaagacatcaatgagtgcagcagcagcccctgtagccaggagtgtgccaacgtctacggctcctaccagtgttactgccggcgaggctaccagctcagcgatgtggatggagtcacctgtgaagacatcgacgagtgcgccctgcccaccgggggccacatctgctcctaccgctgcatcaacatccctggaagcttccagtgcagctgcccctcgtctggctacaggctggcccccaatggccgcaactgccaagacattgatgagtgtgtgactggcatccacaactgctccatcaacgagacctgcttcaacatccagggcggcttccgctgcctggccttcgagtgccctgagaactaccgccgctccgcagccacccgctgtgagcgcttgccttgccatgagaatcgggagtgctccaagctgcctctgagaataacctactaccacctctctttccccaccaacatccaagcgcccgcggtggttttccgcatgggcccctccagtgctgtccccggggacagcatgcagctggccatcaccggcggcaatgaggagggctttttcaccacccggaaggtgagcccccacagtggggtggtggccctcaccaagcctgtccccgagcccagggacttgctcctgaccgtcaagatggatctctctcgccacggcaccgtcagctcctttgtggccaagcttttcatctttgtgtctgcagagctctgagcactcgcttcgcgtcgcggggtctccctcctgttgctttcctaaccctgccctccggggcgttaataaagtcttagcaagcgtcccacacagtga

SEQ ID NO: 308469 - DNA, 2902 bp, Homo sapiens
  misc_feature (2594)..(2594): n is a, c, g, or t
  misc_feature (2596)..(2596): n is a, c, g, or t
  misc_feature (2678)..(2678): n is a, c, g, or t
  misc_feature (2680)..(2680): n is a, c, g, or t
  misc_feature (2799)..(2799): n is a, c, g, or t
  misc_feature (2801)..(2801): n is a, c, g, or t
  misc_feature (2809)..(2809): n is a, c, g, or t
  misc_feature (2833)..(2833): n is a, c, g, or t
  misc_feature (2901)..(2901): n is a, c, g, or t
ccctcctcccgggcgggataattgaacggcgcggccctggcccagcgttggctgccgaggctcggccggagcgtggagcccgcgccgctgccccaggaccgcgcccgcgcctttgtccgccgccgcccaccgcccgtcgcccgccgcccatggagcgcgccgcgccgtcgcgccgggtcccgcttccgctgctgctgctcggcggccttgcgctgctggcggccggagtggacgcggatgtcctcctggaggcctgctgtgcggacggacaccggatggccactcatcagaaggactgctcgctgccatatgctacggaatccaaagaatgcaggatggtgcaggagcagtgctgccacagccagctggaggagctgcactgtgccacgggcatcagcctggccaacgagcaggaccgctgtgccacgccccacggtgacaacgccagcctggaggccacatttgtgaagaggtgctgccattgctgtctgctggggagggcggcccaggcccagggccagagctgcgagtacagcctcatggttggctaccagtgtggacaggtcttccgggcatgctgtgtcaagagccaggagaccggagatttggatgtcgggggcctccaagaaacggataagatcattgaggttgaggaggaacaagaggacccatatctgaatgaccgctgccgaggaggcgggccctgcaagcagcagtgccgagacacgggtgacgaggtggtctgctcctgcttcgtgggctaccagctgctgtctgatggtgtctcctgtgaagatgtcaatgaatgcatcacgggcagccacagctgccggcttggagaatcctgcatcaacacagtgggctctttccgctgccagcgggacagcagctgcgggactggctatgagctcacagaggacaatagctgcaaagatattgacgagtgtgagagtggtattcataactgcctccccgattttatctgtcagaatactctgggatccttccgctgccgacccaagctacagtgcaagagtggctttatacaagatgctctaggcaactgtattgatatcaatgagtgtttgagtatcagtgccccgtgccctatcgggcatacatgcatcaacacagagggctcctacacgtgccagaagaacgtgcccaactgtggccgtggctaccatctcaacgaggagggaacgcgctgtgttgatgtggacgagtgcgcgccacctgctgagccctgtgggaagggacatcgctgcgtgaactctcccggcagtttccgctgcgaatgcaagacgggttactattttgacggcatcagcaggatgtgtgtcgatgtcaacgagtgccagcgctaccccgggcgcctgtgtggccacaagtgcgagaacacgctgggctcctacctctgcagctgttccgtgggcttccggctctctgtggatggcaggtcatgtgaagacatcaatgagtgcagcagcagcccctgtagccaggagtgtgccaacgtctacggctcctaccagtgttactgccggcgaggctaccagctcagcgatgtggatggagtcacctgtgaagacatcgacgagtgcgccctgcccaccgggggccacatctgctcctaccgctgcatcaacatccctggaagcttccagtgcagctgcccctcgtctggctacaggctggcccccaatggccgcaactgccaagacattgatgagtgtgtgactggcatccacaactgctccatcaacgagacctgcttcaacatccagggcggcttccgctgcctggccttcgagtgccctgagaactaccgccgctccgcagccacgctccagcaggagaagacagacacggtccgctgcatcaagtcctgccgccccaacgatgtcacatgcgtgttcgaccccgtgcacaccatctcccacaccgtcatctcgctgcctaccttccgcgagttcacccgccctgaagagatcatcttcctccgggccatcacgccaccgcatcctgccagccaggctaacatcatcttcgacatcacggaagggaacctgcgggactcttttgacatcatcaagcgttacatggacggcatgaccgtgggtgtcgtgcgccaggtgcggcccatcgtgggcccatttcatgccgtcctgaagctggagatgaactatgtggtcgggggcgtggtctcccaccgaaatgttgtcaacgtccacatcttcgtctctgagtactggttctgagggctggtctgccgcacagccgcaggtgcacctccaggccaaatcattgctgccagtgactgtggtctgtacttgtttataccctcagacttttttaatgttaggtatttgtagcattaggccaacatgtattaagctgagccagatgaataagtccatctgatgtattttcggtgtttaaaaaatgagcccagttgctcaactgtttggttgaaaaccttgctcattttttaatgcgaaggctaagtgtcaccccctttctctgcctctggctgggccttgctagagagacacacagagagagagaaagagaaagagagacacatatatttntntatagagcgggagacacagacacacagatacacacacaaatagacacacacacagagagagagacacacacagatatacatntngacacacatagagatatagatatatagagatatatatatagagacacatatatatagagacacacatatatatatttttatatatatatatatatagagacacacatatacacagatantntatactantagtatactatatagagaacacanaagactcgactcgtatagagaatatagaagacacgaagagtggagagatgtgagagacacacatctcnc

SEQ ID NO: 308470 - DNA, 2637 bp, Homo sapiens
ccctcctcccgggcgggataattgaacggcgcggccctggcccagcgttggctgccgaggctcggccggagcgtggagcccgcgccgctgccccaggaccgcgcccgcgcctttgtccgccgccgcccaccgcccgtcgcccgccgcccatggagcgcgccgcgccgtcgcgccgggtcccgcttccgctgctgctgctcggcggccttgcgctgctggcggccggagtggacgcggatgtcctcctggaggcctgctgtgcggacggacaccggatggccactcatcagaaggactgctcgctgccatatgctacggaatccaaagaatgcaggatggtgcaggagcagtgctgccacagccagctggaggagctgcactgtgccacgggcatcagcctggccaacgagcaggaccgctgtgccacgccccacggtgacaacgccagcctggaggccacatttgtgaagaggtgctgccattgctgtctgctggggagggcggcccaggcccagggccagagctgcgagtacagcctcatggttggctaccagtgtggacaggtcttccgggcatgctgtgtcaagagccaggagaccggagatttggatgtcgggggcctccaagaaacggataagatcattgaggttgaggaggaacaagaggacccatatctgaatgaccgctgccgaggaggcgggccctgcaagcagcagtgccgagacacgggtgacgaggtggtctgctcctgcttcgtgggctaccagctgctgtctgatggtgtctcctgtgaagatgtcaatgaatgcatcacgggcagccacagctgccggcttggagaatcctgcatcaacacagtgggctctttccgctgccagcgggacagcagctgcgggactggctatgagctcacagaggacaatagctgcaaagatattgacgagtgtgagagtggtattcataactgcctccccgattttatctgtcagaatactctgggatccttccgctgccgacccaagctacagtgcaagagtggctttatacaagatgctctaggcaactgtattgatatcaatgagtgtttgagtatcagtgccccgtgccctatcgggcatacatgcatcaacacagagggctcctacacgtgccagaagaacgtgcccaactgtggccgtggctaccatctcaacgaggagggaacgcgctgtgttgatgtggacgagtgcgcgccacctgctgagccctgtgggaagggacatcgctgcgtgaactctcccggcagtttccgctgcgaatgcaagacgggttactattttgacggcatcagcaggatgtgtgtcgatgtcaacgagtgccagcgctaccccgggcgcctgtgtggccacaagtgcgagaacacgctgggctcctacctctgcagctgttccgtgggcttccggctctctgtggatggcaggtcatgtgaagacatcaatgagtgcagcagcagcccctgtagccaggagtgtgccaacgtctacggctcctaccagtgttactgccggcgaggctaccagctcagcgatgtggatggagtcacctgtgaagacatcgacgagtgcgccctgcccaccgggggccacatctgctcctaccgctgcatcaacatccctggaagcttccagtgcagctgcccctcgtctggctacaggctggcccccaatggccgcaactgccaagacattgatgagtgtgtgactggcatccacaactgctccatcaacgagacctgcttcaacatccagggcggcttccgctgcctggccttcgagtgccctgagaactaccgccgctccgcagccacgctccagcaggagaagacagacacggtccgctgcatcaagtcctgccgccccaacgatgtcacatgcgtgttcgaccccgtgcacaccatctcccacaccgtcatctcgctgcctaccttccgcgagttcacccgccctgaagagatcatcttcctccgggccatcacgccaccgcatcctgccagccaggctaacatcatcttcgacatcacggaagggaacctgcgggactcttttgacatcatcaagcgttacatggacggcatgaccgtgggtgtcgtgcgccaggtgcggcccatcgtgggcccatttcatgccgtcctgaagctggagatgaactatgtggtcgggggcgtggtctcccaccgaaatgttgtcaacgtccacatcttcgtctctgagtactggttctgagggctggtctgccgcacagccgcaggtgcacctccaggccaaatcattgctgccagtgactgtggtctgtacttgtttataccctcagacttttttaatgttaggtatttgtagcattaggccaacatgtattaagctgagccagatgaataagtccatctgatgtattttcggtgtttaaaaaatgagcccagttgctcaactgtttggttgaaaaccttgctcattttttaatgcgaaggctaagtgtcaccccctttctctgcctctggctgggccttgctttcaccaggggaatggctgggatttctcggcactctgcatcatccatcttttcttataggtgggaaaataaacaactttgtgatcctcctga

SEQ ID NO: 308471 - DNA, 3185 bp, Homo sapiens
ccctcctcccgggcgggataattgaacggcgcggccctggcccagcgttggctgccgaggctcggccggagcgtggagcccgcgccgctgccccaggaccgcgcccgcgcctttgtccgccgccgcccaccgcccgtcgcccgccgcccatggagcgcgccgcgccgtcgcgccgggtcccgcttccgctgctgctgctcggcggccttgcgctgctggcggccggagtggacgcggatgtcctcctggaggcctgctgtgcggacggacaccggatggccactcatcagaaggactgctcgctgccatatgctacggaatccaaagaatgcaggatggtgcaggagcagtgctgccacagccagctggaggagctgcactgtgccacgggcatcagcctggccaacgagcaggaccgctgtgccacgccccacggtgacaacgccagcctggaggccacatttgtgaagaggtgctgccattgctgtctgctggggagggcggcccaggcccagggccagagctgcgagtacagcctcatggttggctaccagtgtggacaggtcttccgggcatgctgtgtcaagagccaggagaccggagatttggatgtcgggggcctccaagaaacggataagatcattgaggttgaggaggaacaagaggacccatatctgaatgaccgctgccgaggaggcgggccctgcaagcagcagtgccgagacacgggtgacgaggtggtctgctcctgcttcgtgggctaccagctgctgtctgatggtgtctcctgtgaagatgtcaatgaatgcatcacgggcagccacagctgccggcttggagaatcctgcatcaacacagtgggctctttccgctgccagcgggacagcagctgcgggactggctatgagctcacagaggacaatagctgcaaagatattgacgagtgtgagagtggtattcataactgcctccccgattttatctgtcagaatactctgggatccttccgctgccgacccaagctacagtgcaagagtggctttatacaagatgctctaggcaactgtattgatatcaatgagtgtttgagtatcagtgccccgtgccctatcgggcatacatgcatcaacacagagggctcctacacgtgccagaagaacgtgcccaactgtggccgtggctaccatctcaacgaggagggaacgcgctgtgttgatgtggacgagtgcgcgccacctgctgagccctgtgggaagggacatcgctgcgtgaactctcccggcagtttccgctgcgaatgcaagacgggttactattttgacggcatcagcaggatgtgtgtcgatgtcaacgagtgccagcgctaccccgggcgcctgtgtggccacaagtgcgagaacacgctgggctcctacctctgcagctgttccgtgggcttccggctctctgtggatggcaggtcatgtgaagacatcaatgagtgcagcagcagcccctgtagccaggagtgtgccaacgtctacggctcctaccagtgttactgccggcgaggctaccagctcagcgatgtggatggagtcacctgtgaagacatcgacgagtgcgccctgcccaccgggggccacatctgctcctaccgctgcatcaacatccctggaagcttccagtgcagctgcccctcgtctggctacaggctggcccccaatggccgcaactgccaagacattgatgagtgtgtgactggcatccacaactgctccatcaacgagacctgcttcaacatccagggcggcttccgctgcctggccttcgagtgccctgagaactaccgccgctccgcagccacccgctgtgagcgcttgccttgccatgagaatcgggagtgctccaagctgcctctgagaataacctactaccacctctctttccccaccaacatccaagcgcccgcggtggttttccgcatgggcccctccagtgctgtccccggggacagcatgcagctggccatcaccggcggcaatgaggagggctttttcaccacccggaaggtgagcccccacagtggggtggtggccctcaccaagcctgtccccgagcccagggacttgctcctgaccgtcaagatggatctctctcgccacggcaccgtcagctcctttgtggccaagcttttcatctttgtgtctgcagagctctgagcactcgcttcgcgtcgcggggtctccctcctgttgctttcctaaccctgccctccggggcgttaataaagtcttagcaagcgtcccacacagtgaaaaaacaacacaaaaaaacaaaacaaaaaccattgtgtctggaccccactactgggccctctgagaaaaagacccctttcaaaacacccatgcgtctggcggccgccgggggcaccccaataacaggccacatgtcggcaaccaccagggggaccacaaagggcgagttctccacaagaggaaaaaaccccgaggggcaccgaggcaccacaggagcgactgagcgcatcttccccccacgcaagctaacacacacaaaagccgcaccggggagacaaaccgccgaacgccagtctcaagagacaccacgctcccccaaaaatgtggaccaactctccccgagacagcgccacaccaaccacgggcgggacacttccttaacaccgcagcgaaggaagagtccccccacagcagcagaaaagcctacacaaacatcaccagacaaactaattaagcgcgccccaagcctcgacgggggggaacagtcagaaaagagaaccacgacccacagcagcagcggcgacacgtcaacacagccagagccgcgcgacgaccgcggacagagcgcacgcaccagcagatccccgagaggcagcagcacggccggcacgtcacagagcactacgaccgcccacgaccgaactgcccagtagaaacgcaccagcacccccgacacgcgcagcgcgccggagtcgccgcagcacgccgggccaggcgaggagccgccgcgcgacgaccaccccacagcagccgacgagaggcgacgccggagcgcgaagccacagcccgagaccagcgacgggcgcagcacagcgacggcacacacatgctgcaccggcgccgcgcctcgccagcgacacgcccggccaccacccccaccgcccagca

SEQ ID NO: 308472 - DNA, 1385 bp, Homo sapiens
gcttccgctgccgacccaagctacagtgcaaggatcccagagtattctgacagataaaatcggggaggcagttatggaatactctgggatccttccgctgccgacccaagctacagtgcaagagtggctttatacaagatgctctaggcaactgtattgatatcaatgagtgtttgagtatcagtgccccgtgccctatcgggcatacatgcatcaacacagagggctcctacacgtgccagaagaacgtgcccaactgtggccgtggctaccatctcaacgaggagggaacgcgctgtgttgatgtggacgagtgcgcgccacctgctgagccctgtgggaagggacatcgctgcgtgaactctcccggcagtttccgctgcgaatgcaagacgggttactattttgacggcatcagcaggatgtgtgtcgatgtcaacgagtgccagcgctaccccgggcgcctgtgtggccacaagtgcgagaacacgctgggctcctacctctgcagctgttccgtgggcttccggctctctgtggatggcaggtcatgtgaagacatcaatgagtgcagcagcagcccctgtagccaggagtgtgccaacgtctacggctcctaccagtgttactgccggcgaggctaccagctcagcgatgtggatggagtcacctgtgaagacatcgacgagtgcgccctgcccaccgggggccacatctgctcctaccgctgcatcaacatccctggaagcttccagtgcagctgcccctcgtctggctacaggctggcccccaatggccgcaactgccaagacattgatgagtgtgtgactggcatccacaactgctccatcaacgagacctgcttcaacatccagggcggcttccgctgcctggccttcgagtgccctgagaactaccgccgctccgcagccacccgctgtgagcgcttgccttgccatgagaatcgggagtgctccaagctgcctctgagaataacctactaccacctctctttccccaccaacatccaagcgcccgcggtggttttccgcatgggcccctccagtgctgtccccggggacagcatgcagctggccatcaccggcggcaatgaggagggctttttcaccacccggaaggtgagcccccacagtggggtggtggccctcaccaagcctgtccccgagcccagggacttgctcctgaccgtcaagatggatctctctcgccacggcaccgtcagctcctttgtggccaagcttttcatctttgtgtctgcagagctctgagcactcgcttcgcgtcgcggggtctccctcctgttgctttcctaaccctgccctccggggcgttaataaagtcttagcaagcgtcccacacagtga

SEQ ID NO: 308473 - DNA, 2278 bp, Homo sapiens
  misc_feature (2201)..(2201): n is a, c, g, or t
  misc_feature (2241)..(2241): n is a, c, g, or t
  misc_feature (2250)..(2250): n is a, c, g, or t
  misc_feature (2266)..(2266): n is a, c, g, or t
ccctcctcccgggcgggataattgaacggcgcggccctggcccagcgttggctgccgaggctcggccggagcgtggagcccgcgccgctgccccaggaccgcgcccgcgcctttgtccgccgccgcccaccgcccgtcgcccgccgcccatggagcgcgccgcgccgtcgcgccgggtcccgcttccgctgctgctgctcggcggccttgcgctgctggcggccggagtggacgcggatgtcctcctggaggcctgctgtgcggacggacaccggatggccactcatcagaaggactgctcgctgccatatgctacggaatccaaagaatgcaggatggtgcaggagcagtgctgccacagccagctggaggagctgcactgtgccacgggcatcagcctggccaacgagcaggaccgctgtgccacgccccacggtgacaacgccagcctggaggccacatttgtgaagaggtgctgccattgctgtctgctggggagggcggcccaggcccagggccagagctgcgagtacagcctcatggttggctaccagtgtggacaggtcttccgggcatgctgtgtcaagagccaggagaccggagatttggatgtcgggggcctccaagaaacggataagatcattgaggttgaggaggaacaagaggacccatatctgaatgaccgctgccgaggaggcgggccctgcaagcagcagtgccgagacacgggtgacgaggtggtctgctcctgcttcgtgggctaccagctgctgtctgatggtgtctcctgtgaagatgtcaatgaatgcatcacgggcagccacagctgccggcttggagaatcctgcatcaacacagtgggctctttccgctgccagcgggacagcagctgcgggactggctatgagctcacagaggacaatagctgcaaagatattgacgagtgtgagagtggtattcataactgcctccccgattttatctgtcagaatactctgggatccttccgctgccgacccaagctacagtgcaagagtggctttatacaagatgctctaggcaactgtattgatatcaatgagtgtttgagtatcagtgccccgtgccctatcgggcatacatgcatcaacacagagggctcctacacgtgccagaagaacgtgcccaactgtggccgtggctaccatctcaacgaggagggaacgcgctgtgttgatgtggacgagtgcgcgccacctgctgagccctgtgggaagggacatcgctgcgtgaactctcccggcagtttccgctgcgaatgcaagacgggttactattttgacggcatcagcaggatgtgtgtcgatgtcaacgagtgccagcgctaccccgggcgcctgtgtggccacaagtgcgagaacacgctgggctcctacctctgcagctgttccgtgggcttccggctctctgtggatggcaggtcatgtgaagacatcaatgagtgcagcagcagcccctgtagccaggagtgtgccaacgtctacggctcctaccagtgttactgccggcgaggctaccagctcagcgatgtggatggagtcacctgtgaagacatcgacgagtgcgccctgcccaccgggggccacatctgctcctaccgctgcatcaacatccctggaagcttccagtgcagctgcccctcgtctggctacaggctggcccccaatggccgcaactgccaagacattgatgagtgtgtgactggcatccacaactgctccatcaacgagacctgcttcaacatccagggcggcttccgctgcctggccttcgagtgccctgagaactaccgccgctccgcagccacccgctgtgagcgcttgccttgccatgagaatcgggagtgctccaagctgcctctgagaataacctactaccacctctctttccccaccaacatccaagcgcccgcggtggttttccgcatgggcccctccagtgctgtccccggggacagcatgcagctggccatcaccggcggcaatgaggagggctttttcaccacccggaaggtgagcccccacagtggggtggtggccctcaccaagcctgtccccgagcccagggacttgctcctgaccgtcaagatggatctctctcgccacggcaccgtcagctcctttgtggccaagcttttcatctttgtgttcttgcaagagttnttgaggaattcggtttcggtttcgggggggtttttccttncttgtttgntttttcttaaaccttngcctttccgggg

SEQ ID NO: 308474 - DNA, 2181 bp, Homo sapiens
ccctcctcccgggcgggataattgaacggcgcggccctggcccagcgttggctgccgaggctcggccggagcgtggagcccgcgccgctgccccaggaccgcgcccgcgcctttgtccgccgccgcccaccgcccgtcgcccgccgcccatggagcgcgccgcgccgtcgcgccgggtcccgcttccgctgctgctgctcggcggccttgcgctgctggcggccggagtggacgcggatgtcctcctggaggcctgctgtgcggacggacaccggatggccactcatcagaaggactgctcgctgccatatgctacggaatccaaagaatgcaggatggtgcaggagcagtgctgccacagccagctggaggagctgcactgtgccacgggcatcagcctggccaacgagcaggaccgctgtgccacgccccacggtgacaacgccagcctggaggccacatttgtgaagaggtgctgccattgctgtctgctggggagggcggcccaggcccagggccagagctgcgagtacagcctcatggttggctaccagtgtggacaggtcttccgggcatgctgtgtcaagagccaggagaccggagatttggatgtcgggggcctccaagaaacggataagatcattgaggttgaggaggaacaagaggacccatatctgaatgaccgctgccgaggaggcgggccctgcaagcagcagtgccgagacacgggtgacgaggtggtctgctcctgcttcgtgggctaccagctgctgtctgatggtgtctcctgtgaagatgtcaatgaatgcatcacgggcagccacagctgccggcttggagaatcctgcatcaacacagtgggctctttccgctgccagcgggacagcagctgcgggactggctatgagctcacagaggacaatagctgcaaagatattgacgagtgtgagagtggtattcataactgcctccccgattttatctgtcagaatactctgggatccttccgctgccgacccaagctacagtgcaagagtggctttatacaagatgctctaggcaactgtattgatatcaatgagtgtttgagtatcagtgccccgtgccctatcgggcatacatgcatcaacacagagggctcctacacgtgccagaagaacgtgcccaactgtggccgtggctaccatctcaacgaggagggaacgcgctgtgttgatgtggacgagtgcgcgccacctgctgagccctgtgggaagggacatcgctgcgtgaactctcccggcagtttccgctgcgaatgcaagacgggttactattttgacggcatcagcaggatgtgtgtcgatgtcaacgagtgccagcgctaccccgggcgcctgtgtggccacaagtgcgagaacacgctgggctcctacctctgcagctgttccgtgggcttccggctctctgtggatggcaggtcatgtgaagacatcaatgagtgcagcagcagcccctgtagccaggagtgtgccaacgtctacggctcctaccagtgttactgccggcgaggctaccagctcagcgatgtggatggagtcacctgtgaagacatcgacgagtgcgccctgcccaccgggggccacatctgctcctaccgctgcatcaacatccctggaagcttccagtgcagctgcccctcgtctggctacaggctggcccccaatggccgcaactgccaagacattgatgagtgtgtgactggcatccacaactgctccatcaacgagacctgcttcaacatccagggcggcttccgctgcctggccttcgagtgccctgagaactaccgccgctccgcagccacccgctgtgagcgcttgccttgccatgagaatcgggagtgctccaagctgcctctgagaataacctactaccacctctctttccccaccaacatccaagcgcccgcggtggttttccgcatgggcccctccagtgctgtccccggggacagcatgcagctggccatcaccggcggcaatgaggagggctttttcaccacccggaaggtgagcccccacagtggggtggtggccctcaccaagcctgtccccgagcccagggacttgctcctgaccgtcaagatggatctctctcgccacggcaccgtcagaggtcattctcaacggtgtaagatcc

SEQ ID NO: 308475 - DNA, 2664 bp, Homo sapiens
ccctcctcccgggcgggataattgaacggcgcggccctggcccagcgttggctgccgaggctcggccggagcgtggagcccgcgccgctgccccaggaccgcgcccgcgcctttgtccgccgccgcccaccgcccgtcgcccgccgcccatggagcgcgccgcgccgtcgcgccgggtcccgcttccgctgctgctgctcggcggccttgcgctgctggcggccggagtggacgcggatgtcctcctggaggcctgctgtgcggacggacaccggatggccactcatcagaaggactgctcgctgccatatgctacggaatccaaagaatgcaggatggtgcaggagcagtgctgccacagccagctggaggagctgcactgtgccacgggcatcagcctggccaacgagcaggaccgctgtgccacgccccacggtgacaacgccagcctggaggccacatttgtgaagaggtgctgccattgctgtctgctggggagggcggcccaggcccagggccagagctgcgagtacagcctcatggttggctaccagtgtggacaggtcttccgggcatgctgtgtcaagagccaggagaccggagatttggatgtcgggggcctccaagaaacggataagatcattgaggttgaggaggaacaagaggacccatatctgaatgaccgctgccgaggaggcgggccctgcaagcagcagtgccgagacacgggtgacgaggtggtctgctcctgcttcgtgggctaccagctgctgtctgatggtgtctcctgtgaagatgtcaatgaatgcatcacgggcagccacagctgccggcttggagaatcctgcatcaacacagtgggctctttccgctgccagcgggacagcagctgcgggactggctatgagctcacagaggacaatagctgcaaagatattgacgagtgtgagagtggtattcataactgcctccccgattttatctgtcagaatactctgggatccttccgctgccgacccaagctacagtgcaagagtggctttatacaagatgctctaggcaactgtattgatatcaatgagtgtttgagtatcagtgccccgtgccctatcgggcatacatgcatcaacacagagggctcctacacgtgccagaagaacgtgcccaactgtggccgtggctaccatctcaacgaggagggaacgcgctgtgttgatgtggacgagtgcgcgccacctgctgagccctgtgggaagggacatcgctgcgtgaactctcccggcagtttccgctgcgaatgcaagacgggttactattttgacggcatcagcaggatgtgtgtcgatgtcaacgagtgccagcgctaccccgggcgcctgtgtggccacaagtgcgagaacacgctgggctcctacctctgcagctgttccgtgggcttccggctctctgtggatggcaggtcatgtgaagacatcaatgagtgcagcagcagcccctgtagccaggagtgtgccaacgtctacggctcctaccagtgttactgccggcgaggctaccagctcagcgatgtggatggagtcacctgtgaagacatcgacgagtgcgccctgcccaccgggggccacatctgctcctaccgctgcatcaacatccctggaagcttccagtgcagctgcccctcgtctggctacaggctggcccccaatggccgcaactgccaagacattgatgagtgtgtgactggcatccacaactgctccatcaacgagacctgcttcaacatccagggcggcttccgctgcctggccttcgagtgccctgagaactaccgccgctccgcagccacgcagaaatccaagaagggaaggcagaacaccccagcgggatcaagtaaagaggactgcagggttcttccatggaagcaggggttggaggatacccaccttgatgcctagtgaggaagatggacctggacagacagtcagctccacaccttgcgctgagcagctgtgattgtgccacgggagcatgagcccttttccccacggcccttgccactgtctcctggccctctctctgatcatgccaggtttgcaccagcctcgagtctcccatgttgtagtacattctccaagatgcagcccaggagcctctctgaaggaccagtctggttacgatggtctgagcttccttagaaccttccatggttgtcttttcccagcagatgaagcatagcctccttggaatggcatgggaggcctggcctgatctggcctctgcccaccctttgagctgcacctgccccaccccagctcatccatgtgcttgtaccctggccccacggggaggcttgcccttccctgaatctgccttcttgtggctttagcatgtgccatgctgtccccctgcagactgccattctccttgcagacttggctcagaagtcacctcctcagtgcagttagcctgagctcccctggccccaggtgcctccatcagagcatttaccccattgtgttgtggctgttccttaacgtccccactagccaggctctttgagggcagggattgtgtctggttaatttctgtattctctgcaactttgcaatgtttggcttgaagaaggagctcagtaaacatctgaataaacatgcaggttgatgg

SEQ ID NO: 308476 - DNA, 2169 bp, Homo sapiens
ccctcctcccgggcgggataattgaacggcgcggccctggcccagcgttggctgccgaggctcggccggagcgtggagcccgcgccgctgccccaggaccgcgcccgcgcctttgtccgccgccgcccaccgcccgtcgcccgccgcccatggagcgcgccgcgccgtcgcgccgggtcccgcttccgctgctgctgctcggcggccttgcgctgctggcggccggagtggacgcggatgtcctcctggaggcctgctgtgcggacggacaccggatggccactcatcagaaggactgctcgctgccatatgctacggaatccaaagaatgcaggatggtgcaggagcagtgctgccacagccagctggaggagctgcactgtgccacgggcatcagcctggccaacgagcaggaccgctgtgccacgccccacggtgacaacgccagcctggaggccacatttgtgaagaggtgctgccattgctgtctgctggggagggcggcccaggcccagggccagagctgcgagtacagcctcatggttggctaccagtgtggacaggtcttccgggcatgctgtgtcaagagccaggagaccggagatttggatgtcgggggcctccaagaaacggataagatcattgaggttgaggaggaacaagaggacccatatctgaatgaccgctgccgaggaggcgggccctgcaagcagcagtgccgagacacgggtgacgaggtggtctgctcctgcttcgtgggctaccagctgctgtctgatggtgtctcctgtgaagatgtcaatgaatgcatcacgggcagccacagctgccggcttggagaatcctgcatcaacacagtgggctctttccgctgccagcgggacagcagctgcgggactggctatgagctcacagaggacaatagctgcaaagatattgacgagtgtgagagtggtattcataactgcctccccgattttatctgtcagaatactctgggatccttccgctgccgacccaagctacagtgcaagagtggctttatacaagatgctctaggcaactgtattgatatcaatgagtgtttgagtatcagtgccccgtgccctatcgggcatacatgcatcaacacagagggctcctacacgtgccagaagaacgtgcccaactgtggccgtggctaccatctcaacgaggagggaacgcgctgtgttgatgtggacgagtgcgcgccacctgctgagccctgtgggaagggacatctgcgagaacacgctgggctcctacctctgcagctgttccgtgggcttccggctctctgtggatggcaggtcatgtgaagacatcaatgagtgcagcagcagcccctgtagccaggagtgtgccaacgtctacggctcctaccagtgttactgccggcgaggctaccagctcagcgatgtggatggagtcacctgtgaagacatcgacgagtgcgccctgcccaccgggggccacatctgctcctaccgctgcatcaacatccctggaagcttccagtgcagctgcccctcgtctggctacaggctggcccccaatggccgcaactgccaagacattgatgagtgtgtgactggcatccacaactgctccatcaacgagacctgcttcaacatccagggcggcttccgctgcctggccttcgagtgccctgagaactaccgccgctccgcagccacccgctgtgagcgcttgccttgccatgagaatcgggagtgctccaagctgcctctgagaataacctactaccacctctctttccccaccaacatccaagcgcccgcggtggttttccgcatgggcccctccagtgctgtccccggggacagcatgcagctggccatcaccggcggcaatgaggagggctttttcaccacccggaaggtgagcccccacagtggggtggtggccctcaccaagcctgtccccgagcccagggacttgctcctgaccgtcaagatggatctctctcgccacggcaccgtcagctcctttgtggccaagcttttcatctttgtgtctgcagagctctgagcactcgcttcgcgtcgcggggtctccctcctgttgctttcctaaccctgccctccggggcgttaataaagtcttagcaagcgtcccacacagtga

SEQ ID NO: 308477 - DNA, 2261 bp, Homo sapiens
ccctcctcccgggcgggataattgaacggcgcggccctggcccagcgttggctgccgaggctcggccggagcgtggagcccgcgccgctgccccaggaccgcgcccgcgcctttgtccgccgccgcccaccgcccgtcgcccgccgcccatggagcgcgccgcgccgtcgcgccgggtcccgcttccgctgctgctgctcggcggccttgcgctgctggcggccggagtggacgcggatgtcctcctggaggcctgctgtgcggacggacaccggatggccactcatcagaaggactgctcgctgccatatgctacggaatccaaagaatgcaggatggtgcaggagcagtgctgccacagccagctggaggagctgcactgtgccacgggcatcagcctggccaacgagcaggaccgctgtgccacgccccacggtgacaacgccagcctggaggccacatttgtgaagaggtgctgccattgctgtctgctggggagggcggcccaggcccagggccagagctgcgagtacagcctcatggttggctaccagtgtggacaggtcttccgggcatgctgtgtcaagagccaggagaccggagatttggatgtcgggggcctccaagaaacggataagatcattgaggttgaggaggaacaagaggacccatatctgaatgaccgctgccgaggaggcgggccctgcaagcagcagtgccgagacacgggtgacgaggtggtctgctcctgcttcgtgggctaccagctgctgtctgatggtgtctcctgtgaagatgtcaatgaatgcatcacgggcagccacagctgccggcttggagaatcctgcatcaacacagtgggctctttccgctgccagcgggacagcagctgcgggactggctatgagctcacagaggacaatagctgcaaagatattgacgagtgtgagagtggtattcataactgcctccccgattttatctgtcagaatactctgggatccttccgctgccgacccaagctacagtgcaagagtggctttatacaagatgctctaggcaactgtattgatatcaatgagtgtttgagtatcagtgccccgtgccctatcgggcatacatgcatcaacacagagggctcctacacgtgccagaagaacgtgcccaactgtggccgtggctaccatctcaacgaggagggaacgcgctgtgttgatgtggacgagtgcgcgccacctgctgagccctgtgggaagggacatcgctgcgtgaactctcccggcagtttccgctgcgaatgcaagacgggttactattttgacggcatcagcaggatgtgtgtcgatgtcaacgagtgccagcgctaccccgggcgcctgtgtggccacaagtgcgagaacacgctgggctcctacctctgcagctgttccgtgggcttccggctctctgtggatggcaggtcatgtgaagacatcaatgagtgcagcagcagcccctgtagccaggagtgtgccaacgtctacggctcctaccagtgttactgccggcgaggctaccagctcagcgatgtggatggagtcacctgtgaagacatcgacgagtgcgccctgcccaccgggggccacatctgctcctaccgctgcatcaacatccctggaagcttccagtgcagctgcccctcgtctggctacaggctggcccccaatggccgcaactgccaagacattgatgagtgtgtgactggcatccacaactgctccatcaacgagacctgcttcaacatccagggcggcttccgctgcctggccttcgagtgccctgagaactaccgccgctccgcagccacccgctgtgagcgcttgccttgccatgagaatcgggagtgctccaagctgcctctgagaataacctactaccacctctctttccccaccaacatccaagcgcccgcggtggttttccgcatgggcccctccagtgctgtccccggggacagcatgcagctggccatcaccggcggcaatgaggagggctttttcaccacccggaagcctgtccccgagcccagggacttgctcctgaccgtcaagatggatctctctcgccacggcaccgtcagctcctttgtggccaagcttttcatctttgtgtctgcagagctctgagcactcgcttcgcgtcgcggggtctccctcctgttgctttcctaaccctgccctccggggcgttaataaagtcttagcaagcgtcccacacagtga

SEQ ID NO: 308478 - DNA, 2488 bp, Homo sapiens
ccctcctcccgggcgggataattgaacggcgcggccctggcccagcgttggctgccgaggctcggccggagcgtggagcccgcgccgctgccccaggaccgcgcccgcgcctttgtccgccgccgcccaccgcccgtcgcccgccgcccatggagcgcgccgcgccgtcgcgccgggtcccgcttccgctgctgctgctcggcggccttgcgctgctggcggccggagtggacgcggatgtcctcctggaggcctgctgtgcggacggacaccggatggccactcatcagaaggactgctcgctgccatatgctacggaatccaaagaatgcaggatggtgcaggagcagtgctgccacagccagctggaggagctgcactgtgccacgggcatcagcctggccaacgagcaggaccgctgtgccacgccccacggtgacaacgccagcctggaggccacatttgtgaagaggtgctgccattgctgtctgctggggagggcggcccaggcccagggccagagctgcgagtacagcctcatggttggctaccagtgtggacaggtcttccgggcatgctgtgtcaagagccaggagaccggagatttggatgtcgggggcctccaagaaacggataagatcattgaggttgaggaggaacaagaggacccatatctgaatgaccgctgccgaggaggcgggccctgcaagcagcagtgccgagacacgggtgacgaggtggtctgctcctgcttcgtgggctaccagctgctgtctgatggtgtctcctgtgaagatgtcaatgaatgcatcacgggcagccacagctgccggcttggagaatcctgcatcaacacagtgggctctttccgctgccagcgggacagcagctgcgggactggctatgagctcacagaggacaatagctgcaaagatattgacgagtgtgagagtggtattcataactgcctccccgattttatctgtcagaatactctgggatccttccgctgccgacccaagctacagtgcaagagtggctttatacaagatgctctaggcaactgtattgatatcaatgagtgtttgagtatcagtgccccgtgccctatcgggcatacatgcatcaacacagagggctcctacacgtgccagaagaacgtgcccaactgtggccgtggctaccatctcaacgaggagggaacgcgctgtgttgatgtggacgagtgcgcgccacctgctgagccctgtgggaagggacatcgctgcgtgaactctcccggcagtttccgctgcgaatgcaagacgggttactattttgacggcatcagcaggatgtgtgtcgatgtcaacgagtgccagcgctaccccgggcgcctgtgtggccacaagtgcgagaacacgctgggctcctacctctgcagctgttccgtgggcttccggctctctgtggatggcaggtcatgtgaagacatcaatgagtgcagcagcagcccctgtagccaggagtgtgccaacgtctacggctcctaccagtgttactgccggcgaggctaccagctcagcgatgtggatggagtcacctgtgaagacatcgacgagtgcgccctgcccaccgggggccacatctgctcctaccgctgcatcaacatccctggaagcttccagtgcagctgcccctcgtctggctacaggctggcccccaatggccgcaactgccaagacattgatgagtgtgtgactggcatccacaactgctccatcaacgagacctgcttcaacatccagggcggcttccgctgcctggccttcgagtgccctgagaactaccgccgctccgcagccacatgatcgtagggaactctgcatgaggccatcggtgcaggctggagaagagaaggcaagttggcaggagtggagaccacaggcatttgagccacttcctcatgtaacttaacttgtgccttcaggacctgctcaagcccgatcacgtatataccacttccatttgatgatggaatgctgctgttcatgaccaactttatggctagatgggtcagaaagcacccagttcatgataggcagttcaggtcatatggtgacttgatgacccagagtcaaacattcagtttccaccaaagcccagtaacaggccaagagctgtctctcaaaaggagagtagttatctgcagaagatggcagggccttgctccgaaagcctagagaccgccactgtgattcacctatgggggcctgccaaagctgcagccagcatccttatctgccactgacacctcaagcaacattggatctgctgggtcatatggcccaagtggcagagcaacttgcacaacagcctggacctgtcatagagctttctcctgttctggaccccactcaaaactggcagcctttcaggtcactcaataaatgtgctggagtaacacactcaaacgaggaatgtgttgcctccaaaatccaataggccc

SEQ ID NO: 308479 - DNA, 2456 bp, Homo sapiens
ccctcctcccgggcgggataattgaacggcgcggccctggcccagcgttggctgccgaggctcggccggagcgtggagcccgcgccgctgccccaggaccgcgcccgcgcctttgtccgccgccgcccaccgcccgtcgcccgccgcccatggagcgcgccgcgccgtcgcgccgggtcccgcttccgctgctgctgctcggcggccttgcgctgctggcggccggagtggacgcggatgtcctcctggaggcctgctgtgcggacggacaccggatggccactcatcagaaggactgctcgctgccatatgctacggaatccaaagaatgcaggatggtgcaggagcagtgctgccacagccagctggaggagctgcactgtgccacgggcatcagcctggccaacgagcaggaccgctgtgccacgccccacggtgacaacgccagcctggaggccacatttgtgaagaggtgctgccattgctgtctgctggggagggcggcccaggcccagggccagagctgcgagtacagcctcatggttggctaccagtgtggacaggtcttccgggcatgctgtgtcaagagccaggagaccggagatttggatgtcgggggcctccaagaaacggataagatcattgaggttgaggaggaacaagaggacccatatctgaatgaccgctgccgaggaggcgggccctgcaagcagcagtgccgagacacgggtgacgaggtggtctgctcctgcttcgtgggctaccagctgctgtctgatggtgtctcctgtgaagatgtcaatgaatgcatcacgggcagccacagctgccggcttggagaatcctgcatcaacacagtgggctctttccgctgccagcgggacagcagctgcgggactggctatgagctcacagaggacaatagctgcaaagatattgacgagtgtgagagtggtattcataactgcctccccgattttatctgtcagaatactctgggatccttccgctgccgacccaagctacagtgcaagagtggctttatacaagatgctctaggcaactgtattgatatcaatgagtgtttgagtatcagtgccccgtgccctatcgggcatacatgcatcaacacagagggctcctacacgtgccagaagaacgtgcccaactgtggccgtggctaccatctcaacgaggagggaacgcgctgtgttgatgtggacgagtgcgcgccacctgctgagccctgtgggaagggacatcgctgcgtgaactctcccggcagtttccgctgcgaatgcaagacgggttactattttgacggcatcagcaggatgtgtgtcgatgtcaacgagtgccagcgctaccccgggcgcctgtgtggccacaagtgcgagaacacgctgggctcctacctctgcagctgttccgtgggcttccggctctctgtggatggcaggtcatgtgaagacatcaatgagtgcagcagcagcccctgtagccaggagtgtgccaacgtctacggctcctaccagtgttactgccggcgaggctaccagctcagcgatgtggatggagtcacctgtgaagacatcgacgagtgcgccctgcccaccgggggccacatctgctcctaccgctgcatcaacatccctggaagcttccagtgcagctgcccctcgtctggctacaggctggcccccaatggccgcaactgccaagacattgatgagtgtgtgactggcatccacaactgctccatcaacgagacctgcttcaacatccagggcggcttccgctgcctggccttcgagtgccctgagaactaccgccgctccgcagccacgctccagcaggagaagacagacacggtccgctgcatcaagtcctgccgccccaacgatgtcacatgcgtgttcgaccccgtgcacaccatctcccacaccgtcatctcgctgcctaccttccgcgagttcacccgccctgaagagatcatcttcctccgggccatcacgccaccgcatcctgccagccaggctaacatcatcttcgacatcacggaagggaacctgcgggactcttttgacatcatcaagcgttacatggacggcatgaccgtgggtgtcgtgcgccaggtgcggcccatcgtgggcccatttcatgccgtcctgaagctggagatgaactatgtggtcgggggcgtggtctcccaccgaaatgttgtcaacgtccacatcttcgtctctgagtactggttctgagggctggtctgccgcacagccgcaggtgcacctccaggccaaatcattgctgccagtgactgtggtctgtacttgtttataccctcagacttttttaatgttaggtatttgtagcattaggccaacatgtattaagctgagccagatgaataagtccatctgatgtatttcagaggtagatgtctttcagaggta

SEQ ID NO: 308480 - DNA, 2648 bp, Homo sapiens
ccctcctcccgggcgggataattgaacggcgcggccctggcccagcgttggctgccgaggctcggccggagcgtggagcccgcgccgctgccccaggaccgcgcccgcgcctttgtccgccgccgcccaccgcccgtcgcccgccgcccatggagcgcgccgcgccgtcgcgccgggtcccgcttccgctgctgctgctcggcggccttgcgctgctggcggccggagtggacgcggatgtcctcctggaggcctgctgtgcggacggacaccggatggccactcatcagaaggactgctcgctgccatatgctacggaatccaaagaatgcaggatggtgcaggagcagtgctgccacagccagctggaggagctgcactgtgccacgggcatcagcctggccaacgagcaggaccgctgtgccacgccccacggtgacaacgccagcctggaggccacatttgtgaagaggtgctgccattgctgtctgctggggagggcggcccaggcccagggccagagctgcgagtacagcctcatggttggctaccagtgtggacaggtcttccgggcatgctgtgtcaagagccaggagaccggagatttggatgtcgggggcctccaagaaacggataagatcattgaggttgaggaggaacaagaggacccatatctgaatgaccgctgccgaggaggcgggccctgcaagcagcagtgccgagacacgggtgacgaggtggtctgctcctgcttcgtgggctaccagctgctgtctgatggtgtctcctgtgaagatgtcaatgaatgcatcacgggcagccacagctgccggcttggagaatcctgcatcaacacagtgggctctttccgctgccagcgggacagcagctgcgggactggctatgagctcacagaggacaatagctgcaaagatattgacgagtgtgagagtggtattcataactgcctccccgattttatctgtcagaatactctgggatccttccgctgccgacccaagctacagtgcaagagtggctttatacaagatgctctaggcaactgtattgatatcaatgagtgtttgagtatcagtgccccgtgccctatcgggcatacatgcatcaacacagagggctcctacacgtgccagaagaacgtgcccaactgtggccgtggctaccatctcaacgaggagggaacgcgctgtgttgatgtggacgagtgcgcgccacctgctgagccctgtgggaagggacatcgctgcgtgaactctcccggcagtttccgctgcgaatgcaagacgggttactattttgacggcatcagcaggatgtgtgtcgatgtcaacgagtgccagcgctaccccgggcgcctgtgtggccacaagtgcgagaacacgctgggctcctacctctgcagctgttccgtgggcttccggctctctgtggatggcaggtcatgtgaagacatcaatgagtgcagcagcagcccctgtagccaggagtgtgccaacgtctacggctcctaccagtgttactgccggcgaggctaccagctcagcgatgtggatggagtcacctgtgaagacatcgacgagtgcgccctgcccaccgggggccacatctgctcctaccgctgcatcaacatccctggaagcttccagtgcagctgcccctcgtctggctacaggctggcccccaatggccgcaactgccaagacattgatgagtgtgtgactggcatccacaactgctccatcaacgagacctgcttcaacatccagggcggcttccgctgcctggccttcgagtgccctgagaactaccgccgctccgcagccacgctccagcaggagaagacagacacggtccgctgcatcaagtcctgccgccccaacgatgtcacatgcgtgttcgaccccgtgcacaccatctcccacaccgtcatctcgctgcctaccttccgcgagttcacccgccctgaagagatcatcttcctccgggccatcacgccaccgcatcctgccagccaggctaacatcatcttcgacatcacggaagggaacctgcgggactcttttgacatcatcaagcgttacatggacggcatgaccgtggcccctctcctgaactgtcacattttaaaagatttacagtcatgggaaatgaaaacggtggcatctgccattttggactcggatttatactctgaacactttcaaagcagctgagcaacggacggacagtccctgacctcccctgggcctcagtttccccattgtgaactgggaggagtgggcttcctagtcccttaggcgctggagtccgggaggtcctaaccagaacccacgagcgtgcagtgcgcacagagcagagcgttttggagcctggcctccaggtggcgctgttggaccttggacgctcagtctttgcgcctcaaacccgacggttgttaaaactggcagctggagaaagggaatcgttattcccgtcttgccaaagagccatttatagcacctttacaagcttttaaatgggtttgcatgttgtaaacatgactgagtcactggggggctccccaccccagcctcctcctgcgctagctggcagcaggaataattagttaattacaattaatggtgcat

SEQ ID NO: 308481 - DNA, 2021 bp, Homo sapiens
ccctcctcccgggcgggataattgaacggcgcggccctggcccagcgttggctgccgaggctcggccggagcgtggagcccgcgccgctgccccaggaccgcgcccgcgcctttgtccgccgccgcccaccgcccgtcgcccgccgcccatggagcgcgccgcgccgtcgcgccgggtcccgcttccgctgctgctgctcggcggccttgcgctgctggcggccggagtggacgcggatgtcctcctggaggcctgctgtgcggacggacaccggatggccactcatcagaaggactgctcgctgccatatgctacggaatccaaagaatgcaggatggtgcaggagcagtgctgccacagccagctggaggagctgcactgtgccacgggcatcagcctggccaacgagcaggaccgctgtgccacgccccacggtgacaacgccagcctggaggccacatttgtgaagaggtgctgccattgctgtctgctggggagggcggcccaggcccagggccagagctgcgagtacagcctcatggttggctaccagtgtggacaggtcttccgggcatgctgtgtcaagagccaggagaccggagatttggatgtcgggggcctccaagaaacggataagatcattgaggttgaggaggaacaagaggacccatatctgaatgaccgctgccgaggaggcgggccctgcaagcagcagtgccgagacacgggtgacgaggtggtctgctcctgcttcgtgggctaccagctgctgtctgatggtgtctcctgtgaagatgtcaatgaatgcatcacgggcagccacagctgccggcttggagaatcctgcatcaacacagtgggctctttccgctgccagcgggacagcagctgcgggactggctatgagctcacagaggacaatagctgcaaagatattgacgagtgtgagagtggtattcataactgcctccccgattttatctgtcagaatactctgggatccttccgctgccgacccaagctacagtgcaagagtggctttatacaagatgctctaggcaactgtattgatatcaatgagtgtttgagtatcagtgccccgtgccctatcgggcatacatgcatcaacacagagggctcctacacgtgccagaagaacgtgcccaactgtggccgtggctaccatctcaacgaggagggaacgcgctgtgttgatgtggacgagtgcgcgccacctgctgagccctgtgggaagggacatcgctgcgtgaactctcccggcagtttccgctgcgaatgcaagacgggttactattttgacggcatcagcaggatgtgtgtcgatgtcaacgagtgccagcgctaccccgggcgcctgtgtggccacaagtgcgagaacacgctgggctcctacctctgcagctgttccgtgggcttccggctctctgtggatggcaggtcatgtgaagacatcaatgagtgcagcagcagcccctgtagccaggagtgtgccaacgtctacggctcctaccagtgttactgccggcgaggctaccagctcagcgatgtggatggagtcacctgtgaagacatcgacgagtgcgccctgcccaccgggggccacatctgctcctaccgctgcatcaacatccctggaagcttccagtgcagctgcccctcgtctggctacaggctggcccccaatggccgcaactgccaagacattgatgagtgtgtgactggcatccacaactgctccatcaacgagacctgcttcaacatccagggcggcttccgctgcctggccttcgagtgccctgagaactaccgccgctccgcagccacccgctgtgagcgcttgccttgccatgagaatcgggagtgctccaagctgcctctgagaattaatgaggattaattgctgtttaaacaaaaatgtaattgttcatctttaaattctttccttttcataagaggatcaagctgtaaaaaaacaaaaaaaattaataaaaatttcgag

SEQ ID NO: 308482 - DNA, 2023 bp, Homo sapiens
ccctcctcccgggcgggataattgaacggcgcggccctggcccagcgttggctgccgaggctcggccggagcgtggagcccgcgccgctgccccaggaccgcgcccgcgcctttgtccgccgccgcccaccgcccgtcgcccgccgcccatggagcgcgccgcgccgtcgcgccgggtcccgcttccgctgctgctgctcggcggccttgcgctgctggcggccggagtggacgcggatgtcctcctggaggcctgctgtgcggacggacaccggatggccactcatcagaaggactgctcgctgccatatgctacggaatccaaagaatgcaggatggtgcaggagcagtgctgccacagccagctggaggagctgcactgtgccacgggcatcagcctggccaacgagcaggaccgctgtgccacgccccacggtgacaacgccagcctggaggccacatttgtgaagaggtgctgccattgctgtctgctggggagggcggcccaggcccagggccagagctgcgagtacagcctcatggttggctaccagtgtggacaggtcttccgggcatgctgtgtcaagagccaggagaccggagatttggatgtcgggggcctccaagaaacggataagatcattgaggttgaggaggaacaagaggacccatatctgaatgaccgctgccgaggaggcgggccctgcaagcagcagtgccgagacacgggtgacgaggtggtctgctcctgcttcgtgggctaccagctgctgtctgatggtgtctcctgtgaagatgtcaatgaatgcatcacgggcagccacagctgccggcttggagaatcctgcatcaacacagtgggctctttccgctgccagcgggacagcagctgcgggactggctatgagctcacagaggacaatagctgcaaagatattgacgagtgtgagagtggtattcataactgcctccccgattttatctgtcagaatactctgggatccttccgctgccgacccaagctacagtgcaagagtggctttatacaagatgctctaggcaactgtattgatatcaatgagtgtttgagtatcagtgccccgtgccctatcgggcatacatgcatcaacacagagggctcctacacgtgccagaagaacgtgcccaactgtggccgtggctaccatctcaacgaggagggaacgcgctgtgttgatgtggacgagtgcgcgccacctgctgagccctgtgggaagggacatcgctgcgtgaactctcccggcagtttccgctgcgaatgcaagacgggttactattttgacggcatcagcaggatgtgtgtcgatgtcaacgagtgccagcgctaccccgggcgcctgtgtggccacaagtgcgagaacacgctgggctcctacctctgcagctgttccgtgggcttccggctctctgtggatggcaggtcatgtgaagacatcaatgagtgcagcagcagcccctgtagccaggagtgtgccaacgtctacggctcctaccagtgttactgccggcgaggctaccagctcagcgatgtggatggagtcacctgtgaagacatcgacgagtgcgccctgcccaccgggggccacatctgctcctaccgctgcatcaacatccctggaagcttccagtgcagctgcccctcgtctggctacaggctggcccccaatggccgcaactgccaagacattgatgagtgtgtgactggcatccacaactgctccatcaacgagacctgcttcaacatccagggcggcttccgctgcctggccttcgagtgccctgagaactaccgccgctccgcagccacccgctgtgagcgcttgccttgccatgagaatcgggagtgctccaagctgcctctgagaattttttacccttttttttccccccaaatctattctctcccccgtggtggtcttttcgcatggtccccttatattgcttgaccccggtgacagtatccatatggccattaaccggtggg

SEQ ID NO: 308483 - DNA, 2523 bp, Homo sapiens
ccctcctcccgggcgggataattgaacggcgcggccctggcccagcgttggctgccgaggctcggccggagcgtggagcccgcgccgctgccccaggaccgcgcccgcgcctttgtccgccgccgcccaccgcccgtcgcccgccgcccatggagcgcgccgcgccgtcgcgccgggtcccgcttccgctgctgctgctcggcggccttgcgctgctggcggccggagtggacgcggatgtcctcctggaggcctgctgtgcggacggacaccggatggccactcatcagaaggactgctcgctgccatatgctacggaatccaaagaatgcaggatggtgcaggagcagtgctgccacagccagctggaggagctgcactgtgccacgggcatcagcctggccaacgagcaggaccgctgtgccacgccccacggtgacaacgccagcctggaggccacatttgtgaagaggtgctgccattgctgtctgctggggagggcggcccaggcccagggccagagctgcgagtacagcctcatggttggctaccagtgtggacaggtcttccgggcatgctgtgtcaagagccaggagaccggagatttggatgtcgggggcctccaagaaacggataagatcattgaggttgaggaggaacaagaggacccatatctgaatgaccgctgccgaggaggcgggccctgcaagcagcagtgccgagacacgggtgacgaggtggtctgctcctgcttcgtgggctaccagctgctgtctgatggtgtctcctgtgaagatgtcaatgaatgcatcacgggcagccacagctgccggcttggagaatcctgcatcaacacagtgggctctttccgctgccagcgggacagcagctgcgggactggctatgagctcacagaggacaatagctgcaaagatattgacgagtgtgagagtggtattcataactgcctccccgattttatctgtcagaatactctgggatccttccgctgccgacccaagctacagtgcaagagtggctttatacaagatgctctaggcaactgtattgatatcaatgagtgtttgagtatcagtgccccgtgccctatcgggcatacatgcatcaacacagagggctcctacacgtgccagaagaacgtgcccaactgtggccgtggctaccatctcaacgaggagggaacgcgctgtgttgatgtggacgagtgcgcgccacctgctgagccctgtgggaagggacatcgctgcgtgaactctcccggcagtttccgctgcgaatgcaagacgggttactattttgacggcatcagcaggatgtgtgtcgatgtcaacgagtgccagcgctaccccgggcgcctgtgtggccacaagtgcgagaacacgctgggctcctacctctgcagctgttccgtgggcttccggctctctgtggatggcaggtcatgtgaagacatcaatgagtgcagcagcagcccctgtagccaggagtgtgccaacgtctacggctcctaccagtgttactgccggcgaggctaccagctcagcgatgtggatggagtcacctgtgaagacatcgacgagtgcgccctgcccaccgggggccacatctgctcctaccgctgcatcaacatccctggaagcttccagtgcagctgcccctcgtctggctacaggctggcccccaatggccgcaactgccaagacattgatgagtgtgtgactggcatccacaactgctccatcaacgagacctgcttcaacatccagggcggcttccgctgcctggccttcgagtgccctgagaactaccgccgctccgcagccacggtggaagccttgggcaagctctctgggcctcagtttcctcatctgtaacatgcagatgtcagaacgtgctctgactgagatgcataggtagcaatgtctccatgtcagcccaaagccagggagccgatgtgacctgttggacgttgttgttaggtgcccacctgaaagccagaattcgtccagcctggtgaccgtgtgggaacggcatcaaagattccagatcctaaacgtggggctgcgtgcccctatgtctttgtaagctcactcactcctaggccatcacggcgcccacttgagaccacggttcccacttcctatcccccttgcccctaattgtattcagaaagtctcatttagtgccacagtcagttgcttcaggaaaagctccatgctgggaccgatctcaggactgtggacttgtgacctctcccagcactctgagtgcacgatgcaggcagccagctgtttccgaggccttggccccttgaccttcagcctgccttgggctcttggccagctgcccccgcgacctgagggtcagtggtagtgtccacctcttgaccctaggggcagctgccctggcttgtggcatagcaaggcttctgggtacccgagcagccccgttgtccctggcagccctccatattcttcctggcccgcacatccgtactggctg

SEQ ID NO: 308484 - DNA, 1874 bp, Homo sapiens
ccctcctcccgggcgggataattgaacggcgcggccctggcccagcgttggctgccgaggctcggccggagcgtggagcccgcgccgctgccccaggaccgcgcccgcgcctttgtccgccgccgcccaccgcccgtcgcccgccgcccatggagcgcgccgcgccgtcgcgccgggtcccgcttccgctgctgctgctcggcggccttgcgctgctggcggccggagtggacgcggatgtcctcctggaggcctgctgtgcggacggacaccggatggccactcatcagaaggactgctcgctgccatatgctacggaatccaaagaatgcaggatggtgcaggagcagtgctgccacagccagctggaggagctgcactgtgccacgggcatcagcctggccaacgagcaggaccgctgtgccacgccccacggtgacaacgccagcctggaggccacatttgtgaagaggtgctgccattgctgtctgctggggagggcggcccaggcccagggccagagctgcgagtacagcctcatggttggctaccagtgtggacaggtcttccgggcatgctgtgtcaagagccaggagaccggagatttggatgtcgggggcctccaagaaacggataagatcattgaggttgaggaggaacaagaggacccatatctgaatgaccgctgccgaggaggcgggccctgcaagcagcagtgccgagacacgggtgacgaggtggtctgctcctgcttcgtgggctaccagctgctgtctgatggtgtctcctgtgaagatgtcaatgaatgcatcacgggcagccacagctgccggcttggagaatcctgcatcaacacagtgggctctttccgctgccagcgggacagcagctgcgggactggctatgagctcacagaggacaatagctgcaaagatattgacgagtgtgagagtggtattcataactgcctccccgattttatctgtcagaatactctgggatccttccgctgccgacccaagctacagtgcaagagtggctttatacaagatgctctaggcaactgtattgatatcaatgagtgtttgagtatcagtgccccgtgccctatcgggcatacatgcatcaacacagagggctcctacacgtgccagaagaacgtgcccaactgtggccgtggctaccatctcaacgaggagggaacgcgctgtgttgatgtggacgagtgcgcgccacctgctgagccctgtgggaagggacatcgctgcgtgaactctcccggcagtttccgctgcgaatgcaagacgggttactattttgacggcatcagcaggatgtgtgtcgatgtcaacgagtgccagcgctaccccgggcgcctgtgtggccacaagtgcgagaacacgctgggctcctacctctgcagctgttccgtgggcttccggctctctgtggatggcaggtcatgtgaagacatcaatgagtgcagcagcagcccctgtagccaggagtgtgccaacgtctacggctcctaccagtgttactgccggcgaggctaccagctcagcgatgtggatggagtcacctgtgaagacatcgacgagtgcgccctgcccaccgggggccacatctgctcctaccgctgcatcaacatccctggaagcttccagtgcagctgcccctcgtctggctacaggctggcccccaatggccgcaactgccaagacattgatgagtgtgtgactggcatccacaactgctccatcaacgagacctgcttcaacatccagggcggcttccgctgcctggccttcgagtgccctgagaactaccgccgctccgcagccacgtaagtcccttggaccatgccatcgtcg

SEQ ID NO: 308485 - DNA, 2067 bp, Homo sapiens
ccctcctcccgggcgggataattgaacggcgcggccctggcccagcgttggctgccgaggctcggccggagcgtggagcccgcgccgctgccccaggaccgcgcccgcgcctttgtccgccgccgcccaccgcccgtcgcccgccgcccatggagcgcgccgcgccgtcgcgccgggtcccgcttccgctgctgctgctcggcggccttgcgctgctggcggccggagtggacgcggatgtcctcctggaggcctgctgtgcggacggacaccggatggccactcatcagaaggactgctcgctgccatatgctacggaatccaaagaatgcaggatggtgcaggagcagtgctgccacagccagctggaggagctgcactgtgccacgggcatcagcctggccaacgagcaggaccgctgtgccacgccccacggtgacaacgccagcctggaggccacatttgtgaagaggtgctgccattgctgtctgctggggagggcggcccaggcccagggccagagctgcgagtacagcctcatggttggctaccagtgtggacaggtcttccgggcatgctgtgtcaagagccaggagaccggagatttggatgtcgggggcctccaagaaacggataagatcattgaggttgaggaggaacaagaggacccatatctgaatgaccgctgccgaggaggcgggccctgcaagcagcagtgccgagacacgggtgacgaggtggtctgctcctgcttcgtgggctaccagctgctgtctgatggtgtctcctgtgaagatgtcaatgaatgcatcacgggcagccacagctgccggcttggagaatcctgcatcaacacagtgggctctttccgctgccagcgggacagcagctgcgggactggctatgagctcacagaggacaatagctgcaaagatattgacgagtgtgagagtggtattcataactgcctccccgattttatctgtcagaatactctgggatccttccgctgccgacccaagctacagtgcaagagtggctttatacaagatgctctaggcaactgtattgatatcaatgagtgtttgagtatcagtgccccgtgccctatcgggcatacatgcatcaacacagagggctcctacacgtgccagaagaacgtgcccaactgtggccgtggctaccatctcaacgaggagggaacgcgctgtgttgatgtggacgagtgcgcgccacctgctgagccctgtgggaagggacatcgctgcgtgaactctcccggcagtttccgctgcgaatgcaagacgggttactattttgacggcatcagcaggatgtgtgtcgatgtcaacgagtgccagcgctaccccgggcgcctgtgtggccacaagtgcgagaacacgctgggctcctacctctgcagctgttccgtgggcttccggctctctgtggatggcaggtcatgtgaagacatcaatgagtgcagcagcagcccctgtagccaggagtgtgccaacgtctacggctcctaccagtgttactgccggcgaggctaccagctcagcgatgtggatggagtcacctgtgaagacatcgacgagtgcgccctgcccaccgggggccacatctgctcctaccgctgcatcaacatccctggaagcttccagtgcagctgcccctcgtctggctacaggctggcccccaatggccgcaactgccaagacattgatgagtgtgtgactggcatccacaactgctccatcaacgagacctgcttcaacatccggcggcaatgaggagggctttttcaccacccggaaggtgagcccccacagtggggtggtggccctcaccaagcctgtccccgagcccagggacttgctcctgaccgtcaagatggatctctctcgccacggcaccgtcagctcctttgtggccaagcttttcatctttgtgtctgcagagctctgagcactcgcttcgcgtcgcggggtctccctcctgttgctttcctaaccctgccctccggggcgttaataaagtcttagcaagcgtcccacacagtga

SEQ ID NO: 308486 - DNA, 1749 bp, Homo sapiens
ccctcctcccgggcgggataattgaacggcgcggccctggcccagcgttggctgccgaggctcggccggagcgtggagcccgcgccgctgccccaggaccgcgcccgcgcctttgtccgccgccgcccaccgcccgtcgcccgccgcccatggagcgcgccgcgccgtcgcgccgggtcccgcttccgctgctgctgctcggcggccttgcgctgctggcggccggagtggacgcggatgtcctcctggaggcctgctgtgcggacggacaccggatggccactcatcagaaggactgctcgctgccatatgctacggaatccaaagaatgcaggatggtgcaggagcagtgctgccacagccagctggaggagctgcactgtgccacgggcatcagcctggccaacgagcaggaccgctgtgccacgccccacggtgacaacgccagcctggaggccacatttgtgaagaggtgctgccattgctgtctgctggggagggcggcccaggcccagggccagagctgcgagtacagcctcatggttggctaccagtgtggacaggtcttccgggcatgctgtgtcaagagccaggagaccggagatttggatgtcgggggcctccaagaaacggataagatcattgaggttgaggaggaacaagaggacccatatctgaatgaccgctgccgaggaggcgggccctgcaagcagcagtgccgagacacgggtgacgaggtggtctgctcctgcttcgtgggctaccagctgctgtctgatggtgtctcctgtgaagatgtcaatgaatgcatcacgggcagccacagctgccggcttggagaatcctgcatcaacacagtgggctctttccgctgccagcgggacagcagctgcgggactggctatgagctcacagaggacaatagctgcaaagatattgacgagtgtgagagtggtattcataactgcctccccgattttatctgtcagaatactctgggatccttccgctgccgacccaagctacagtgcaagagtggctttatacaagatgctctaggcaactgtattgatatcaatgagtgtttgagtatcagtgccccgtgccctatcgggcatacatgcatcaacacagagggctcctacacgtgccagaagaacgtgcccaactgtggccgtggctaccatctcaacgaggagggaacgcgctgtgttgatgtggacgagtgcgcgccacctgctgagccctgtgggaagggacatcgctgcgtgaactctcccggcagtttccgctgcgaatgcaagacgggttactattttgacggcatcagcaggatgtgtgtcgatgtcaacgagtgccagcgctaccccgggcgcctgtgtggccacaagtgcgagaacacgctgggctcctacctctgcagctgttccgtgggcttccggctctctgtggatggcaggtcatgtgaagacatcaatgagtgcagcagcagcccctgtagccaggagtgtgccaacgtctacggctcctaccagtgttactgccggcgaggctaccagctcagcgatgtggatggagtcacctgtgaagacatcgacgagtgcgccctgcccaccgggggccacatctgctcctaccgctgcatcaacatccctggaagcttccagtgcagctgcccctcgtctggctacaggctggcccccaatggccgcaactgccaaggtgagcaggagggatgccctggggtcc

SEQ ID NO: 308487 - DNA, 1789 bp, Homo sapiens
  misc_feature (1788)..(1788): n is a, c, g, or t
ccctcctcccgggcgggataattgaacggcgcggccctggcccagcgttggctgccgaggctcggccggagcgtggagcccgcgccgctgccccaggaccgcgcccgcgcctttgtccgccgccgcccaccgcccgtcgcccgccgcccatggagcgcgccgcgccgtcgcgccgggtcccgcttccgctgctgctgctcggcggccttgcgctgctggcggccggagtggacgcggatgtcctcctggaggcctgctgtgcggacggacaccggatggccactcatcagaaggactgctcgctgccatatgctacggaatccaaagaatgcaggatggtgcaggagcagtgctgccacagccagctggaggagctgcactgtgccacgggcatcagcctggccaacgagcaggaccgctgtgccacgccccacggtgacaacgccagcctggaggccacatttgtgaagaggtgctgccattgctgtctgctggggagggcggcccaggcccagggccagagctgcgagtacagcctcatggttggctaccagtgtggacaggtcttccgggcatgctgtgtcaagagccaggagaccggagatttggatgtcgggggcctccaagaaacggataagatcattgaggttgaggaggaacaagaggacccatatctgaatgaccgctgccgaggaggcgggccctgcaagcagcagtgccgagacacgggtgacgaggtggtctgctcctgcttcgtgggctaccagctgctgtctgatggtgtctcctgtgaagatgtcaatgaatgcatcacgggcagccacagctgccggcttggagaatcctgcatcaacacagtgggctctttccgctgccagcgggacagcagctgcgggactggctatgagctcacagaggacaatagctgcaaagatattgacgagtgtgagagtggtattcataactgcctccccgattttatctgtcagaatactctgggatccttccgctgccgacccaagctacagtgcaagagtggctttatacaagatgctctaggcaactgtattgatatcaatgagtgtttgagtatcagtgccccgtgccctatcgggcatacatgcatcaacacagagggctcctacacgtgccagaagaacgtgcccaactgtggccgtggctaccatctcaacgaggagggaacgcgctgtgttgatgtggacgagtgcgcgccacctgctgagccctgtgggaagggacatcgctgcgtgaactctcccggcagtttccgctgcgaatgcaagacgggttactattttgacggcatcagcaggatgtgtgtcgatgtcaacgagtgccagcgctaccccgggcgcctgtgtggccacaagtgcgagaacacgctgggctcctacctctgcagctgttccgtgggcttccggctctctgtggatggcaggtcatgtgaagacatcaatgagtgcagcagcagcccctgtagccaggagtgtgccaacgtctacggctcctaccagtgttactgccggcgaggctaccagctcagcgatgtggatggagtcacctgtgaagacatcgacgagtgcgccctgcccaccgggggccacatctgctcctaccgctgcatcaacatccctggaagcttccagtgcagctgcccctcgtctggctacaggctggcccccaatggccgcaactgccaagacatttatgagtgtgtgacttaatccacagcgctccatccgaagcaataagcggaggtctagagtnt

SEQ ID NO: 308488 - DNA, 1834 bp, Homo sapiens
ccctcctcccgggcgggataattgaacggcgcggccctggcccagcgttggctgccgaggctcggccggagcgtggagcccgcgccgctgccccaggaccgcgcccgcgcctttgtccgccgccgcccaccgcccgtcgcccgccgcccatggagcgcgccgcgccgtcgcgccgggtcccgcttccgctgctgctgctcggcggccttgcgctgctggcggccggagtggacgcggatgtcctcctggaggcctgctgtgcggacggacaccggatggccactcatcagaaggactgctcgctgccatatgctacggaatccaaagaatgcaggatggtgcaggagcagtgctgccacagccagctggaggagctgcactgtgccacgggcatcagcctggccaacgagcaggaccgctgtgccacgccccacggtgacaacgccagcctggaggccacatttgtgaagaggtgctgccattgctgtctgctggggagggcggcccaggcccagggccagagctgcgagtacagcctcatggttggctaccagtgtggacaggtcttccgggcatgctgtgtcaagagccaggagaccggagatttggatgtcgggggcctccaagaaacggataagatcattgaggttgaggaggaacaagaggacccatatctgaatgaccgctgccgaggaggcgggccctgcaagcagcagtgccgagacacgggtgacgaggtggtctgctcctgcttcgtgggctaccagctgctgtctgatggtgtctcctgtgaagatgtcaatgaatgcatcacgggcagccacagctgccggcttggagaatcctgcatcaacacagtgggctctttccgctgccagcgggacagcagctgcgggactggctatgagctcacagaggacaatagctgcaaagatattgacgagtgtgagagtggtattcataactgcctccccgattttatctgtcagaatactctgggatccttccgctgccgacccaagctacagtgcaagagtggctttatacaagatgctctaggcaactgtattgatatcaatgagtgtttgagtatcagtgccccgtgccctatcgggcatacatgcatcaacacagagggctcctacacgtgccagaagaacgtgcccaactgtggccgtggctaccatctcaacgaggagggaacgcgctgtgttgatgtggacgagtgcgcgccacctgctgagccctgtgggaagggacatcgctgcgtgaactctcccggcagtttccgctgcgaatgcaagacgggttactattttgacggcatcagcaggatgtgtgtcgatgtcaacgagtgccagcgctaccccgggcgcctgtgtggccacaagtgcgagaacacgctgggctcctacctctgcagctgttccgtgggcttccggctctctgtggatggcaggtcatgtgaagacatcaatgagtgcagcagcagcccctgtagccaggagtgtgccaacgtctacggctcctaccagtgttactgccggcgaggctaccagctcagcgatgtggatggagtcacctgtgaagacatcgacgagtgcgccctgcccaccgggggccacatctgctcctaccgctgcatcaacatccctggaagcttccagtgcagctgcccctcgtctggctacaggctggcccccaatggccgcaactgccaagacattgatgagcgtgtgaccccctgccctacccttaagcctaaggcagtcatatggtttgtaatgtgtctatccggccttgaaaccaaacctctccaggagcgacggacagg

SEQ ID NO: 308489 - DNA, 893 bp, Homo sapiens
gctgacctagaggatccctactctgaaaacatcatcaagcgttacatggacggcatgaccgtgggtgtcgtgcgccaggtgcggcccatcgtgggcccatttcatgccgtcctgaagctggagatgaactatgtggtcgggggcgtggtctcccaccgaaatgttgtcaacgtccacatcttcgtctctgagtactggttctgagggctggtctgccgcacagccgcaggtgcacctccaggccaaatcattgctgccagtgactgtggtctgtacttgtttataccctcagacttttttaatgttaggtatttgtagcattaggccaacatgtattaagctgagccagatgaataagtccatctgatgtattttcggtgtttaaaaaatgagcccagttgctcaactgtttggttgaaaaccttgctcattttttaatgcgaaggctaagtgtcaccccctttctctgcctctggctgggccttgctaagggccaaggaaagaaagacattttttagggggcagccagtccaaatgccaaaagaagaccagttcttgccctgattgtatgaaatttgacattttggcactttttttttttttttggccaatcagattttctatgttctaaggacatggctgctgtagaatagcacagacgtggatgataaattatccccagaagcagcatgacagaatgcctcggggagcacttggaagggaaattgcagttctgttgaaatagaggaaaatcccttggtaaagacacagcctgttaggctcgtgtgggcctccagtatgttcaccaggggaatggctgggatttctcggcactctgcatcatccatcttttcttataggtgggaaaataaacaactttgtgatcctcctga

SEQ ID NO: 308490 - DNA, 1496 bp, Homo sapiens
ccctcctcccgggcgggataattgaacggcgcggccctggcccagcgttggctgccgaggctcggccggagcgtggagcccgcgccgctgccccaggaccgcgcccgcgcctttgtccgccgccgcccaccgcccgtcgcccgccgcccatggagcgcgccgcgccgtcgcgccgggtcccgcttccgctgctgctgctcggcggccttgcgctgctggcggccggagtggacgcggatgtcctcctggaggcctgctgtgcggacggacaccggatggccactcatcagaaggactgctcgctgccatatgctacggaatccaaagaatgcaggatggtgcaggagcagtgctgccacagccagctggaggagctgcactgtgccacgggcatcagcctggccaacgagcaggaccgctgtgccacgccccacggtgacaacgccagcctggaggccacatttgtgaagaggtgctgccattgctgtctgctggggagggcggcccaggcccagggccagagctgcgagtacagcctcatggttggctaccagtgtggacaggtcttccgggcatgctgtgtcaagagccaggagaccggagatttggatgtcgggggcctccaagaaacggataagatcattgaggttgaggaggaacaagaggacccatatctgaatgaccgctgccgaggaggcgggccctgcaagcagcagtgccgagacacgggtgacgaggtggtctgctcctgcttcgtgggctaccagctgctgtctgatggtgtctcctgtgaagatgtcaatgaatgcatcacgggcagccacagctgccggcttggagaatcctgcatcaacacagtgggctctttccgctgccagcgggacagcagctgcgggactggctatgagctcacagaggacaatagctgcaaagatattgacgagtgtgagagtggtattcataactgcctccccgattttatctgtcagaatactctgggatccttccgctgccgacccaagctacagtgcaagagtggctttatacaagatgctctaggcaactgtattgatatcaatgagtgtttgagtatcagtgccccgtgccctatcgggcatacatgcatcaacacagagggctcctacacgtgccagaagaacgtgcccaactgtggccgtggctaccatctcaacgaggagggaacgcgctgtgttgatgtggacgagtgcgcgccacctgctgagccctgtgggaagggacatcgctgcgtgaactctcccggcagtttccgctgcgaatgcaagacgggttactattttgacggcatcagcaggatgtgtgtcgatgtcaacgagtgccagcgctaccccgggcgcctgtgtggccacaagtgcgagaacacgctgggctcctacctctgcagctgttccgtgggcttccggctctctgtggatggcaggtcatgtgaagagggagcagcaggggccccgtccact

SEQ ID NO: 308491 - DNA, 830 bp, Homo sapiens
ggcccggaggaagatgatctcttcagggcgggtgaactcgcggaaggtaggcagcgagatgacggtgtgggagatggtgtgcacggggtcgaacacgcatgtgacatcgttggggcggcaggacttgagtactggttctgagggctggtctgccgcacagccgcaggtgcacctccaggccaaatcattgctgccagtgactgtggtctgtacttgtttataccctcagacttttttaatgttaggtatttgtagcattaggccaacatgtattaagctgagccagatgaataagtccatctgatgtattttcggtgtttaaaaaatgagcccagttgctcaactgtttggttgaaaaccttgctcattttttaatgcgaaggctaagtgtcaccccctttctctgcctctggctgggccttgctaagggccaaggaaagaaagacattttttagggggcagccagtccaaatgccaaaagaagaccagttcttgccctgattgtatgaaatttgacattttggcactttttttttttttttggccaatcagattttctatgttctaaggacatggctgctgtagaatagcacagacgtggatgataaattatccccagaagcagcatgacagaatgcctcggggagcacttggaagggaaattgcagttctgttgaaatagaggaaaatcccttggtaaagacacagcctgttaggctcgtgtgggcctccagtatgttcaccaggggaatggctgggatttctcggcactctgcatcatccatcttttcttataggtgggaaaataaacaactttgtgatcctcctga

SEQ ID NO: 308492 - DNA, 840 bp, Homo sapiens
ccagtacggatgtgaagcgagaggaaccagacctcatcagcccaacatcaaagacaccatcggaacagcagcgcccgcagcacccaccccgcaccggcgactccatcttcacggccaccccctgcggcggacggttgaccaccagccaccacatcatcccagagctgagctcctccagcgggatgacgccgtccccaccacctccctcttcttctttttcatccttctggctacaggctggccccccatggccgcaactgccaagacattgatgagtgtgtgactggcatccacaactgctccatcaacgagacctgcttcaacatccagggcggcttccgctgcctggccttcgagtgccctgagaactaccgccgctccgcagccacccgctgtgagcgcttgccttgccatgagaatcgggagtgctccaagctgcctctgagaataacctactaccacctctctttccccaccaacatccaagcgcccgcggtggttttccgcatgggcccctccagtgctgtccccggggacagcatgcagctggccatcaccggcggcaatgaggagggctttttcaccacccggaaggtgagcccccacagtggggtggtggccctcaccaagcctgtccccgagcccagggacttgctcctgaccgtcaagatggatctctctcgccacggcaccgtcagctcctttgtggccaagcttttcatctttgtgtctgcagagctctgagcactcgcttcgcgtcgcggggtctccctcctgttgctttcctaaccctgccctccggggcgttaataaagtcttagcaagcgtcccacacagtga

SEQ ID NO: 308493 - DNA, 1432 bp, Homo sapiens
ccctcctcccgggcgggataattgaacggcgcggccctggcccagcgttggctgccgaggctcggccggagcgtggagcccgcgccgctgccccaggaccgcgcccgcgcctttgtccgccgccgcccaccgcccgtcgcccgccgcccatggagcgcgccgcgccgtcgcgccgggtcccgcttccgctgctgctgctcggcggccttgcgctgctggcggccggagtggacgcggatgtcctcctggaggcctgctgtgcggacggacaccggatggccactcatcagaaggactgctcgctgccatatgctacggaatccaaagaatgcaggatggtgcaggagcagtgctgccacagccagctggaggagctgcactgtgccacgggcatcagcctggccaacgagcaggaccgctgtgccacgccccacggtgacaacgccagcctggaggccacatttgtgaagaggtgctgccattgctgtctgctggggagggcggcccaggcccagggccagagctgcgagtacagcctcatggttggctaccagtgtggacaggtcttccgggcatgctgtgtcaagagccaggagaccggagatttggatgtcgggggcctccaagaaacggataagatcattgaggttgaggaggaacaagaggacccatatctgaatgaccgctgccgaggaggcgggccctgcaagcagcagtgccgagacacgggtgacgaggtggtctgctcctgcttcgtgggctaccagctgctgtctgatggtgtctcctgtgaagatgtcaatgaatgcatcacgggcagccacagctgccggcttggagaatcctgcatcaacacagtgggctctttccgctgccagcgggacagcagctgcgggactggctatgagctcacagaggacaatagctgcaaagatattgacgagtgtgagagtggtattcataactgcctccccgattttatctgtcagaatactctgggatccttccgctgccgacccaagctacagtgcaagagtggctttatacaagatgctctaggcaactgtattgatatcaatgagtgtttgagtatcagtgccccgtgccctatcgggcatacatgcatcaacacagagggctcctacacgtgccagaagaacgtgcccaactgtggccgtggctaccatctcaacgaggagggaacgcgctgtgttgatgtggacgagtgcgcgccacctgctgagccctgtgggaagggacatcgctgcgtgaactctcccggcagtttccgctgcgaatgcaagacgggttactattttgacggcatcagcaggatgtgtgtcgatgtcgacgagcgcccgcgctaccccggcgcctgtgtagccctccgtgcgagacacgccgctccacctacgcctcccgtccgtgacga

SEQ ID NO: 308494 - DNA, 1406 bp, Homo sapiens
ccctcctcccgggcgggataattgaacggcgcggccctggcccagcgttggctgccgaggctcggccggagcgtggagcccgcgccgctgccccaggaccgcgcccgcgcctttgtccgccgccgcccaccgcccgtcgcccgccgcccatggagcgcgccgcgccgtcgcgccgggtcccgcttccgctgctgctgctcggcggccttgcgctgctggcggccggagtggacgcggatgtcctcctggaggcctgctgtgcggacggacaccggatggccactcatcagaaggactgctcgctgccatatgctacggaatccaaagaatgcaggatggtgcaggagcagtgctgccacagccagctggaggagctgcactgtgccacgggcatcagcctggccaacgagcaggaccgctgtgccacgccccacggtgacaacgccagcctggaggccacatttgtgaagaggtgctgccattgctgtctgctggggagggcggcccaggcccagggccagagctgcgagtacagcctcatggttggctaccagtgtggacaggtcttccgggcatgctgtgtcaagagccaggagaccggagatttggatgtcgggggcctccaagaaacggataagatcattgaggttgaggaggaacaagaggacccatatctgaatgaccgctgccgaggaggcgggccctgcaagcagcagtgccgagacacgggtgacgaggtggtctgctcctgcttcgtgggctaccagctgctgtctgatggtgtctcctgtgaagatgtcaatgaatgcatcacgggcagccacagctgccggcttggagaatcctgcatcaacacagtgggctctttccgctgccagcgggacagcagctgcgggactggctatgagctcacagaggacaatagctgcaaagatattgacgagtgtgagagtggtattcataactgcctccccgattttatctgtcagaatactctgggatccttccgctgccgacccaagctacagtgcaagagtggctttatacaagatgctctaggcaactgtattgatatcaatgagtgtttgagtatcagtgccccgtgccctatcgggcatacatgcatcaacacagagggctcctacacgtgccagaagaacgtgcccaactgtggccgtggctaccatctcaacgaggagggaacgcgctgtgttgatgtggacgagtgcgcgccacctgctgagccctgtgggaagggacatcgctgcgtgaactctcccggcagtttccgctgcgaatgcaagacgggttactattttgacggcatcagcaggatgtgtgtcgatgtcaacgagtgccagcagctacgcccgggcgcctgtgtgcatcgataacaccgtacgagt

SEQ ID NO: 308495 - DNA, 1356 bp, Homo sapiens
ccctcctcccgggcgggataattgaacggcgcggccctggcccagcgttggctgccgaggctcggccggagcgtggagcccgcgccgctgccccaggaccgcgcccgcgcctttgtccgccgccgcccaccgcccgtcgcccgccgcccatggagcgcgccgcgccgtcgcgccgggtcccgcttccgctgctgctgctcggcggccttgcgctgctggcggccggagtggacgcggatgtcctcctggaggcctgctgtgcggacggacaccggatggccactcatcagaaggactgctcgctgccatatgctacggaatccaaagaatgcaggatggtgcaggagcagtgctgccacagccagctggaggagctgcactgtgccacgggcatcagcctggccaacgagcaggaccgctgtgccacgccccacggtgacaacgccagcctggaggccacatttgtgaagaggtgctgccattgctgtctgctggggagggcggcccaggcccagggccagagctgcgagtacagcctcatggttggctaccagtgtggacaggtcttccgggcatgctgtgtcaagagccaggagaccggagatttggatgtcgggggcctccaagaaacggataagatcattgaggttgaggaggaacaagaggacccatatctgaatgaccgctgccgaggaggcgggccctgcaagcagcagtgccgagacacgggtgacgaggtggtctgctcctgcttcgtgggctaccagctgctgtctgatggtgtctcctgtgaagatgtcaatgaatgcatcacgggcagccacagctgccggcttggagaatcctgcatcaacacagtgggctctttccgctgccagcgggacagcagctgcgggactggctatgagctcacagaggacaatagctgcaaagatattgacgagtgtgagagtggtattcataactgcctccccgattttatctgtcagaatactctgggatccttccgctgccgacccaagctacagtgcaagagtggctttatacaagatgctctaggcaactgtattggtaagaggtgtgccgccaggattagcgggttattccaggaggggtcagcgacctagccttggggcaggcctctagaatctgcggggccgcatggtatacagaacaggggttggcaaactttttgtgtaaagggctggacagcaaatagagcaaatactttagccgttgtgggccatatggtctctgtcataatagtcaactctgctgttatagtctaaagcggccaagggccatctgtaaacaaatgggtgtggctgtgttccaataaaactttatttacaaaaa

SEQ ID NO: 308496 - DNA, 1242 bp, Homo sapiens
ccctcctcccgggcgggataattgaacggcgcggccctggcccagcgttggctgccgaggctcggccggagcgtggagcccgcgccgctgccccaggaccgcgcccgcgcctttgtccgccgccgcccaccgcccgtcgcccgccgcccatggagcgcgccgcgccgtcgcgccgggtcccgcttccgctgctgctgctcggcggccttgcgctgctggcggccggagtggacgcggatgtcctcctggaggcctgctgtgcggacggacaccggatggccactcatcagaaggactgctcgctgccatatgctacggaatccaaagaatgcaggatggtgcaggagcagtgctgccacagccagctggaggagctgcactgtgccacgggcatcagcctggccaacgagcaggaccgctgtgccacgccccacggtgacaacgccagcctggaggccacatttgtgaagaggtgctgccattgctgtctgctggggagggcggcccaggcccagggccagagctgcgagtacagcctcatggttggctaccagtgtggacaggtcttccgggcatgctgtgtcaagagccaggagaccggagatttggatgtcgggggcctccaagaaacggataagatcattgaggttgaggaggaacaagaggacccatatctgaatgaccgctgccgaggaggcgggccctgcaagcagcagtgccgagacacgggtgacgaggtggtctgctcctgcttcgtgggctaccagctgctgtctgatggtgtctcctgtgaagatgtcaatgaatgcatcacgggcagccacagctgccggcttggagaatcctgcatcaacacagtgggctctttccgctgccagcgggacagcagctgcgggactggctatgagctcacagaggacaatagctgcaaagatattgacgagtgtgagagtggtattcataactgcctccccgattttatctgtcaaaaaaaaaaaaaaaaaaaaaaaaaaaaaaaaaaaaaaaaaagaaaaaaaagcctggcggcgggacattattgagggggtgggcgaaaaaaaagagagataaaagagggcggcagcagcgggcaccaagacaggtggtccacagaacgcccagtgttgtgctgaacaagggggggaaaaaatagcggggggacccacaaaaggggagagcgcagtataagcgacaaaacacgcgggtgatccgcgggaataaaag

SEQ ID NO: 308497 - DNA, 3995 bp, Homo sapiens
acataacacctctgcagtacttataccatttaatttttgtgttaaatgtctttaaaaataaacaagataacctgccccttacgcctgtcattcagcctggcaggtccttagtgggctagacctacctttctgatgagctgcccgcccccagcgcaagatgattgtttgagaggtaaaaactcttgccaaaaacaacgttaaacttttaatggatgttaacatacttgcatttacaagcagtgaagtttgtcaccttcatgttgttatttatgcagcattaacctttttctccagatcattgagactgaaaatatgatggaccgaattgtgactggcttgtctgagtctagtgtcaaggtgcggttagctgccgtcaggtatgagctttaaatggtctgaataaaaaccttttgccatatatttaacctgttgcctttctggtccttcactgagtaaacacagactacaaatgttcctcaaaaatctgctcaggtgaattcatagagtatataacattgtctaacagagagcctggcctccaaaccccataaagtggtctgatgtagttcacttaacaatgtagatatgcttgaagtgtacattagtcattgtaaaatgccagccagtttgtttgaaaagtaaaagttttgatttcttgtgaagctaattttgattattctttgtagatgtttgcacagtttatccagatctgtgcagcagcttcgaaccagtttccaggatcatgctgtttggaaacctttaatgaaggttttacaaaatgcaccagatgaaatcctagtggtagcatcttccatgctgtgtaatcttcttcttgaattttctccaagcaaagagccaattttggaatcaggagccgtagagctactttgtggattaactcagagtgaaaatcctgctttacgagtgaatggaatttgggctttaatgaatatggcatttcaggctgaacaaaaaataaaagcagatattttacgaagcttgagtactgaacagctattccggttattatcagattcagatttgaatgtgctgatgaagacattgggacttcttagaaatctcctctccactcgtcctcatatagataaaataatgagtactcatggaaagcaaattatgcaagccgtcactcttattctagaaggggaacataacattgaggtcaaagagcagacactgtgcatcttagccaacatagcggatgggacaacagcaaaagatcttattatgaccaatgatgatatcctacagaaaatcaagtattacatgggccattcacatgttaaactgcagcttgcagccatgttttgtatatcaaacctcatatggaatgaagaggaaggttcacaagaacgccaggataaattacgagacatgggcatcgtagatattctacacaaactgagtcagtcaccagattcaaacctttgtgacaaggcaaagatggcactgcagcagtacctggcatgatgggagtgcccctgggcacctgcgagcatcccacctccttgtttaaggaagtacaggaaccagcctcatttgattccttctatttgcacaagtcaccttggactgcagggagctgttttgcaaaagcagtttagtaggcttagatctcaaattcatcttgagaacatttttttgaggtagtaatttcctcagaagactcttgtgttttgttttggtttttttttctgagctactcggactctttattagaacaatcaatcattttcctttggacctacaatttttgcctatgctgcagccactttgtgagtgagaatgaatatgtctgtgtgaacacacaggcatgcgtgtgtatgtgcacgtacatgggccagaatgaatggatgtgtgtgtgtgagggatacctcagatttttcttttcttattttgtgtgaaaatctcttttctacagattttccagggtttaagcattgcttgctgtataaaaaactttactgaattatatacagtttgaatgaaatgttattttaaaaacaaaacaattgttaagtgttccataaaggttatgttgaattttggtcagatgaatatttgtaagtaaaaaatatatgcatttctgaacctcaacttacatagattttctttatataaaaaaaaagaaaaaaaaagaaaaagttggctatagttggcctgattaacaggcactatacatggtgctgtgcaaaatagtaagctagcatcttactgccgtcaatattagcaggtacagagccttttttcatcctaattcagtaagttctcaggcttccaagtcaaatggagaagtaaagtgaggcaacagattcaccataggctttttgaagcatcaaagggaaatataactactgatagtgaaagcccagccatgacccagatgggcttacccttgacaggaactggggaccaagagcctcccaattgccctaactcctgtcattggtattagcaatatctggccagatttagaaccagtcatggaaacttgtgctcaaactaaaagtaggtcatcacttcccagaaacagaataccttgtgcttcctgaaacagcatatatcactgtgaaactaaagaatattctacagacacccctgtagaaagaaacaaagaacaggatagtttagaaagctttctgttagctgtattcagcaaatttcatactagttgctcaggactgctagttggtatgcttttgtaaaacgagattgaaatttaataaaagatgcaactaaaatctttcctgcatgaagctaaaagcactcaagttgagagaggggcaagggaatctccccaggatgactgaagatgacttctttttacagcaagtactgttagcctttctgcaccccttagcttggcccctgctccaacttctgggtcagcagcaaggtgaactcaacagaagttgctcttgactgtttgaaggtagaagcagcctaccttttctctttgctaaaagaaggtcaaaggcttcgcaaccaggatgcaaggtctgcggtccagaagcttgcggtgagtgtgtgccactgatggagctccaagcccacccaccagccactcctgatggggttgctcacactgcagctgccctatcaccaccctgcacgttccttggaagatttaaatgtttggttgcaaatgaatgttttaaaaatgtatttaatgcaatttttcctgctctcaacatgaccacccaagattcaaacacagagacttccaagttactattttttcagaacatcaccgattttaaaatctgtcacaacaggacttggttttgtgcagatatcagagtgctaatgtgagaaacccagttaaaagaaaacttagtttattgggaagaaagcctcaggcccactcgtttctagaactgtgaaaatatccttggttggcatttttaacacaaaacactatagtgttggtattaaatagtactaggtaaatataaagaaaccaataatgaattgctgagacaatcttgaacccaaatagcattagaaagctgaaggcccaatgaaataacactttcacacttaaactctgtggataaattttgcctgtgggtataaacagatggtcaaattaaaaatgctttactataattaacttttctgatttgaatgaagggaaatgtatttattgaaacaaagctgtttgctgctttatgcaggtgcagtgttcagtcagcaaggaagtgggaagagtggacatggtattgtgtctacacccaagttcttaactaagcttctcgctctaatactgcattctgtttctccttttgtgccctgattgtaatccaaaatttatgaactagaaaagaatgtccaatttaataagttgcatttttttttctttaagcactttattcagaacaatacatgttcttctggtagtgtttggataatatgattttaacacatgctaataaaagccaagaaaaatcatggcaacttctaaaaaaagaaaa

SEQ ID NO: 308498 - DNA, 3158 bp, Homo sapiens
  misc_feature (2149)..(2149): n is a, c, g, or t
agcggcgcttccacctctaacccaggctcagagtagctgctgtttctgagagaacgattcgtaggacagcccctgacgccattcccttttgcccttctttctgcgggcctttccggtacttgagcggtgtccagagcgtggccagttctcgtctatctggctgcctttagggagcggtgcctagcgttggccaatagttggctgtcgaaagtgccggcccccgcgccggcgcctgcagcagccgggtgggaaggctcaagatggcgtgcttgttggagaccccaatccgcatgagcgtcctttcggaccaggaatgaaagttactgggagataacttcgaaggattttgcaacaaattcgagctgtccgactctgagaatggaagtaacagctagcagtcgccactatgttgacaggctatttgaccctgatccccagaaagttctacaaggtgtcatagacatgaaaaatgctgtaattggaaacaacaagcagaaagccaatctcattgttttaggagctgttccaagattgttgtacttgcttcagcaagaaacctcaagcacagagctgaaaactgaatgtgcagtggtgttgggaagtcttgctatgggtactgaaaacaatgtcaagtctctactggactgccatattatccctgccttattgcaaggactactgtccccagacctgaagtttattgaagcttgcctccgatgcctgcgtaccatcttcaccagtcctgtcactccagaggagctactgtatacagatgccacagtgataccacacctcatggcactgcttagcaggtcccgctatacccaggagtacatctgtcagatcttctcacactgctgtaaagggccagatcatcaaacaattttatttaaccacggtgcagttcagaatattgctcacctactaacctcactgtcctacaaagttcgaatgcaagcactgaaatgtttctcagttttagcttttgaaaacccccaggtatcgatgaccctggtaaatgttttggttgatggagaattgttaccacagatttttgtgaagatgttacagagggataagcctattgagatgcagctcacatcagcaaaatgtttaacttacatgtgtagagctggagcaattcggacagatgataactgtattgtattaaagacattaccttgtttggttcgaatgtgcagtaaggagagattactagaggagagagttgaaggagctgagacacttgcctatctgattgaaccagatgttgagctacagagaatcgctagcataactgatcacctcattgccatgcttgctgattatttcaagtatcccagctcagtgagtgccatcactgatattaaaaggcttgatcatgatttaaaacatgctcacgaactccgccaggctgcattcaagctctatgcctctcttggagcaaatgatgaagacatccggaagaaggtgagtctgggagaggggcgtcccccagtcctgacagccagcaggcagggagtgacgtcaacctgaaagtcgtggtgaagagcactaacagtgactgtttgaatataataaagcagagtgactaaaggcataattgaagaatgaatgggacccggatttggggggttgtttgtttgtttttagaacatagagtggcatggccgtgctggaatgacaaataactggcgtgctttttttttgtgtcattaatatgaattattatgttgcacatttttgcatgtgttctgataaaaatcaattctagcactgtgaagcttcagacaccttgaaagtcctaacattagaattgtaaatgttatttatggaaataccttccaatgctattgagaaattcaaatctctattgtatattgttctttgatatgtggcttagttttatgttttgattttttttgctactgtgcaagtttaatgtgaataaaatctttgtggaatgatgattttatgtttagtgagtggtcatctgaattttccagctccccagaaaatgtatgcactggtatagcacccttatgttactaaagccttagtctaacactgaactcatgttcttgatgagaatacttctagatgaggagtatagtggtaagtaagctctgacttggctccttccacatanccaaaaagctggaacttaccactcaaaaacatgtataacctaataaattctacacaaggctttcaagaccatcagagagcaaaaccacatgttctgtcttgaggagccatagcagaaagagcaaattagtcattatttactgaacatgatgatttactaaatctctccatctgcattagtattttaaggagcactgtgagagaaatcacaaagtattagagtttaccatgattcagagaagttcttcaggcctgtagaaagaggagtatggaacaaccttacatttgttgaaataacttgaaaaggaaccatttcttgaagaaactgaagtaatagcaataagatttgatgtgtgagtagctttgatttaaaatcaatgcaaaaagcacaactaataaattgaatgtttccatgtacctcactttatttcagttaacaagatactttgacttgaagtgtttttagtgtatccctatgaaaatcatttttggtacatctaagttttcacttataaactgttatttcaaagcaaacatactagtgatatatatatgatttatggatgttgacgccaatgttcagtttgggtacgttggtgtattgcaaggggagaggcttttataacaatagatttgaacatttttaaaaaattggactgtgtaacttaaatacacaattatttggtttaggatggttattagggcccattagaaacaggagaagtattttacccattcttaaagctctaaaaaaccatctcatggactgaaaggtagatagacagatggaccacaatgggaaataggatgtccatttgtacttctttgtacttttttgttaataaactgttttggaattaatggcttaatttgtgatatcatgttctagaaatacctgcaacatgacagtctaatcagtagtctattaaaacttgtattcataatgtgtataatttcctggtaaggctaactcctgatcgtttctgtagaaagatgacaaataaagaaaa

SEQ ID NO: 308499 - DNA, 3212 bp, Homo sapiens
  misc_feature (2203)..(2203): n is a, c, g, or t
agcggcgcttccacctctaacccaggctcagagtagctgctgtttctgagagaacgattcgtaggacagcccctgacgccattcccttttgcccttctttctgcgggcctttccggtacttgagcggtgtccagagcgtggccagttctcgtctatctggctgcctttagggagcggtgcctagcgttggccaatagttggctgtcgaaagtgccggcccccgcgccggcgcctgcagcagccgggtgggaaggctcaagatggcgtgcttgttggagaccccaatccgcatgagcgtcctttcgtttttttaaagaaaaagacgactttcacctttcactatgttgctcttgaaccaggaccaggaatgaaagttactgggagataacttcgaaggattttgcaacaaattcgagctgtccgactctgagaatggaagtaacagctagcagtcgccactatgttgacaggctatttgaccctgatccccagaaagttctacaaggtgtcatagacatgaaaaatgctgtaattggaaacaacaagcagaaagccaatctcattgttttaggagctgttccaagattgttgtacttgcttcagcaagaaacctcaagcacagagctgaaaactgaatgtgcagtggtgttgggaagtcttgctatgggtactgaaaacaatgtcaagtctctactggactgccatattatccctgccttattgcaaggactactgtccccagacctgaagtttattgaagcttgcctccgatgcctgcgtaccatcttcaccagtcctgtcactccagaggagctactgtatacagatgccacagtgataccacacctcatggcactgcttagcaggtcccgctatacccaggagtacatctgtcagatcttctcacactgctgtaaagggccagatcatcaaacaattttatttaaccacggtgcagttcagaatattgctcacctactaacctcactgtcctacaaagttcgaatgcaagcactgaaatgtttctcagttttagcttttgaaaacccccaggtatcgatgaccctggtaaatgttttggttgatggagaattgttaccacagatttttgtgaagatgttacagagggataagcctattgagatgcagctcacatcagcaaaatgtttaacttacatgtgtagagctggagcaattcggacagatgataactgtattgtattaaagacattaccttgtttggttcgaatgtgcagtaaggagagattactagaggagagagttgaaggagctgagacacttgcctatctgattgaaccagatgttgagctacagagaatcgctagcataactgatcacctcattgccatgcttgctgattatttcaagtatcccagctcagtgagtgccatcactgatattaaaaggcttgatcatgatttaaaacatgctcacgaactccgccaggctgcattcaagctctatgcctctcttggagcaaatgatgaagacatccggaagaaggtgagtctgggagaggggcgtcccccagtcctgacagccagcaggcagggagtgacgtcaacctgaaagtcgtggtgaagagcactaacagtgactgtttgaatataataaagcagagtgactaaaggcataattgaagaatgaatgggacccggatttggggggttgtttgtttgtttttagaacatagagtggcatggccgtgctggaatgacaaataactggcgtgctttttttttgtgtcattaatatgaattattatgttgcacatttttgcatgtgttctgataaaaatcaattctagcactgtgaagcttcagacaccttgaaagtcctaacattagaattgtaaatgttatttatggaaataccttccaatgctattgagaaattcaaatctctattgtatattgttctttgatatgtggcttagttttatgttttgattttttttgctactgtgcaagtttaatgtgaataaaatctttgtggaatgatgattttatgtttagtgagtggtcatctgaattttccagctccccagaaaatgtatgcactggtatagcacccttatgttactaaagccttagtctaacactgaactcatgttcttgatgagaatacttctagatgaggagtatagtggtaagtaagctctgacttggctccttccacatanccaaaaagctggaacttaccactcaaaaacatgtataacctaataaattctacacaaggctttcaagaccatcagagagcaaaaccacatgttctgtcttgaggagccatagcagaaagagcaaattagtcattatttactgaacatgatgatttactaaatctctccatctgcattagtattttaaggagcactgtgagagaaatcacaaagtattagagtttaccatgattcagagaagttcttcaggcctgtagaaagaggagtatggaacaaccttacatttgttgaaataacttgaaaaggaaccatttcttgaagaaactgaagtaatagcaataagatttgatgtgtgagtagctttgatttaaaatcaatgcaaaaagcacaactaataaattgaatgtttccatgtacctcactttatttcagttaacaagatactttgacttgaagtgtttttagtgtatccctatgaaaatcatttttggtacatctaagttttcacttataaactgttatttcaaagcaaacatactagtgatatatatatgatttatggatgttgacgccaatgttcagtttgggtacgttggtgtattgcaaggggagaggcttttataacaatagatttgaacatttttaaaaaattggactgtgtaacttaaatacacaattatttggtttaggatggttattagggcccattagaaacaggagaagtattttacccattcttaaagctctaaaaaaccatctcatggactgaaaggtagatagacagatggaccacaatgggaaataggatgtccatttgtacttctttgtacttttttgttaataaactgttttggaattaatggcttaatttgtgatatcatgttctagaaatacctgcaacatgacagtctaatcagtagtctattaaaacttgtattcataatgtgtataatttcctggtaaggctaactcctgatcgtttctgtagaaagatgacaaataaagaaaa

SEQ ID NO: 308500 - DNA, 4185 bp, Homo sapiens
  misc_feature (3176)..(3176): n is a, c, g, or t
gcacgagggcctttggtcttgttgaggatgagcagggactggacgttgtccaggatgaagccaaactcctcgggcctctcggtcaggtctgactggtggtcaggacccagagcgagggcgggcgcctgacaggtcatctcagtagcgttcagaacctcacagatattgatgtgctccttccctccatgcttggcacggatctgggggttctgtatgaggtccaggtgggtcccccatacggcgatgggtgtgtttccactgacaatgctccattctggctcaatccgcacgatggtggggtcttccacatactgaaagaccaggtcctggtggatcttggccctgtccacctgcaccgacaccttcatctctagcacctcatctgaggatgtggtgttgcagacaatgtaggatggagatcgcctgtggaagagacagggctgctttccaaacatcaccaccacgttgcttccggcattcaggttggtgcctgtgatggtcacttgggtccctccggacatgggcccccggctgggcttcagatctgagagagtcagtgtcatgaagtaatagagctgtgaggaccgggccatgaattcaggccgacacacagccacgcagatctccacgaagcctgcatgctggctgggcttggcctcccccatctcacacacgatctgttctgcagggatgtaaccatccactaaagggctgcactccacgccagcaaccttgacatgggaggcgatgtcgcgaaattccaggcccaggttctcccctcggatagtgaccttggtgcccccttcccgggggcctgtcaccgggattatctctgtgatgcgggggtttgtgcacttgcttttggcaccagacagctccagccactggctctcctgggcagggcagtgctggcgcagggtgcactggcctgggccctggcaccagccacatgcgaagtctgggtcagccttgaggcacagcccgcagctctcacgcatggctccacacttgtagaggtgaactttattctgagctgggttgtcaatgttgaagtgcccattccacacgactgtcaactccacgggcaggttgttgatctccatcccttcataggaataagaggtgttctggcactgtacgctggagctgttgaagcgcagggcgggcactcgctgctcgctgccctgaatgttgaggatgcattcgtagccacgctgcccagactggggctgggggaggttcttggccttcagcgtgataggcttgatcacctccacgggcaccaggatcttgtccactcgcagcagctgggggcagtcctcgggcagcttcactcggccttcctggaaggagcaggtcttggggtcatgggtgcagacatgccggcaatccgcatgagcgtcctttcggaccaggaatgaaagttactgggagataacttcgaaggattttgcaacaaattcgagctgtccgactctgagaatgagacatgaaaaatgctgtaattggaaacaacaagcagaaagccaatctcattgttttaggagctgttccaagattgttgtacttgcttcagcaagaaacctcaagcacagagctgaaaactgaatgtgcagtggtgttgggaagtcttgctatgggtactgaaaacaatgtcaagtctctactggactgccatattatccctgccttattgcaaggactactgtccccagacctgaagtttattgaagcttgcctccgatgcctgcgtaccatcttcaccagtcctgtcactccagaggagctactgtatacagatgccacagtgataccacacctcatggcactgcttagcaggtcccgctatacccaggagtacatctgtcagatcttctcacactgctgtaaagggccagatcatcaaacaattttatttaaccacggtgcagttcagaatattgctcacctactaacctcactgtcctacaaagttcgaatgcaagcactgaaatgtttctcagttttagcttttgaaaacccccaggtatcgatgaccctggtaaatgttttggttgatggagaattgttaccacagatttttgtgaagatgttacagagggataagcctattgagatgcagctcacatcagcaaaatgtttaacttacatgtgtagagctggagcaattcggacagatgataactgtattgtattaaagacattaccttgtttggttcgaatgtgcagtaaggagagattactagaggagagagttgaaggagctgagacacttgcctatctgattgaaccagatgttgagctacagagaatcgctagcataactgatcacctcattgccatgcttgctgattatttcaagtatcccagctcagtgagtgccatcactgatattaaaaggcttgatcatgatttaaaacatgctcacgaactccgccaggctgcattcaagctctatgcctctcttggagcaaatgatgaagacatccggaagaaggtgagtctgggagaggggcgtcccccagtcctgacagccagcaggcagggagtgacgtcaacctgaaagtcgtggtgaagagcactaacagtgactgtttgaatataataaagcagagtgactaaaggcataattgaagaatgaatgggacccggatttggggggttgtttgtttgtttttagaacatagagtggcatggccgtgctggaatgacaaataactggcgtgctttttttttgtgtcattaatatgaattattatgttgcacatttttgcatgtgttctgataaaaatcaattctagcactgtgaagcttcagacaccttgaaagtcctaacattagaattgtaaatgttatttatggaaataccttccaatgctattgagaaattcaaatctctattgtatattgttctttgatatgtggcttagttttatgttttgattttttttgctactgtgcaagtttaatgtgaataaaatctttgtggaatgatgattttatgtttagtgagtggtcatctgaattttccagctccccagaaaatgtatgcactggtatagcacccttatgttactaaagccttagtctaacactgaactcatgttcttgatgagaatacttctagatgaggagtatagtggtaagtaagctctgacttggctccttccacatanccaaaaagctggaacttaccactcaaaaacatgtataacctaataaattctacacaaggctttcaagaccatcagagagcaaaaccacatgttctgtcttgaggagccatagcagaaagagcaaattagtcattatttactgaacatgatgatttactaaatctctccatctgcattagtattttaaggagcactgtgagagaaatcacaaagtattagagtttaccatgattcagagaagttcttcaggcctgtagaaagaggagtatggaacaaccttacatttgttgaaataacttgaaaaggaaccatttcttgaagaaactgaagtaatagcaataagatttgatgtgtgagtagctttgatttaaaatcaatgcaaaaagcacaactaataaattgaatgtttccatgtacctcactttatttcagttaacaagatactttgacttgaagtgtttttagtgtatccctatgaaaatcatttttggtacatctaagttttcacttataaactgttatttcaaagcaaacatactagtgatatatatatgatttatggatgttgacgccaatgttcagtttgggtacgttggtgtattgcaaggggagaggcttttataacaatagatttgaacatttttaaaaaattggactgtgtaacttaaatacacaattatttggtttaggatggttattagggcccattagaaacaggagaagtattttacccattcttaaagctctaaaaaaccatctcatggactgaaaggtagatagacagatggaccacaatgggaaataggatgtccatttgtacttctttgtacttttttgttaataaactgttttggaattaatggcttaatttgtgatatcatgttctagaaatacctgcaacatgacagtctaatcagtagtctattaaaacttgtattcataatgtgtataatttcctggtaaggctaactcctgatcgtttctgtagaaagatgacaaataaagaaaa

SEQ ID NO: 308501 - DNA, 1018 bp, Homo sapiens
gcggccgcccgcccgccctccaggaagcctcatcccggtctccaccattcccccaagcgtggtgtgcctcctgggcaccaccccctggggtggaccccggctcagtctcgggccagggagtgagcgagggtggagaggcgggatagacgggcagaggggaccgcggccgagccaaagacgtttccaactccgggagctcccgccggtgcgggttcccaggatggcgtctggcaggcggggtggctgggcttatagacaactggctgggcggcgcggcttggactttgccaagcgtttcactgagccttccttttagcgatgccgcttcccgggggccgaacgctctgccttgtgaagcgccgggcttgcagccggcctgagaacgagcgcccactcagctctcccgggctttggcaagaagaggtgcaggctccttggcccccatttcctcagagctgccaggccaagtctgtgcggcttctatcgcgtcccagcacctgggcaccggctgaagcagtttgctttttggcaatggtgattcgtatcagctgcaactcttcctagtgtgtgtggttttttaagcccctttcctccgctctgctcagaggtcgcggctctgagtcagaggaactctatgttccctgtgcctggtattccgtttttctttaaggggagtcaaacattgaaggggggaacaagggggtgagatttatttccccattgttgaaagaagggaacgtattgacatgccaggaagtaaaacctgttttttttttttttaaaacaaagtttttttaaagaaaaagacgactttcacctttcactatgttgctcttgaaccaggaccaggaatgaaagttactgggagataacttcgaaggattttgcaacaaattcgagctgtccgactctgagaatggaagtaacagctagcagtcgccactatgttgacaggctatttgaccctgatccccagaaagttctacaaggtgtcatgtaagtagtatgtatttaagag

SEQ ID NO: 308502 - DNA, 531 bp, Homo sapiens
agcctctttctttgtcattggcctagacagttttcatggcctcgttgcttttgttttgcactgtgccttaaggagacttgattgactgtcattaagataagagatttgactaccttcttgtggaaatattttatattttatcaaatgtactcatggtgcctgagtttcttgttgctgtgttctccttccctaggatgccacagtgataccacacctcatggcactgcttagcaggtcccgctatacccaggagtacatctgtcagatcttctcacactgctgtaaagggccagatcatcaaacaattttatttaaccacggtgcagttcagaatattgctcacctactaacctcactgtcctacaaagtaagatgttaaaaattgtggccagatttgtataccttgtttgtgatttctagaaacagacccacatatttttattgtttctttgataattgtgatcaaaagtagtattttatcagtaaaatgttatagggcatcattttagctatagaatgctctttaaaaaa

SEQ ID NO: 308503 - DNA, 4862 bp, Homo sapiens
agcggcgcttccacctctaacccaggctcagagtagctgctgtttctgagagaacgattcgtaggacagcccctgacgccattcccttttgcccttctttctgcgggcctttccggtacttgagcggtgtccagagcgtggccagttctcgtctatctggctgcctttagggagcggtgcctagcgttggccaatagttggctgtcgaaagtgccggcccccgcgccggcgcctgcagcagccgggtgggaaggctcaagatggcgtgcttgttggagaccccaatccgcatgagcgtcctttcggaccaggaatgaaagttactgggagataacttcgaaggattttgcaacaaattcgagctgtccgactctgagaatggaagtaacagctagcagtcgccactatgttgacaggctatttgaccctgatccccagaaagttctacaaggtgtcatagacatgaaaaatgctgtaattggaaacaacaagcagaaagccaatctcattgttttaggagctgttccaagattgttgtacttgcttcagcaagaaacctcaagcacagagctgaaaactgaatgtgcagtggtgttgggaagtcttgctatgggtactgaaaacaatgtcaagtctctactggactgccatattatccctgccttattgcaaggactactgtccccagacctgaagtttattgaagcttgcctccgatgcctgcgtaccatcttcaccagtcctgtcactccagaggagctactgtatacagatgccacagtgataccacacctcatggcactgcttagcaggtcccgctatacccaggagtacatctgtcagatcttctcacactgctgtaaagggccagatcatcaaacaattttatttaaccacggtgcagttcagaatattgctcacctactaacctcactgtcctacaaagttcgaatgcaagcactgaaatgtttctcagttttagcttttgaaaacccccaggtatcgatgaccctggtaaatgttttggttgatggagaattgttaccacagatttttgtgaagatgttacagagggataagcctattgagatgcagctcacatcagcaaaatgtttaacttacatgtgtagagctggagcaattcggacagatgataactgtattgtattaaagacattaccttgtttggttcgaatgtgcagtaaggagagattactagaggagagagttgaaggagctgagacacttgcctatctgattgaaccagatgttgagctacagagaatcgctagcataactgatcacctcattgccatgcttgctgattatttcaagtatcccagctcagtgagtgccatcactgatattaaaaggcttgatcatgatttaaaacatgctcacgaactccgccaggctgcattcaagctctatgcctctcttggagcaaatgatgaagacatccggaagaagatcattgagactgaaaatatgatggaccgaattgtgactggcttgtctgagtctagtgtcaaggtgcggttagctgccgtcagatgtttgcacagtttatccagatctgtgcagcagcttcgaaccagtttccaggatcatgctgtttggaaacctttaatgaaggttttacaaaatgcaccagatgaaatcctagtggtagcatcttccatgctgtgtaatcttcttcttgaattttctccaagcaaagagccaattttggaatcaggagccgtagagctactttgtggattaactcagagtgaaaatcctgctttacgagtgaatggaatttgggctttaatgaatatggcatttcaggctgaacaaaaaataaaagcagatattttacgaagcttgagtactgaacagctattccggttattatcagattcagatttgaatgtgctgatgaagacattgggacttcttagaaatctcctctccactcgtcctcatatagataaaataatgagtactcatggaaagcaaattatgcaagccgtcactcttattctagaaggggaacataacattgaggtcaaagagcagacactgtgcatcttagccaacatagcggatgggacaacagcaaaagatcttattatgaccaatgatgatatcctacagaaaatcaagtattacatgggccattcacatgttaaactgcagcttgcagccatgttttgtatatcaaacctcatatggaatgaagaggaaggttcacaagaacgccaggataaattacgagacatgggcatcgtagatattctacacaaactgagtcagtcaccagattcaaacctttgtgacaaggcaaagatggcactgcagcagtacctggcatgatgggagtgcccctgggcacctgcgagcatcccacctccttgtttaaggaagtacaggaaccagcctcatttgattccttctatttgcacaagtcaccttggactgcagggagctgttttgcaaaagcagtttagtaggcttagatctcaaattcatcttgagaacatttttttgaggtagtaatttcctcagaagactcttgtgttttgttttggtttttttttctgagctactcggactctttattagaacaatcaatcattttcctttggacctacaatttttgcctatgctgcagccactttgtgagtgagaatgaatatgtctgtgtgaacacacaggcatgcgtgtgtatgtgcacgtacatgggccagaatgaatggatgtgtgtgtgtgagggatacctcagatttttcttttcttattttgtgtgaaaatctcttttctacagattttccagggtttaagcattgcttgctgtataaaaaactttactgaattatatacagtttgaatgaaatgttattttaaaaacaaaacaattgttaagtgttccataaaggttatgttgaattttggtcagatgaatatttgtaagtaaaaaatatatgcatttctgaacctcaacttacatagattttctttatataaaaaaaaagaaaaaaaaagaaaaagttggctatagttggcctgattaacaggcactatacatggtgctgtgcaaaatagtaagctagcatcttactgccgtcaatattagcaggtacagagccttttttcatcctaattcagtaagttctcaggcttccaagtcaaatggagaagtaaagtgaggcaacagattcaccataggctttttgaagcatcaaagggaaatataactactgatagtgaaagcccagccatgacccagatgggcttacccttgacaggaactggggaccaagagcctcccaattgccctaactcctgtcattggtattagcaatatctggccagatttagaaccagtcatggaaacttgtgctcaaactaaaagtaggtcatcacttcccagaaacagaataccttgtgcttcctgaaacagcatatatcactgtgaaactaaagaatattctacagacacccctgtagaaagaaacaaagaacaggatagtttagaaagctttctgttagctgtattcagcaaatttcatactagttgctcaggactgctagttggtatgcttttgtaaaacgagattgaaatttaataaaagatgcaactaaaatctttcctgcatgaagctaaaagcactcaagttgagagaggggcaagggaatctccccaggatgactgaagatgacttctttttacagcaagtactgttagcctttctgcaccccttagcttggcccctgctccaacttctgggtcagcagcaaggtgaactcaacagaagttgctcttgactgtttgaaggtagaagcagcctaccttttctctttgctaaaagaaggtcaaaggcttcgcaaccaggatgcaaggtctgcggtccagaagcttgcggtgagtgtgtgccactgatggagctccaagcccacccaccagccactcctgatggggttgctcacactgcagctgccctatcaccaccctgcacgttccttggaagatttaaatgtttggttgcaaatgaatgttttaaaaatgtatttaatgcaatttttcctgctctcaacatgaccacccaagattcaaacacagagacttccaagttactattttttcagaacatcaccgattttaaaatctgtcacaacaggacttggttttgtgcagatatcagagtgctaatgtgagaaacccagttaaaagaaaacttagtttattgggaagaaagcctcaggcccactcgtttctagaactgtgaaaatatccttggttggcatttttaacacaaaacactatagtgttggtattaaatagtactaggtaaatataaagaaaccaataatgaattgctgagacaatcttgaacccaaatagcattagaaagctgaaggcccaatgaaataacactttcacacttaaactctgtggataaattttgcctgtgggtataaacagatggtcaaattaaaaatgctttactataattaacttttctgatttgaatgaagggaaatgtatttattgaaacaaagctgtttgctgctttatgcaggtgcagtgttcagtcagcaaggaagtgggaagagtggacatggtattgtgtctacacccaagttcttaactaagcttctcgctctaatactgcattctgtttctccttttgtgccctgattgtaatccaaaatttatgaactagaaaagaatgtccaatttaataagttgcatttttttttctttaagcactttattcagaacaatacatgttcttctggtagtgtttggataatatgattttaacacatgctaataaaagccaagaaaaatcatggcaacttctaaaaaaagaaaa

SEQ ID NO: 308504 - DNA, 4044 bp, Homo sapiens
cattttttgtttgttcatttatttttacaggttcgaatgcaagcactgaaatgtttctcagttttagcttttgaaaacccccaggtatcgatgaccctggtaaatggtaggctggagctttcagtggcacctacatgatttaattgatgaactttttagatttaaagaatttccttaatcattgttgtttgttttatttctagttttggttgatggagaattgttaccacagatttttgtgaagatgttacagagggataagcctattgagatgcagctcacatcagcaaaatgtttaacttacatgtgtagagctggagcaattcggacagatgataactgtattgtattaaagacattaccttgtttggttcgaatgtgcagtaaggagagattactagaggagagagttgaaggagctgagacacttgcctatctgattgaaccagatgttgagctacagagaatcgctagcataactgatcacctcattgccatgcttgctgattatttcaagtatcccagctcagtgagtgccatcactgatattaaaaggcttgatcatgatttaaaacatgctcacgaactccgccaggctgcattcaagctctatgcctctcttggagcaaatgatgaagacatccggaagaagatcattgagactgaaaatatgatggaccgaattgtgactggcttgtctgagtctagtgtcaaggtgcggttagctgccgtcagatgtttgcacagtttatccagatctgtgcagcagcttcgaaccagtttccaggatcatgctgtttggaaacctttaatgaaggttttacaaaatgcaccagatgaaatcctagtggtagcatcttccatgctgtgtaatcttcttcttgaattttctccaagcaaagagccaattttggaatcaggagccgtagagctactttgtggattaactcagagtgaaaatcctgctttacgagtgaatggaatttgggctttaatgaatatggcatttcaggctgaacaaaaaataaaagcagatattttacgaagcttgagtactgaacagctattccggttattatcagattcagatttgaatgtgctgatgaagacattgggacttcttagaaatctcctctccactcgtcctcatatagataaaataatgagtactcatggaaagcaaattatgcaagccgtcactcttattctagaaggggaacataacattgaggtcaaagagcagacactgtgcatcttagccaacatagcggatgggacaacagcaaaagatcttattatgaccaatgatgatatcctacagaaaatcaagtattacatgggccattcacatgttaaactgcagcttgcagccatgttttgtatatcaaacctcatatggaatgaagaggaaggttcacaagaacgccaggataaattacgagacatgggcatcgtagatattctacacaaactgagtcagtcaccagattcaaacctttgtgacaaggcaaagatggcactgcagcagtacctggcatgatgggagtgcccctgggcacctgcgagcatcccacctccttgtttaaggaagtacaggaaccagcctcatttgattccttctatttgcacaagtcaccttggactgcagggagctgttttgcaaaagcagtttagtaggcttagatctcaaattcatcttgagaacatttttttgaggtagtaatttcctcagaagactcttgtgttttgttttggtttttttttctgagctactcggactctttattagaacaatcaatcattttcctttggacctacaatttttgcctatgctgcagccactttgtgagtgagaatgaatatgtctgtgtgaacacacaggcatgcgtgtgtatgtgcacgtacatgggccagaatgaatggatgtgtgtgtgtgagggatacctcagatttttcttttcttattttgtgtgaaaatctcttttctacagattttccagggtttaagcattgcttgctgtataaaaaactttactgaattatatacagtttgaatgaaatgttattttaaaaacaaaacaattgttaagtgttccataaaggttatgttgaattttggtcagatgaatatttgtaagtaaaaaatatatgcatttctgaacctcaacttacatagattttctttatataaaaaaaaagaaaaaaaaagaaaaagttggctatagttggcctgattaacaggcactatacatggtgctgtgcaaaatagtaagctagcatcttactgccgtcaatattagcaggtacagagccttttttcatcctaattcagtaagttctcaggcttccaagtcaaatggagaagtaaagtgaggcaacagattcaccataggctttttgaagcatcaaagggaaatataactactgatagtgaaagcccagccatgacccagatgggcttacccttgacaggaactggggaccaagagcctcccaattgccctaactcctgtcattggtattagcaatatctggccagatttagaaccagtcatggaaacttgtgctcaaactaaaagtaggtcatcacttcccagaaacagaataccttgtgcttcctgaaacagcatatatcactgtgaaactaaagaatattctacagacacccctgtagaaagaaacaaagaacaggatagtttagaaagctttctgttagctgtattcagcaaatttcatactagttgctcaggactgctagttggtatgcttttgtaaaacgagattgaaatttaataaaagatgcaactaaaatctttcctgcatgaagctaaaagcactcaagttgagagaggggcaagggaatctccccaggatgactgaagatgacttctttttacagcaagtactgttagcctttctgcaccccttagcttggcccctgctccaacttctgggtcagcagcaaggtgaactcaacagaagttgctcttgactgtttgaaggtagaagcagcctaccttttctctttgctaaaagaaggtcaaaggcttcgcaaccaggatgcaaggtctgcggtccagaagcttgcggtgagtgtgtgccactgatggagctccaagcccacccaccagccactcctgatggggttgctcacactgcagctgccctatcaccaccctgcacgttccttggaagatttaaatgtttggttgcaaatgaatgttttaaaaatgtatttaatgcaatttttcctgctctcaacatgaccacccaagattcaaacacagagacttccaagttactattttttcagaacatcaccgattttaaaatctgtcacaacaggacttggttttgtgcagatatcagagtgctaatgtgagaaacccagttaaaagaaaacttagtttattgggaagaaagcctcaggcccactcgtttctagaactgtgaaaatatccttggttggcatttttaacacaaaacactatagtgttggtattaaatagtactaggtaaatataaagaaaccaataatgaattgctgagacaatcttgaacccaaatagcattagaaagctgaaggcccaatgaaataacactttcacacttaaactctgtggataaattttgcctgtgggtataaacagatggtcaaattaaaaatgctttactataattaacttttctgatttgaatgaagggaaatgtatttattgaaacaaagctgtttgctgctttatgcaggtgcagtgttcagtcagcaaggaagtgggaagagtggacatggtattgtgtctacacccaagttcttaactaagcttctcgctctaatactgcattctgtttctccttttgtgccctgattgtaatccaaaatttatgaactagaaaagaatgtccaatttaataagttgcatttttttttctttaagcactttattcagaacaatacatgttcttctggtagtgtttggataatatgattttaacacatgctaataaaagccaagaaaaatcatggcaacttctaaaaaaagaaaa

SEQ ID NO: 308505 - DNA, 4786 bp, Homo sapiens
agcggcgcttccacctctaacccaggctcagagtagctgctgtttctgagagaacgattcgtaggacagcccctgacgccattcccttttgcccttctttctgcgggcctttccggtacttgagcggtgtccagagcgtggccagttctcgtctatctggctgcctttagggagcggtgcctagcgttggccaatagttggctgtcgaaagtgccggcccccgcgccggcgcctgcagcagccgggtgggaaggctcaagatggcgtgcttgttggagaccccaatccgcatgagcgtcctttcggaagtaacagctagcagtcgccactatgttgacaggctatttgaccctgatccccagaaagttctacaaggtgtcatagacatgaaaaatgctgtaattggaaacaacaagcagaaagccaatctcattgttttaggagctgttccaagattgttgtacttgcttcagcaagaaacctcaagcacagagctgaaaactgaatgtgcagtggtgttgggaagtcttgctatgggtactgaaaacaatgtcaagtctctactggactgccatattatccctgccttattgcaaggactactgtccccagacctgaagtttattgaagcttgcctccgatgcctgcgtaccatcttcaccagtcctgtcactccagaggagctactgtatacagatgccacagtgataccacacctcatggcactgcttagcaggtcccgctatacccaggagtacatctgtcagatcttctcacactgctgtaaagggccagatcatcaaacaattttatttaaccacggtgcagttcagaatattgctcacctactaacctcactgtcctacaaagttcgaatgcaagcactgaaatgtttctcagttttagcttttgaaaacccccaggtatcgatgaccctggtaaatgttttggttgatggagaattgttaccacagatttttgtgaagatgttacagagggataagcctattgagatgcagctcacatcagcaaaatgtttaacttacatgtgtagagctggagcaattcggacagatgataactgtattgtattaaagacattaccttgtttggttcgaatgtgcagtaaggagagattactagaggagagagttgaaggagctgagacacttgcctatctgattgaaccagatgttgagctacagagaatcgctagcataactgatcacctcattgccatgcttgctgattatttcaagtatcccagctcagtgagtgccatcactgatattaaaaggcttgatcatgatttaaaacatgctcacgaactccgccaggctgcattcaagctctatgcctctcttggagcaaatgatgaagacatccggaagaagatcattgagactgaaaatatgatggaccgaattgtgactggcttgtctgagtctagtgtcaaggtgcggttagctgccgtcagatgtttgcacagtttatccagatctgtgcagcagcttcgaaccagtttccaggatcatgctgtttggaaacctttaatgaaggttttacaaaatgcaccagatgaaatcctagtggtagcatcttccatgctgtgtaatcttcttcttgaattttctccaagcaaagagccaattttggaatcaggagccgtagagctactttgtggattaactcagagtgaaaatcctgctttacgagtgaatggaatttgggctttaatgaatatggcatttcaggctgaacaaaaaataaaagcagatattttacgaagcttgagtactgaacagctattccggttattatcagattcagatttgaatgtgctgatgaagacattgggacttcttagaaatctcctctccactcgtcctcatatagataaaataatgagtactcatggaaagcaaattatgcaagccgtcactcttattctagaaggggaacataacattgaggtcaaagagcagacactgtgcatcttagccaacatagcggatgggacaacagcaaaagatcttattatgaccaatgatgatatcctacagaaaatcaagtattacatgggccattcacatgttaaactgcagcttgcagccatgttttgtatatcaaacctcatatggaatgaagaggaaggttcacaagaacgccaggataaattacgagacatgggcatcgtagatattctacacaaactgagtcagtcaccagattcaaacctttgtgacaaggcaaagatggcactgcagcagtacctggcatgatgggagtgcccctgggcacctgcgagcatcccacctccttgtttaaggaagtacaggaaccagcctcatttgattccttctatttgcacaagtcaccttggactgcagggagctgttttgcaaaagcagtttagtaggcttagatctcaaattcatcttgagaacatttttttgaggtagtaatttcctcagaagactcttgtgttttgttttggtttttttttctgagctactcggactctttattagaacaatcaatcattttcctttggacctacaatttttgcctatgctgcagccactttgtgagtgagaatgaatatgtctgtgtgaacacacaggcatgcgtgtgtatgtgcacgtacatgggccagaatgaatggatgtgtgtgtgtgagggatacctcagatttttcttttcttattttgtgtgaaaatctcttttctacagattttccagggtttaagcattgcttgctgtataaaaaactttactgaattatatacagtttgaatgaaatgttattttaaaaacaaaacaattgttaagtgttccataaaggttatgttgaattttggtcagatgaatatttgtaagtaaaaaatatatgcatttctgaacctcaacttacatagattttctttatataaaaaaaaagaaaaaaaaagaaaaagttggctatagttggcctgattaacaggcactatacatggtgctgtgcaaaatagtaagctagcatcttactgccgtcaatattagcaggtacagagccttttttcatcctaattcagtaagttctcaggcttccaagtcaaatggagaagtaaagtgaggcaacagattcaccataggctttttgaagcatcaaagggaaatataactactgatagtgaaagcccagccatgacccagatgggcttacccttgacaggaactggggaccaagagcctcccaattgccctaactcctgtcattggtattagcaatatctggccagatttagaaccagtcatggaaacttgtgctcaaactaaaagtaggtcatcacttcccagaaacagaataccttgtgcttcctgaaacagcatatatcactgtgaaactaaagaatattctacagacacccctgtagaaagaaacaaagaacaggatagtttagaaagctttctgttagctgtattcagcaaatttcatactagttgctcaggactgctagttggtatgcttttgtaaaacgagattgaaatttaataaaagatgcaactaaaatctttcctgcatgaagctaaaagcactcaagttgagagaggggcaagggaatctccccaggatgactgaagatgacttctttttacagcaagtactgttagcctttctgcaccccttagcttggcccctgctccaacttctgggtcagcagcaaggtgaactcaacagaagttgctcttgactgtttgaaggtagaagcagcctaccttttctctttgctaaaagaaggtcaaaggcttcgcaaccaggatgcaaggtctgcggtccagaagcttgcggtgagtgtgtgccactgatggagctccaagcccacccaccagccactcctgatggggttgctcacactgcagctgccctatcaccaccctgcacgttccttggaagatttaaatgtttggttgcaaatgaatgttttaaaaatgtatttaatgcaatttttcctgctctcaacatgaccacccaagattcaaacacagagacttccaagttactattttttcagaacatcaccgattttaaaatctgtcacaacaggacttggttttgtgcagatatcagagtgctaatgtgagaaacccagttaaaagaaaacttagtttattgggaagaaagcctcaggcccactcgtttctagaactgtgaaaatatccttggttggcatttttaacacaaaacactatagtgttggtattaaatagtactaggtaaatataaagaaaccaataatgaattgctgagacaatcttgaacccaaatagcattagaaagctgaaggcccaatgaaataacactttcacacttaaactctgtggataaattttgcctgtgggtataaacagatggtcaaattaaaaatgctttactataattaacttttctgatttgaatgaagggaaatgtatttattgaaacaaagctgtttgctgctttatgcaggtgcagtgttcagtcagcaaggaagtgggaagagtggacatggtattgtgtctacacccaagttcttaactaagcttctcgctctaatactgcattctgtttctccttttgtgccctgattgtaatccaaaatttatgaactagaaaagaatgtccaatttaataagttgcatttttttttctttaagcactttattcagaacaatacatgttcttctggtagtgtttggataatatgattttaacacatgctaataaaagccaagaaaaatcatggcaacttctaaaaaaagaaaa

SEQ ID NO: 308506 - DNA, 4709 bp, Homo sapiens
agcggcgcttccacctctaacccaggctcagagtagctgctgtttctgagagaacgattcgtaggacagcccctgacgccattcccttttgcccttctttctgcgggcctttccggtacttgagcggtgtccagagcgtggccagttctcgtctatctggctgcctttagggagcggtgcctagcgttggccaatagttggctgtcgaaagtgccggcccccgcgccggcgcctgcagcagccgggtgggaaggctcaagatggcgtgcttgttggagaccccaatccgcatgagcgtcctttcgagacatgaaaaatgctgtaattggaaacaacaagcagaaagccaatctcattgttttaggagctgttccaagattgttgtacttgcttcagcaagaaacctcaagcacagagctgaaaactgaatgtgcagtggtgttgggaagtcttgctatgggtactgaaaacaatgtcaagtctctactggactgccatattatccctgccttattgcaaggactactgtccccagacctgaagtttattgaagcttgcctccgatgcctgcgtaccatcttcaccagtcctgtcactccagaggagctactgtatacagatgccacagtgataccacacctcatggcactgcttagcaggtcccgctatacccaggagtacatctgtcagatcttctcacactgctgtaaagggccagatcatcaaacaattttatttaaccacggtgcagttcagaatattgctcacctactaacctcactgtcctacaaagttcgaatgcaagcactgaaatgtttctcagttttagcttttgaaaacccccaggtatcgatgaccctggtaaatgttttggttgatggagaattgttaccacagatttttgtgaagatgttacagagggataagcctattgagatgcagctcacatcagcaaaatgtttaacttacatgtgtagagctggagcaattcggacagatgataactgtattgtattaaagacattaccttgtttggttcgaatgtgcagtaaggagagattactagaggagagagttgaaggagctgagacacttgcctatctgattgaaccagatgttgagctacagagaatcgctagcataactgatcacctcattgccatgcttgctgattatttcaagtatcccagctcagtgagtgccatcactgatattaaaaggcttgatcatgatttaaaacatgctcacgaactccgccaggctgcattcaagctctatgcctctcttggagcaaatgatgaagacatccggaagaagatcattgagactgaaaatatgatggaccgaattgtgactggcttgtctgagtctagtgtcaaggtgcggttagctgccgtcagatgtttgcacagtttatccagatctgtgcagcagcttcgaaccagtttccaggatcatgctgtttggaaacctttaatgaaggttttacaaaatgcaccagatgaaatcctagtggtagcatcttccatgctgtgtaatcttcttcttgaattttctccaagcaaagagccaattttggaatcaggagccgtagagctactttgtggattaactcagagtgaaaatcctgctttacgagtgaatggaatttgggctttaatgaatatggcatttcaggctgaacaaaaaataaaagcagatattttacgaagcttgagtactgaacagctattccggttattatcagattcagatttgaatgtgctgatgaagacattgggacttcttagaaatctcctctccactcgtcctcatatagataaaataatgagtactcatggaaagcaaattatgcaagccgtcactcttattctagaaggggaacataacattgaggtcaaagagcagacactgtgcatcttagccaacatagcggatgggacaacagcaaaagatcttattatgaccaatgatgatatcctacagaaaatcaagtattacatgggccattcacatgttaaactgcagcttgcagccatgttttgtatatcaaacctcatatggaatgaagaggaaggttcacaagaacgccaggataaattacgagacatgggcatcgtagatattctacacaaactgagtcagtcaccagattcaaacctttgtgacaaggcaaagatggcactgcagcagtacctggcatgatgggagtgcccctgggcacctgcgagcatcccacctccttgtttaaggaagtacaggaaccagcctcatttgattccttctatttgcacaagtcaccttggactgcagggagctgttttgcaaaagcagtttagtaggcttagatctcaaattcatcttgagaacatttttttgaggtagtaatttcctcagaagactcttgtgttttgttttggtttttttttctgagctactcggactctttattagaacaatcaatcattttcctttggacctacaatttttgcctatgctgcagccactttgtgagtgagaatgaatatgtctgtgtgaacacacaggcatgcgtgtgtatgtgcacgtacatgggccagaatgaatggatgtgtgtgtgtgagggatacctcagatttttcttttcttattttgtgtgaaaatctcttttctacagattttccagggtttaagcattgcttgctgtataaaaaactttactgaattatatacagtttgaatgaaatgttattttaaaaacaaaacaattgttaagtgttccataaaggttatgttgaattttggtcagatgaatatttgtaagtaaaaaatatatgcatttctgaacctcaacttacatagattttctttatataaaaaaaaagaaaaaaaaagaaaaagttggctatagttggcctgattaacaggcactatacatggtgctgtgcaaaatagtaagctagcatcttactgccgtcaatattagcaggtacagagccttttttcatcctaattcagtaagttctcaggcttccaagtcaaatggagaagtaaagtgaggcaacagattcaccataggctttttgaagcatcaaagggaaatataactactgatagtgaaagcccagccatgacccagatgggcttacccttgacaggaactggggaccaagagcctcccaattgccctaactcctgtcattggtattagcaatatctggccagatttagaaccagtcatggaaacttgtgctcaaactaaaagtaggtcatcacttcccagaaacagaataccttgtgcttcctgaaacagcatatatcactgtgaaactaaagaatattctacagacacccctgtagaaagaaacaaagaacaggatagtttagaaagctttctgttagctgtattcagcaaatttcatactagttgctcaggactgctagttggtatgcttttgtaaaacgagattgaaatttaataaaagatgcaactaaaatctttcctgcatgaagctaaaagcactcaagttgagagaggggcaagggaatctccccaggatgactgaagatgacttctttttacagcaagtactgttagcctttctgcaccccttagcttggcccctgctccaacttctgggtcagcagcaaggtgaactcaacagaagttgctcttgactgtttgaaggtagaagcagcctaccttttctctttgctaaaagaaggtcaaaggcttcgcaaccaggatgcaaggtctgcggtccagaagcttgcggtgagtgtgtgccactgatggagctccaagcccacccaccagccactcctgatggggttgctcacactgcagctgccctatcaccaccctgcacgttccttggaagatttaaatgtttggttgcaaatgaatgttttaaaaatgtatttaatgcaatttttcctgctctcaacatgaccacccaagattcaaacacagagacttccaagttactattttttcagaacatcaccgattttaaaatctgtcacaacaggacttggttttgtgcagatatcagagtgctaatgtgagaaacccagttaaaagaaaacttagtttattgggaagaaagcctcaggcccactcgtttctagaactgtgaaaatatccttggttggcatttttaacacaaaacactatagtgttggtattaaatagtactaggtaaatataaagaaaccaataatgaattgctgagacaatcttgaacccaaatagcattagaaagctgaaggcccaatgaaataacactttcacacttaaactctgtggataaattttgcctgtgggtataaacagatggtcaaattaaaaatgctttactataattaacttttctgatttgaatgaagggaaatgtatttattgaaacaaagctgtttgctgctttatgcaggtgcagtgttcagtcagcaaggaagtgggaagagtggacatggtattgtgtctacacccaagttcttaactaagcttctcgctctaatactgcattctgtttctccttttgtgccctgattgtaatccaaaatttatgaactagaaaagaatgtccaatttaataagttgcatttttttttctttaagcactttattcagaacaatacatgttcttctggtagtgtttggataatatgattttaacacatgctaataaaagccaagaaaaatcatggcaacttctaaaaaaagaaaa

SEQ ID NO: 308507 - DNA, 5400 bp, Homo sapiens
gcggccgcccgcccgccctccaggaagcctcatcccggtctccaccattcccccaagcgtggtgtgcctcctgggcaccaccccctggggtggaccccggctcagtctcgggccagggagtgagcgagggtggagaggcgggatagacgggcagaggggaccgcggccgagccaaagacgtttccaactccgggagctcccgccggtgcgggttcccaggatggcgtctggcaggcggggtggctgggcttatagacaactggctgggcggcgcggcttggactttgccaagcgtttcactgagccttccttttagcgatgccgcttcccgggggccgaacgctctgccttgtgaagcgccgggcttgcagccggcctgagaacgagcgcccactcagctctcccgggctttggcaagaagaggtgcaggctccttggcccccatttcctcagagctgccaggccaagtctgtgcggcttctatcgcgtcccagcacctgggcaccggctgaagcagtttgctttttggcaatggtgattcgtatcagctgcaactcttcctagtgtgtgtggttttttaagcccctttcctccgctctgctcagaggtcgcggctctgagtcagaggaactctatgttccctgtgcctggtattccgtttttctttaaggggagtcaaacattgaaggggggaacaagggggtgagatttatttccccattgttgaaagaagggaacgtattgacatgccaggaagtaaaacctgttttttttttttttaaaacaaagtttttttaaagaaaaagacgactttcacctttcactatgttgctcttgaaccaggaccaggaatgaaagttactgggagataacttcgaaggattttgcaacaaattcgagctgtccgactctgagaatggaagtaacagctagcagtcgccactatgttgacaggctatttgaccctgatccccagaaagttctacaaggtgtcatagacatgaaaaatgctgtaattggaaacaacaagcagaaagccaatctcattgttttaggagctgttccaagattgttgtacttgcttcagcaagaaacctcaagcacagagctgaaaactgaatgtgcagtggtgttgggaagtcttgctatgggtactgaaaacaatgtcaagtctctactggactgccatattatccctgccttattgcaaggactactgtccccagacctgaagtttattgaagcttgcctccgatgcctgcgtaccatcttcaccagtcctgtcactccagaggagctactgtatacagatgccacagtgataccacacctcatggcactgcttagcaggtcccgctatacccaggagtacatctgtcagatcttctcacactgctgtaaagggccagatcatcaaacaattttatttaaccacggtgcagttcagaatattgctcacctactaacctcactgtcctacaaagttcgaatgcaagcactgaaatgtttctcagttttagcttttgaaaacccccaggtatcgatgaccctggtaaatgttttggttgatggagaattgttaccacagatttttgtgaagatgttacagagggataagcctattgagatgcagctcacatcagcaaaatgtttaacttacatgtgtagagctggagcaattcggacagatgataactgtattgtattaaagacattaccttgtttggttcgaatgtgcagtaaggagagattactagaggagagagttgaaggagctgagacacttgcctatctgattgaaccagatgttgagctacagagaatcgctagcataactgatcacctcattgccatgcttgctgattatttcaagtatcccagctcagtgagtgccatcactgatattaaaaggcttgatcatgatttaaaacatgctcacgaactccgccaggctgcattcaagctctatgcctctcttggagcaaatgatgaagacatccggaagaagatcattgagactgaaaatatgatggaccgaattgtgactggcttgtctgagtctagtgtcaaggtgcggttagctgccgtcagatgtttgcacagtttatccagatctgtgcagcagcttcgaaccagtttccaggatcatgctgtttggaaacctttaatgaaggttttacaaaatgcaccagatgaaatcctagtggtagcatcttccatgctgtgtaatcttcttcttgaattttctccaagcaaagagccaattttggaatcaggagccgtagagctactttgtggattaactcagagtgaaaatcctgctttacgagtgaatggaatttgggctttaatgaatatggcatttcaggctgaacaaaaaataaaagcagatattttacgaagcttgagtactgaacagctattccggttattatcagattcagatttgaatgtgctgatgaagacattgggacttcttagaaatctcctctccactcgtcctcatatagataaaataatgagtactcatggaaagcaaattatgcaagccgtcactcttattctagaaggggaacataacattgaggtcaaagagcagacactgtgcatcttagccaacatagcggatgggacaacagcaaaagatcttattatgaccaatgatgatatcctacagaaaatcaagtattacatgggccattcacatgttaaactgcagcttgcagccatgttttgtatatcaaacctcatatggaatgaagaggaaggttcacaagaacgccaggataaattacgagacatgggcatcgtagatattctacacaaactgagtcagtcaccagattcaaacctttgtgacaaggcaaagatggcactgcagcagtacctggcatgatgggagtgcccctgggcacctgcgagcatcccacctccttgtttaaggaagtacaggaaccagcctcatttgattccttctatttgcacaagtcaccttggactgcagggagctgttttgcaaaagcagtttagtaggcttagatctcaaattcatcttgagaacatttttttgaggtagtaatttcctcagaagactcttgtgttttgttttggtttttttttctgagctactcggactctttattagaacaatcaatcattttcctttggacctacaatttttgcctatgctgcagccactttgtgagtgagaatgaatatgtctgtgtgaacacacaggcatgcgtgtgtatgtgcacgtacatgggccagaatgaatggatgtgtgtgtgtgagggatacctcagatttttcttttcttattttgtgtgaaaatctcttttctacagattttccagggtttaagcattgcttgctgtataaaaaactttactgaattatatacagtttgaatgaaatgttattttaaaaacaaaacaattgttaagtgttccataaaggttatgttgaattttggtcagatgaatatttgtaagtaaaaaatatatgcatttctgaacctcaacttacatagattttctttatataaaaaaaaagaaaaaaaaagaaaaagttggctatagttggcctgattaacaggcactatacatggtgctgtgcaaaatagtaagctagcatcttactgccgtcaatattagcaggtacagagccttttttcatcctaattcagtaagttctcaggcttccaagtcaaatggagaagtaaagtgaggcaacagattcaccataggctttttgaagcatcaaagggaaatataactactgatagtgaaagcccagccatgacccagatgggcttacccttgacaggaactggggaccaagagcctcccaattgccctaactcctgtcattggtattagcaatatctggccagatttagaaccagtcatggaaacttgtgctcaaactaaaagtaggtcatcacttcccagaaacagaataccttgtgcttcctgaaacagcatatatcactgtgaaactaaagaatattctacagacacccctgtagaaagaaacaaagaacaggatagtttagaaagctttctgttagctgtattcagcaaatttcatactagttgctcaggactgctagttggtatgcttttgtaaaacgagattgaaatttaataaaagatgcaactaaaatctttcctgcatgaagctaaaagcactcaagttgagagaggggcaagggaatctccccaggatgactgaagatgacttctttttacagcaagtactgttagcctttctgcaccccttagcttggcccctgctccaacttctgggtcagcagcaaggtgaactcaacagaagttgctcttgactgtttgaaggtagaagcagcctaccttttctctttgctaaaagaaggtcaaaggcttcgcaaccaggatgcaaggtctgcggtccagaagcttgcggtgagtgtgtgccactgatggagctccaagcccacccaccagccactcctgatggggttgctcacactgcagctgccctatcaccaccctgcacgttccttggaagatttaaatgtttggttgcaaatgaatgttttaaaaatgtatttaatgcaatttttcctgctctcaacatgaccacccaagattcaaacacagagacttccaagttactattttttcagaacatcaccgattttaaaatctgtcacaacaggacttggttttgtgcagatatcagagtgctaatgtgagaaacccagttaaaagaaaacttagtttattgggaagaaagcctcaggcccactcgtttctagaactgtgaaaatatccttggttggcatttttaacacaaaacactatagtgttggtattaaatagtactaggtaaatataaagaaaccaataatgaattgctgagacaatcttgaacccaaatagcattagaaagctgaaggcccaatgaaataacactttcacacttaaactctgtggataaattttgcctgtgggtataaacagatggtcaaattaaaaatgctttactataattaacttttctgatttgaatgaagggaaatgtatttattgaaacaaagctgtttgctgctttatgcaggtgcagtgttcagtcagcaaggaagtgggaagagtggacatggtattgtgtctacacccaagttcttaactaagcttctcgctctaatactgcattctgtttctccttttgtgccctgattgtaatccaaaatttatgaactagaaaagaatgtccaatttaataagttgcatttttttttctttaagcactttattcagaacaatacatgttcttctggtagtgtttggataatatgattttaacacatgctaataaaagccaagaaaaatcatggcaacttctaaaaaaagaaaa

SEQ ID NO: 308508 - DNA, 4785 bp, Homo sapiens
agcggcgcttccacctctaacccaggctcagagtagctgctgtttctgagagaacgattcgtaggacagcccctgacgccattcccttttgcccttctttctgcgggcctttccggtacttgagcggtgtccagagcgtggccagttctcgtctatctggctgcctttagggagcggtgcctagcgttggccaatagttggctgtcgaaagtgccggcccccgcgccggcgcctgcagcagccgggtgggaaggctcaagatggcgtgcttgttggagaccccaatccgcatgagcgtcctttcggaccaggaatgaaagttactgggagataacttcgaaggattttgcaacaaattcgagctgtccgactctgagaatgagacatgaaaaatgctgtaattggaaacaacaagcagaaagccaatctcattgttttaggagctgttccaagattgttgtacttgcttcagcaagaaacctcaagcacagagctgaaaactgaatgtgcagtggtgttgggaagtcttgctatgggtactgaaaacaatgtcaagtctctactggactgccatattatccctgccttattgcaaggactactgtccccagacctgaagtttattgaagcttgcctccgatgcctgcgtaccatcttcaccagtcctgtcactccagaggagctactgtatacagatgccacagtgataccacacctcatggcactgcttagcaggtcccgctatacccaggagtacatctgtcagatcttctcacactgctgtaaagggccagatcatcaaacaattttatttaaccacggtgcagttcagaatattgctcacctactaacctcactgtcctacaaagttcgaatgcaagcactgaaatgtttctcagttttagcttttgaaaacccccaggtatcgatgaccctggtaaatgttttggttgatggagaattgttaccacagatttttgtgaagatgttacagagggataagcctattgagatgcagctcacatcagcaaaatgtttaacttacatgtgtagagctggagcaattcggacagatgataactgtattgtattaaagacattaccttgtttggttcgaatgtgcagtaaggagagattactagaggagagagttgaaggagctgagacacttgcctatctgattgaaccagatgttgagctacagagaatcgctagcataactgatcacctcattgccatgcttgctgattatttcaagtatcccagctcagtgagtgccatcactgatattaaaaggcttgatcatgatttaaaacatgctcacgaactccgccaggctgcattcaagctctatgcctctcttggagcaaatgatgaagacatccggaagaagatcattgagactgaaaatatgatggaccgaattgtgactggcttgtctgagtctagtgtcaaggtgcggttagctgccgtcagatgtttgcacagtttatccagatctgtgcagcagcttcgaaccagtttccaggatcatgctgtttggaaacctttaatgaaggttttacaaaatgcaccagatgaaatcctagtggtagcatcttccatgctgtgtaatcttcttcttgaattttctccaagcaaagagccaattttggaatcaggagccgtagagctactttgtggattaactcagagtgaaaatcctgctttacgagtgaatggaatttgggctttaatgaatatggcatttcaggctgaacaaaaaataaaagcagatattttacgaagcttgagtactgaacagctattccggttattatcagattcagatttgaatgtgctgatgaagacattgggacttcttagaaatctcctctccactcgtcctcatatagataaaataatgagtactcatggaaagcaaattatgcaagccgtcactcttattctagaaggggaacataacattgaggtcaaagagcagacactgtgcatcttagccaacatagcggatgggacaacagcaaaagatcttattatgaccaatgatgatatcctacagaaaatcaagtattacatgggccattcacatgttaaactgcagcttgcagccatgttttgtatatcaaacctcatatggaatgaagaggaaggttcacaagaacgccaggataaattacgagacatgggcatcgtagatattctacacaaactgagtcagtcaccagattcaaacctttgtgacaaggcaaagatggcactgcagcagtacctggcatgatgggagtgcccctgggcacctgcgagcatcccacctccttgtttaaggaagtacaggaaccagcctcatttgattccttctatttgcacaagtcaccttggactgcagggagctgttttgcaaaagcagtttagtaggcttagatctcaaattcatcttgagaacatttttttgaggtagtaatttcctcagaagactcttgtgttttgttttggtttttttttctgagctactcggactctttattagaacaatcaatcattttcctttggacctacaatttttgcctatgctgcagccactttgtgagtgagaatgaatatgtctgtgtgaacacacaggcatgcgtgtgtatgtgcacgtacatgggccagaatgaatggatgtgtgtgtgtgagggatacctcagatttttcttttcttattttgtgtgaaaatctcttttctacagattttccagggtttaagcattgcttgctgtataaaaaactttactgaattatatacagtttgaatgaaatgttattttaaaaacaaaacaattgttaagtgttccataaaggttatgttgaattttggtcagatgaatatttgtaagtaaaaaatatatgcatttctgaacctcaacttacatagattttctttatataaaaaaaaagaaaaaaaaagaaaaagttggctatagttggcctgattaacaggcactatacatggtgctgtgcaaaatagtaagctagcatcttactgccgtcaatattagcaggtacagagccttttttcatcctaattcagtaagttctcaggcttccaagtcaaatggagaagtaaagtgaggcaacagattcaccataggctttttgaagcatcaaagggaaatataactactgatagtgaaagcccagccatgacccagatgggcttacccttgacaggaactggggaccaagagcctcccaattgccctaactcctgtcattggtattagcaatatctggccagatttagaaccagtcatggaaacttgtgctcaaactaaaagtaggtcatcacttcccagaaacagaataccttgtgcttcctgaaacagcatatatcactgtgaaactaaagaatattctacagacacccctgtagaaagaaacaaagaacaggatagtttagaaagctttctgttagctgtattcagcaaatttcatactagttgctcaggactgctagttggtatgcttttgtaaaacgagattgaaatttaataaaagatgcaactaaaatctttcctgcatgaagctaaaagcactcaagttgagagaggggcaagggaatctccccaggatgactgaagatgacttctttttacagcaagtactgttagcctttctgcaccccttagcttggcccctgctccaacttctgggtcagcagcaaggtgaactcaacagaagttgctcttgactgtttgaaggtagaagcagcctaccttttctctttgctaaaagaaggtcaaaggcttcgcaaccaggatgcaaggtctgcggtccagaagcttgcggtgagtgtgtgccactgatggagctccaagcccacccaccagccactcctgatggggttgctcacactgcagctgccctatcaccaccctgcacgttccttggaagatttaaatgtttggttgcaaatgaatgttttaaaaatgtatttaatgcaatttttcctgctctcaacatgaccacccaagattcaaacacagagacttccaagttactattttttcagaacatcaccgattttaaaatctgtcacaacaggacttggttttgtgcagatatcagagtgctaatgtgagaaacccagttaaaagaaaacttagtttattgggaagaaagcctcaggcccactcgtttctagaactgtgaaaatatccttggttggcatttttaacacaaaacactatagtgttggtattaaatagtactaggtaaatataaagaaaccaataatgaattgctgagacaatcttgaacccaaatagcattagaaagctgaaggcccaatgaaataacactttcacacttaaactctgtggataaattttgcctgtgggtataaacagatggtcaaattaaaaatgctttactataattaacttttctgatttgaatgaagggaaatgtatttattgaaacaaagctgtttgctgctttatgcaggtgcagtgttcagtcagcaaggaagtgggaagagtggacatggtattgtgtctacacccaagttcttaactaagcttctcgctctaatactgcattctgtttctccttttgtgccctgattgtaatccaaaatttatgaactagaaaagaatgtccaatttaataagttgcatttttttttctttaagcactttattcagaacaatacatgttcttctggtagtgtttggataatatgattttaacacatgctaataaaagccaagaaaaatcatggcaacttctaaaaaaagaaaa

SEQ ID NO: 308509 - DNA, 4612 bp, Homo sapiens
ggctggtacggccggggtgtcggatggagacccaatccgcatgagcgtcctttcggaccaggaatgaaagttactgggagataacttcgaaggattttgcaacaaattcgagctgtccgactctgagaatggaagtaacagctagcagtcgccactatgttgacaggctatttgaccctgatccccagaaagttctacaaggtgtcatagacatgaaaaatgctgtaattggaaacaacaagcagaaagccaatctcattgttttaggagctgttccaagattgttgtacttgcttcagcaagaaacctcaagcacagagctgaaaactgaatgtgcagtggtgttgggaagtcttgctatgggtactgaaaacaatgtcaagtctctactggactgccatattatccctgccttattgcaaggactactgtccccagacctgaagtttattgaagcttgcctccgatgcctgcgtaccatcttcaccagtcctgtcactccagaggagctactgtatacagatgccacagtgataccacacctcatggcactgcttagcaggtcccgctatacccaggagtacatctgtcagatcttctcacactgctgtaaagggccagatcatcaaacaattttatttaaccacggtgcagttcagaatattgctcacctactaacctcactgtcctacaaagttcgaatgcaagcactgaaatgtttctcagttttagcttttgaaaacccccaggtatcgatgaccctggtaaatgttttggttgatggagaattgttaccacagatttttgtgaagatgttacagagggataagcctattgagatgcagctcacatcagcaaaatgtttaacttacatgtgtagagctggagcaattcggacagatgataactgtattgtattaaagacattaccttgtttggttcgaatgtgcagtaaggagagattactagaggagagagttgaaggagctgagacacttgcctatctgattgaaccagatgttgagctacagagaatcgctagcataactgatcacctcattgccatgcttgctgattatttcaagtatcccagctcagtgagtgccatcactgatattaaaaggcttgatcatgatttaaaacatgctcacgaactccgccaggctgcattcaagctctatgcctctcttggagcaaatgatgaagacatccggaagaagatcattgagactgaaaatatgatggaccgaattgtgactggcttgtctgagtctagtgtcaaggtgcggttagctgccgtcagatgtttgcacagtttatccagatctgtgcagcagcttcgaaccagtttccaggatcatgctgtttggaaacctttaatgaaggttttacaaaatgcaccagatgaaatcctagtggtagcatcttccatgctgtgtaatcttcttcttgaattttctccaagcaaagagccaattttggaatcaggagccgtagagctactttgtggattaactcagagtgaaaatcctgctttacgagtgaatggaatttgggctttaatgaatatggcatttcaggctgaacaaaaaataaaagcagatattttacgaagcttgagtactgaacagctattccggttattatcagattcagatttgaatgtgctgatgaagacattgggacttcttagaaatctcctctccactcgtcctcatatagataaaataatgagtactcatggaaagcaaattatgcaagccgtcactcttattctagaaggggaacataacattgaggtcaaagagcagacactgtgcatcttagccaacatagcggatgggacaacagcaaaagatcttattatgaccaatgatgatatcctacagaaaatcaagtattacatgggccattcacatgttaaactgcagcttgcagccatgttttgtatatcaaacctcatatggaatgaagaggaaggttcacaagaacgccaggataaattacgagacatgggcatcgtagatattctacacaaactgagtcagtcaccagattcaaacctttgtgacaaggcaaagatggcactgcagcagtacctggcatgatgggagtgcccctgggcacctgcgagcatcccacctccttgtttaaggaagtacaggaaccagcctcatttgattccttctatttgcacaagtcaccttggactgcagggagctgttttgcaaaagcagtttagtaggcttagatctcaaattcatcttgagaacatttttttgaggtagtaatttcctcagaagactcttgtgttttgttttggtttttttttctgagctactcggactctttattagaacaatcaatcattttcctttggacctacaatttttgcctatgctgcagccactttgtgagtgagaatgaatatgtctgtgtgaacacacaggcatgcgtgtgtatgtgcacgtacatgggccagaatgaatggatgtgtgtgtgtgagggatacctcagatttttcttttcttattttgtgtgaaaatctcttttctacagattttccagggtttaagcattgcttgctgtataaaaaactttactgaattatatacagtttgaatgaaatgttattttaaaaacaaaacaattgttaagtgttccataaaggttatgttgaattttggtcagatgaatatttgtaagtaaaaaatatatgcatttctgaacctcaacttacatagattttctttatataaaaaaaaagaaaaaaaaagaaaaagttggctatagttggcctgattaacaggcactatacatggtgctgtgcaaaatagtaagctagcatcttactgccgtcaatattagcaggtacagagccttttttcatcctaattcagtaagttctcaggcttccaagtcaaatggagaagtaaagtgaggcaacagattcaccataggctttttgaagcatcaaagggaaatataactactgatagtgaaagcccagccatgacccagatgggcttacccttgacaggaactggggaccaagagcctcccaattgccctaactcctgtcattggtattagcaatatctggccagatttagaaccagtcatggaaacttgtgctcaaactaaaagtaggtcatcacttcccagaaacagaataccttgtgcttcctgaaacagcatatatcactgtgaaactaaagaatattctacagacacccctgtagaaagaaacaaagaacaggatagtttagaaagctttctgttagctgtattcagcaaatttcatactagttgctcaggactgctagttggtatgcttttgtaaaacgagattgaaatttaataaaagatgcaactaaaatctttcctgcatgaagctaaaagcactcaagttgagagaggggcaagggaatctccccaggatgactgaagatgacttctttttacagcaagtactgttagcctttctgcaccccttagcttggcccctgctccaacttctgggtcagcagcaaggtgaactcaacagaagttgctcttgactgtttgaaggtagaagcagcctaccttttctctttgctaaaagaaggtcaaaggcttcgcaaccaggatgcaaggtctgcggtccagaagcttgcggtgagtgtgtgccactgatggagctccaagcccacccaccagccactcctgatggggttgctcacactgcagctgccctatcaccaccctgcacgttccttggaagatttaaatgtttggttgcaaatgaatgttttaaaaatgtatttaatgcaatttttcctgctctcaacatgaccacccaagattcaaacacagagacttccaagttactattttttcagaacatcaccgattttaaaatctgtcacaacaggacttggttttgtgcagatatcagagtgctaatgtgagaaacccagttaaaagaaaacttagtttattgggaagaaagcctcaggcccactcgtttctagaactgtgaaaatatccttggttggcatttttaacacaaaacactatagtgttggtattaaatagtactaggtaaatataaagaaaccaataatgaattgctgagacaatcttgaacccaaatagcattagaaagctgaaggcccaatgaaataacactttcacacttaaactctgtggataaattttgcctgtgggtataaacagatggtcaaattaaaaatgctttactataattaacttttctgatttgaatgaagggaaatgtatttattgaaacaaagctgtttgctgctttatgcaggtgcagtgttcagtcagcaaggaagtgggaagagtggacatggtattgtgtctacacccaagttcttaactaagcttctcgctctaatactgcattctgtttctccttttgtgccctgattgtaatccaaaatttatgaactagaaaagaatgtccaatttaataagttgcatttttttttctttaagcactttattcagaacaatacatgttcttctggtagtgtttggataatatgattttaacacatgctaataaaagccaagaaaaatcatggcaacttctaaaaaaagaaaa

SEQ ID NO: 308510 - DNA, 4916 bp, Homo sapiens
agcggcgcttccacctctaacccaggctcagagtagctgctgtttctgagagaacgattcgtaggacagcccctgacgccattcccttttgcccttctttctgcgggcctttccggtacttgagcggtgtccagagcgtggccagttctcgtctatctggctgcctttagggagcggtgcctagcgttggccaatagttggctgtcgaaagtgccggcccccgcgccggcgcctgcagcagccgggtgggaaggctcaagatggcgtgcttgttggagaccccaatccgcatgagcgtcctttcgtttttttaaagaaaaagacgactttcacctttcactatgttgctcttgaaccaggaccaggaatgaaagttactgggagataacttcgaaggattttgcaacaaattcgagctgtccgactctgagaatggaagtaacagctagcagtcgccactatgttgacaggctatttgaccctgatccccagaaagttctacaaggtgtcatagacatgaaaaatgctgtaattggaaacaacaagcagaaagccaatctcattgttttaggagctgttccaagattgttgtacttgcttcagcaagaaacctcaagcacagagctgaaaactgaatgtgcagtggtgttgggaagtcttgctatgggtactgaaaacaatgtcaagtctctactggactgccatattatccctgccttattgcaaggactactgtccccagacctgaagtttattgaagcttgcctccgatgcctgcgtaccatcttcaccagtcctgtcactccagaggagctactgtatacagatgccacagtgataccacacctcatggcactgcttagcaggtcccgctatacccaggagtacatctgtcagatcttctcacactgctgtaaagggccagatcatcaaacaattttatttaaccacggtgcagttcagaatattgctcacctactaacctcactgtcctacaaagttcgaatgcaagcactgaaatgtttctcagttttagcttttgaaaacccccaggtatcgatgaccctggtaaatgttttggttgatggagaattgttaccacagatttttgtgaagatgttacagagggataagcctattgagatgcagctcacatcagcaaaatgtttaacttacatgtgtagagctggagcaattcggacagatgataactgtattgtattaaagacattaccttgtttggttcgaatgtgcagtaaggagagattactagaggagagagttgaaggagctgagacacttgcctatctgattgaaccagatgttgagctacagagaatcgctagcataactgatcacctcattgccatgcttgctgattatttcaagtatcccagctcagtgagtgccatcactgatattaaaaggcttgatcatgatttaaaacatgctcacgaactccgccaggctgcattcaagctctatgcctctcttggagcaaatgatgaagacatccggaagaagatcattgagactgaaaatatgatggaccgaattgtgactggcttgtctgagtctagtgtcaaggtgcggttagctgccgtcagatgtttgcacagtttatccagatctgtgcagcagcttcgaaccagtttccaggatcatgctgtttggaaacctttaatgaaggttttacaaaatgcaccagatgaaatcctagtggtagcatcttccatgctgtgtaatcttcttcttgaattttctccaagcaaagagccaattttggaatcaggagccgtagagctactttgtggattaactcagagtgaaaatcctgctttacgagtgaatggaatttgggctttaatgaatatggcatttcaggctgaacaaaaaataaaagcagatattttacgaagcttgagtactgaacagctattccggttattatcagattcagatttgaatgtgctgatgaagacattgggacttcttagaaatctcctctccactcgtcctcatatagataaaataatgagtactcatggaaagcaaattatgcaagccgtcactcttattctagaaggggaacataacattgaggtcaaagagcagacactgtgcatcttagccaacatagcggatgggacaacagcaaaagatcttattatgaccaatgatgatatcctacagaaaatcaagtattacatgggccattcacatgttaaactgcagcttgcagccatgttttgtatatcaaacctcatatggaatgaagaggaaggttcacaagaacgccaggataaattacgagacatgggcatcgtagatattctacacaaactgagtcagtcaccagattcaaacctttgtgacaaggcaaagatggcactgcagcagtacctggcatgatgggagtgcccctgggcacctgcgagcatcccacctccttgtttaaggaagtacaggaaccagcctcatttgattccttctatttgcacaagtcaccttggactgcagggagctgttttgcaaaagcagtttagtaggcttagatctcaaattcatcttgagaacatttttttgaggtagtaatttcctcagaagactcttgtgttttgttttggtttttttttctgagctactcggactctttattagaacaatcaatcattttcctttggacctacaatttttgcctatgctgcagccactttgtgagtgagaatgaatatgtctgtgtgaacacacaggcatgcgtgtgtatgtgcacgtacatgggccagaatgaatggatgtgtgtgtgtgagggatacctcagatttttcttttcttattttgtgtgaaaatctcttttctacagattttccagggtttaagcattgcttgctgtataaaaaactttactgaattatatacagtttgaatgaaatgttattttaaaaacaaaacaattgttaagtgttccataaaggttatgttgaattttggtcagatgaatatttgtaagtaaaaaatatatgcatttctgaacctcaacttacatagattttctttatataaaaaaaaagaaaaaaaaagaaaaagttggctatagttggcctgattaacaggcactatacatggtgctgtgcaaaatagtaagctagcatcttactgccgtcaatattagcaggtacagagccttttttcatcctaattcagtaagttctcaggcttccaagtcaaatggagaagtaaagtgaggcaacagattcaccataggctttttgaagcatcaaagggaaatataactactgatagtgaaagcccagccatgacccagatgggcttacccttgacaggaactggggaccaagagcctcccaattgccctaactcctgtcattggtattagcaatatctggccagatttagaaccagtcatggaaacttgtgctcaaactaaaagtaggtcatcacttcccagaaacagaataccttgtgcttcctgaaacagcatatatcactgtgaaactaaagaatattctacagacacccctgtagaaagaaacaaagaacaggatagtttagaaagctttctgttagctgtattcagcaaatttcatactagttgctcaggactgctagttggtatgcttttgtaaaacgagattgaaatttaataaaagatgcaactaaaatctttcctgcatgaagctaaaagcactcaagttgagagaggggcaagggaatctccccaggatgactgaagatgacttctttttacagcaagtactgttagcctttctgcaccccttagcttggcccctgctccaacttctgggtcagcagcaaggtgaactcaacagaagttgctcttgactgtttgaaggtagaagcagcctaccttttctctttgctaaaagaaggtcaaaggcttcgcaaccaggatgcaaggtctgcggtccagaagcttgcggtgagtgtgtgccactgatggagctccaagcccacccaccagccactcctgatggggttgctcacactgcagctgccctatcaccaccctgcacgttccttggaagatttaaatgtttggttgcaaatgaatgttttaaaaatgtatttaatgcaatttttcctgctctcaacatgaccacccaagattcaaacacagagacttccaagttactattttttcagaacatcaccgattttaaaatctgtcacaacaggacttggttttgtgcagatatcagagtgctaatgtgagaaacccagttaaaagaaaacttagtttattgggaagaaagcctcaggcccactcgtttctagaactgtgaaaatatccttggttggcatttttaacacaaaacactatagtgttggtattaaatagtactaggtaaatataaagaaaccaataatgaattgctgagacaatcttgaacccaaatagcattagaaagctgaaggcccaatgaaataacactttcacacttaaactctgtggataaattttgcctgtgggtataaacagatggtcaaattaaaaatgctttactataattaacttttctgatttgaatgaagggaaatgtatttattgaaacaaagctgtttgctgctttatgcaggtgcagtgttcagtcagcaaggaagtgggaagagtggacatggtattgtgtctacacccaagttcttaactaagcttctcgctctaatactgcattctgtttctccttttgtgccctgattgtaatccaaaatttatgaactagaaaagaatgtccaatttaataagttgcatttttttttctttaagcactttattcagaacaatacatgttcttctggtagtgtttggataatatgattttaacacatgctaataaaagccaagaaaaatcatggcaacttctaaaaaaagaaaa

SEQ ID NO: 308511 - DNA, 4768 bp, Homo sapiens
agcggcgcttccacctctaacccaggctcagagtagctgctgtttctgagagaacgattcgtaggacagcccctgacgccattcccttttgcccttctttctgcgggcctttccggtacttgagcggtgtccagagcgtggccagttctcgtctatctggctgcctttagggagcggtgcctagcgttggccaatagttggctgtcgaaagtgccggcccccgcgccggcgcctgcagcagccgggtgggaaggctcaagatggcgtgcttgttggagaccccaatccgcatgagcgtcctttcggaccaggaatgaaagttactgggagataacttcgaaggattttgcaacaaattcgagctgtccgactctgagaatggaagtaacagctagcagtcgccactatgttgacaggctatttgaccctgatccccagaaagttctacaaggtgtcatagacatgaaaaatgctgtaattggaaacaacaagcagaaagccaatctcattgttttaggagctgttccaagattgttgtacttgcttcagcaagaaacctcaagcacagagctgaaaactgaatgtgcagtggtgttgggaagtcttgctatgggtactgaaaacaatgtcaagtctctactggactgccatattatccctgccttattgcaaggactactgtccccagacctgaagtttattgaagcttgcctccgatgcctgcgtaccatcttcaccagtcctgtcactccagaggagctactgtatacagatgccacagtgataccacacctcatggcactgcttagcaggtcccgctatacccaggagtacatctgtcagatcttctcacactgctgtaaagggccagatcatcaaacaattttatttaaccacggtgcagttcagaatattgctcacctactaacctcactgtcctacaaagttcgaatgcaagcactgaaatgtttctcagttttagcttttgaaaacccccaggtatcgatgaccctggtaaatgttttggttgatggagaattgttaccacagatttttgtgaagatgttacagagggataagcctattgagatgcagctcacatcagcaaaatgtttaacttacatgtgtagagctggagcaattcggacagatgataactgtattgtattaaagacattaccttgtttggttcgaatgtgcagtaaggagagattactagaggagagagttgaaggagctgagacacttgcctatctgattgaaccagatgttgagctacagagaatcgctagcataactgatcacctcattgccatgcttgctgattatttcaagtatcccagctcagtgagtgccatcactgatattaaaaggcttgatcatgatttaaaacatgctcacgaactccgccaggctgcattcaagctctatgcctctcttggagcaaatgatgaagacatccggaagaagatcattgagactgaaaatatgatggaccgaattgtgactggcttgtctgagtctagtgtcaaggtgcggttagctgccgtcagatgtttgcacagtttatccagatctgtgcagcagcttcgaaccagtttccaggatcatgctgtttggaaacctttaatgaaggttttacaaaatgcaccagatgaaatcctagtggtagcatcttccatgctgtgtaatcttcttcttgaattttctccaagcaaagagccaattttggaatcaggagccgtagagctactttgtggattaactcagagtgaaaatcctgctttacgagtgaatggaatttgggctttaatgaatatggcatttcaggctgaacaaaaaataaaagcagatattttacgaagcttgagtactgaacagctattccggttattatcagattcagatttgaatgtgctgatgaagacattgggacttcttagaaatctcctctccactcgtcctcatatagataaaataatgagtactcatggaaagcaaattatgcaagccgtcactcttattctagaaggggaacataacattgaggtcaaagagcagacactgtgcatcttagccaacatagcggatgggacaacagcaaaagatcttattatgaccaatgatgatatcctacagaaaatcaagtattacatgggccattcacatgttaaactgcagcttgcagccatgttttgtatatcaaacctcatatggaatgaagaggaagggcaaagatggcactgcagcagtacctggcatgatgggagtgcccctgggcacctgcgagcatcccacctccttgtttaaggaagtacaggaaccagcctcatttgattccttctatttgcacaagtcaccttggactgcagggagctgttttgcaaaagcagtttagtaggcttagatctcaaattcatcttgagaacatttttttgaggtagtaatttcctcagaagactcttgtgttttgttttggtttttttttctgagctactcggactctttattagaacaatcaatcattttcctttggacctacaatttttgcctatgctgcagccactttgtgagtgagaatgaatatgtctgtgtgaacacacaggcatgcgtgtgtatgtgcacgtacatgggccagaatgaatggatgtgtgtgtgtgagggatacctcagatttttcttttcttattttgtgtgaaaatctcttttctacagattttccagggtttaagcattgcttgctgtataaaaaactttactgaattatatacagtttgaatgaaatgttattttaaaaacaaaacaattgttaagtgttccataaaggttatgttgaattttggtcagatgaatatttgtaagtaaaaaatatatgcatttctgaacctcaacttacatagattttctttatataaaaaaaaagaaaaaaaaagaaaaagttggctatagttggcctgattaacaggcactatacatggtgctgtgcaaaatagtaagctagcatcttactgccgtcaatattagcaggtacagagccttttttcatcctaattcagtaagttctcaggcttccaagtcaaatggagaagtaaagtgaggcaacagattcaccataggctttttgaagcatcaaagggaaatataactactgatagtgaaagcccagccatgacccagatgggcttacccttgacaggaactggggaccaagagcctcccaattgccctaactcctgtcattggtattagcaatatctggccagatttagaaccagtcatggaaacttgtgctcaaactaaaagtaggtcatcacttcccagaaacagaataccttgtgcttcctgaaacagcatatatcactgtgaaactaaagaatattctacagacacccctgtagaaagaaacaaagaacaggatagtttagaaagctttctgttagctgtattcagcaaatttcatactagttgctcaggactgctagttggtatgcttttgtaaaacgagattgaaatttaataaaagatgcaactaaaatctttcctgcatgaagctaaaagcactcaagttgagagaggggcaagggaatctccccaggatgactgaagatgacttctttttacagcaagtactgttagcctttctgcaccccttagcttggcccctgctccaacttctgggtcagcagcaaggtgaactcaacagaagttgctcttgactgtttgaaggtagaagcagcctaccttttctctttgctaaaagaaggtcaaaggcttcgcaaccaggatgcaaggtctgcggtccagaagcttgcggtgagtgtgtgccactgatggagctccaagcccacccaccagccactcctgatggggttgctcacactgcagctgccctatcaccaccctgcacgttccttggaagatttaaatgtttggttgcaaatgaatgttttaaaaatgtatttaatgcaatttttcctgctctcaacatgaccacccaagattcaaacacagagacttccaagttactattttttcagaacatcaccgattttaaaatctgtcacaacaggacttggttttgtgcagatatcagagtgctaatgtgagaaacccagttaaaagaaaacttagtttattgggaagaaagcctcaggcccactcgtttctagaactgtgaaaatatccttggttggcatttttaacacaaaacactatagtgttggtattaaatagtactaggtaaatataaagaaaccaataatgaattgctgagacaatcttgaacccaaatagcattagaaagctgaaggcccaatgaaataacactttcacacttaaactctgtggataaattttgcctgtgggtataaacagatggtcaaattaaaaatgctttactataattaacttttctgatttgaatgaagggaaatgtatttattgaaacaaagctgtttgctgctttatgcaggtgcagtgttcagtcagcaaggaagtgggaagagtggacatggtattgtgtctacacccaagttcttaactaagcttctcgctctaatactgcattctgtttctccttttgtgccctgattgtaatccaaaatttatgaactagaaaagaatgtccaatttaataagttgcatttttttttctttaagcactttattcagaacaatacatgttcttctggtagtgtttggataatatgattttaacacatgctaataaaagccaagaaaaatcatggcaacttctaaaaaaagaaaa

SEQ ID NO: 308512 - DNA, 4839 bp, Homo sapiens
agcggcgcttccacctctaacccaggctcagagtagctgctgtttctgagagaacgattcgtaggacagcccctgacgccattcccttttgcccttctttctgcgggcctttccggtacttgagcggtgtccagagcgtggccagttctcgtctatctggctgcctttagggagcggtgcctagcgttggccaatagttggctgtcgaaagtgccggcccccgcgccggcgcctgcagcagccgggtgggaaggctcaagatggcgtgcttgttggagaccccaatccgcatgagcgtcctttcgtttttttaaagaaaaagacgactttcacctttcactatgttgctcttgaaccaggaccaggaatgaaagttactgggagataacttcgaaggattttgcaacaaattcgagctgtccgactctgagaatgagacatgaaaaatgctgtaattggaaacaacaagcagaaagccaatctcattgttttaggagctgttccaagattgttgtacttgcttcagcaagaaacctcaagcacagagctgaaaactgaatgtgcagtggtgttgggaagtcttgctatgggtactgaaaacaatgtcaagtctctactggactgccatattatccctgccttattgcaaggactactgtccccagacctgaagtttattgaagcttgcctccgatgcctgcgtaccatcttcaccagtcctgtcactccagaggagctactgtatacagatgccacagtgataccacacctcatggcactgcttagcaggtcccgctatacccaggagtacatctgtcagatcttctcacactgctgtaaagggccagatcatcaaacaattttatttaaccacggtgcagttcagaatattgctcacctactaacctcactgtcctacaaagttcgaatgcaagcactgaaatgtttctcagttttagcttttgaaaacccccaggtatcgatgaccctggtaaatgttttggttgatggagaattgttaccacagatttttgtgaagatgttacagagggataagcctattgagatgcagctcacatcagcaaaatgtttaacttacatgtgtagagctggagcaattcggacagatgataactgtattgtattaaagacattaccttgtttggttcgaatgtgcagtaaggagagattactagaggagagagttgaaggagctgagacacttgcctatctgattgaaccagatgttgagctacagagaatcgctagcataactgatcacctcattgccatgcttgctgattatttcaagtatcccagctcagtgagtgccatcactgatattaaaaggcttgatcatgatttaaaacatgctcacgaactccgccaggctgcattcaagctctatgcctctcttggagcaaatgatgaagacatccggaagaagatcattgagactgaaaatatgatggaccgaattgtgactggcttgtctgagtctagtgtcaaggtgcggttagctgccgtcagatgtttgcacagtttatccagatctgtgcagcagcttcgaaccagtttccaggatcatgctgtttggaaacctttaatgaaggttttacaaaatgcaccagatgaaatcctagtggtagcatcttccatgctgtgtaatcttcttcttgaattttctccaagcaaagagccaattttggaatcaggagccgtagagctactttgtggattaactcagagtgaaaatcctgctttacgagtgaatggaatttgggctttaatgaatatggcatttcaggctgaacaaaaaataaaagcagatattttacgaagcttgagtactgaacagctattccggttattatcagattcagatttgaatgtgctgatgaagacattgggacttcttagaaatctcctctccactcgtcctcatatagataaaataatgagtactcatggaaagcaaattatgcaagccgtcactcttattctagaaggggaacataacattgaggtcaaagagcagacactgtgcatcttagccaacatagcggatgggacaacagcaaaagatcttattatgaccaatgatgatatcctacagaaaatcaagtattacatgggccattcacatgttaaactgcagcttgcagccatgttttgtatatcaaacctcatatggaatgaagaggaaggttcacaagaacgccaggataaattacgagacatgggcatcgtagatattctacacaaactgagtcagtcaccagattcaaacctttgtgacaaggcaaagatggcactgcagcagtacctggcatgatgggagtgcccctgggcacctgcgagcatcccacctccttgtttaaggaagtacaggaaccagcctcatttgattccttctatttgcacaagtcaccttggactgcagggagctgttttgcaaaagcagtttagtaggcttagatctcaaattcatcttgagaacatttttttgaggtagtaatttcctcagaagactcttgtgttttgttttggtttttttttctgagctactcggactctttattagaacaatcaatcattttcctttggacctacaatttttgcctatgctgcagccactttgtgagtgagaatgaatatgtctgtgtgaacacacaggcatgcgtgtgtatgtgcacgtacatgggccagaatgaatggatgtgtgtgtgtgagggatacctcagatttttcttttcttattttgtgtgaaaatctcttttctacagattttccagggtttaagcattgcttgctgtataaaaaactttactgaattatatacagtttgaatgaaatgttattttaaaaacaaaacaattgttaagtgttccataaaggttatgttgaattttggtcagatgaatatttgtaagtaaaaaatatatgcatttctgaacctcaacttacatagattttctttatataaaaaaaaagaaaaaaaaagaaaaagttggctatagttggcctgattaacaggcactatacatggtgctgtgcaaaatagtaagctagcatcttactgccgtcaatattagcaggtacagagccttttttcatcctaattcagtaagttctcaggcttccaagtcaaatggagaagtaaagtgaggcaacagattcaccataggctttttgaagcatcaaagggaaatataactactgatagtgaaagcccagccatgacccagatgggcttacccttgacaggaactggggaccaagagcctcccaattgccctaactcctgtcattggtattagcaatatctggccagatttagaaccagtcatggaaacttgtgctcaaactaaaagtaggtcatcacttcccagaaacagaataccttgtgcttcctgaaacagcatatatcactgtgaaactaaagaatattctacagacacccctgtagaaagaaacaaagaacaggatagtttagaaagctttctgttagctgtattcagcaaatttcatactagttgctcaggactgctagttggtatgcttttgtaaaacgagattgaaatttaataaaagatgcaactaaaatctttcctgcatgaagctaaaagcactcaagttgagagaggggcaagggaatctccccaggatgactgaagatgacttctttttacagcaagtactgttagcctttctgcaccccttagcttggcccctgctccaacttctgggtcagcagcaaggtgaactcaacagaagttgctcttgactgtttgaaggtagaagcagcctaccttttctctttgctaaaagaaggtcaaaggcttcgcaaccaggatgcaaggtctgcggtccagaagcttgcggtgagtgtgtgccactgatggagctccaagcccacccaccagccactcctgatggggttgctcacactgcagctgccctatcaccaccctgcacgttccttggaagatttaaatgtttggttgcaaatgaatgttttaaaaatgtatttaatgcaatttttcctgctctcaacatgaccacccaagattcaaacacagagacttccaagttactattttttcagaacatcaccgattttaaaatctgtcacaacaggacttggttttgtgcagatatcagagtgctaatgtgagaaacccagttaaaagaaaacttagtttattgggaagaaagcctcaggcccactcgtttctagaactgtgaaaatatccttggttggcatttttaacacaaaacactatagtgttggtattaaatagtactaggtaaatataaagaaaccaataatgaattgctgagacaatcttgaacccaaatagcattagaaagctgaaggcccaatgaaataacactttcacacttaaactctgtggataaattttgcctgtgggtataaacagatggtcaaattaaaaatgctttactataattaacttttctgatttgaatgaagggaaatgtatttattgaaacaaagctgtttgctgctttatgcaggtgcagtgttcagtcagcaaggaagtgggaagagtggacatggtattgtgtctacacccaagttcttaactaagcttctcgctctaatactgcattctgtttctccttttgtgccctgattgtaatccaaaatttatgaactagaaaagaatgtccaatttaataagttgcatttttttttctttaagcactttattcagaacaatacatgttcttctggtagtgtttggataatatgattttaacacatgctaataaaagccaagaaaaatcatggcaacttctaaaaaaagaaaa

SEQ ID NO: 308513 - DNA, 4128 bp, Homo sapiens
  misc_feature (1)..(1): n is a, c, g, or t
ncttgtgcaacgactctcttaatctccaccgctacaggatgccacagtgataccacacctcatggcactgcttagcaggtcccgctatacccaggagtacatctgtcagatcttctcacactgctgtaaagggccagatcatcaaacaattttatttaaccacggtgcagttcagaatattgctcacctactaacctcactgtcctacaaagttcgaatgcaagcactgaaatgtttctcagttttagcttttgaaaacccccaggtatcgatgaccctggtaaatgttttggttgatggagaattgttaccacagatttttgtgaagatgttacagagggataagcctattgagatgcagctcacatcagcaaaatgtttaacttacatgtgtagagctggagcaattcggacagatgataactgtattgtattaaagacattaccttgtttggttcgaatgtgcagtaaggagagattactagaggagagagttgaaggagctgagacacttgcctatctgattgaaccagatgttgagctacagagaatcgctagcataactgatcacctcattgccatgcttgctgattatttcaagtatcccagctcagtgagtgccatcactgatattaaaaggcttgatcatgatttaaaacatgctcacgaactccgccaggctgcattcaagctctatgcctctcttggagcaaatgatgaagacatccggaagaagatcattgagactgaaaatatgatggaccgaattgtgactggcttgtctgagtctagtgtcaaggtgcggttagctgccgtcagatgtttgcacagtttatccagatctgtgcagcagcttcgaaccagtttccaggatcatgctgtttggaaacctttaatgaaggttttacaaaatgcaccagatgaaatcctagtggtagcatcttccatgctgtgtaatcttcttcttgaattttctccaagcaaagagccaattttggaatcaggagccgtagagctactttgtggattaactcagagtgaaaatcctgctttacgagtgaatggaatttgggctttaatgaatatggcatttcaggctgaacaaaaaataaaagcagatattttacgaagcttgagtactgaacagctattccggttattatcagattcagatttgaatgtgctgatgaagacattgggacttcttagaaatctcctctccactcgtcctcatatagataaaataatgagtactcatggaaagcaaattatgcaagccgtcactcttattctagaaggggaacataacattgaggtcaaagagcagacactgtgcatcttagccaacatagcggatgggacaacagcaaaagatcttattatgaccaatgatgatatcctacagaaaatcaagtattacatgggccattcacatgttaaactgcagcttgcagccatgttttgtatatcaaacctcatatggaatgaagaggaaggttcacaagaacgccaggataaattacgagacatgggcatcgtagatattctacacaaactgagtcagtcaccagattcaaacctttgtgacaaggcaaagatggcactgcagcagtacctggcatgatgggagtgcccctgggcacctgcgagcatcccacctccttgtttaaggaagtacaggaaccagcctcatttgattccttctatttgcacaagtcaccttggactgcagggagctgttttgcaaaagcagtttagtaggcttagatctcaaattcatcttgagaacatttttttgaggtagtaatttcctcagaagactcttgtgttttgttttggtttttttttctgagctactcggactctttattagaacaatcaatcattttcctttggacctacaatttttgcctatgctgcagccactttgtgagtgagaatgaatatgtctgtgtgaacacacaggcatgcgtgtgtatgtgcacgtacatgggccagaatgaatggatgtgtgtgtgtgagggatacctcagatttttcttttcttattttgtgtgaaaatctcttttctacagattttccagggtttaagcattgcttgctgtataaaaaactttactgaattatatacagtttgaatgaaatgttattttaaaaacaaaacaattgttaagtgttccataaaggttatgttgaattttggtcagatgaatatttgtaagtaaaaaatatatgcatttctgaacctcaacttacatagattttctttatataaaaaaaaagaaaaaaaaagaaaaagttggctatagttggcctgattaacaggcactatacatggtgctgtgcaaaatagtaagctagcatcttactgccgtcaatattagcaggtacagagccttttttcatcctaattcagtaagttctcaggcttccaagtcaaatggagaagtaaagtgaggcaacagattcaccataggctttttgaagcatcaaagggaaatataactactgatagtgaaagcccagccatgacccagatgggcttacccttgacaggaactggggaccaagagcctcccaattgccctaactcctgtcattggtattagcaatatctggccagatttagaaccagtcatggaaacttgtgctcaaactaaaagtaggtcatcacttcccagaaacagaataccttgtgcttcctgaaacagcatatatcactgtgaaactaaagaatattctacagacacccctgtagaaagaaacaaagaacaggatagtttagaaagctttctgttagctgtattcagcaaatttcatactagttgctcaggactgctagttggtatgcttttgtaaaacgagattgaaatttaataaaagatgcaactaaaatctttcctgcatgaagctaaaagcactcaagttgagagaggggcaagggaatctccccaggatgactgaagatgacttctttttacagcaagtactgttagcctttctgcaccccttagcttggcccctgctccaacttctgggtcagcagcaaggtgaactcaacagaagttgctcttgactgtttgaaggtagaagcagcctaccttttctctttgctaaaagaaggtcaaaggcttcgcaaccaggatgcaaggtctgcggtccagaagcttgcggtgagtgtgtgccactgatggagctccaagcccacccaccagccactcctgatggggttgctcacactgcagctgccctatcaccaccctgcacgttccttggaagatttaaatgtttggttgcaaatgaatgttttaaaaatgtatttaatgcaatttttcctgctctcaacatgaccacccaagattcaaacacagagacttccaagttactattttttcagaacatcaccgattttaaaatctgtcacaacaggacttggttttgtgcagatatcagagtgctaatgtgagaaacccagttaaaagaaaacttagtttattgggaagaaagcctcaggcccactcgtttctagaactgtgaaaatatccttggttggcatttttaacacaaaacactatagtgttggtattaaatagtactaggtaaatataaagaaaccaataatgaattgctgagacaatcttgaacccaaatagcattagaaagctgaaggcccaatgaaataacactttcacacttaaactctgtggataaattttgcctgtgggtataaacagatggtcaaattaaaaatgctttactataattaacttttctgatttgaatgaagggaaatgtatttattgaaacaaagctgtttgctgctttatgcaggtgcagtgttcagtcagcaaggaagtgggaagagtggacatggtattgtgtctacacccaagttcttaactaagcttctcgctctaatactgcattctgtttctccttttgtgccctgattgtaatccaaaatttatgaactagaaaagaatgtccaatttaataagttgcatttttttttctttaagcactttattcagaacaatacatgttcttctggtagtgtttggataatatgattttaacacatgctaataaaagccaagaaaaatcatggcaacttctaaaaaaagaaaa

SEQ ID NO: 308514 - DNA, 4693 bp, Homo sapiens
agcggcgcttccacctctaacccaggctcagagtagctgctgtttctgagagaacgattcgtaggacagcccctgacgccattcccttttgcccttctttctgcgggcctttccggtacttgagcggtgtccagagcgtggccagttctcgtctatctggctgcctttagggagcggtgcctagcgttggccaatagttggctgtcgaaagtgccggcccccgcgccggcgcctgcagcagccgggtgggaaggctcaagatggcgtgcttgttggagaccccaatccgcatgagcgtcctttcggaagtaacagctagcagtcgccactatgttgacaggctatttgaccctgatccccagaaagttctacaaggtgtcatagacatgaaaaatgctgtaattggaaacaacaagcagaaagccaatctcattgttttaggagctgttccaagattgttgtacttgcttcagcaagaaacctcaagcacagagctgaaaactgaatgtgcagtggtgttgggaagtcttgctatgggtactgaaaacaatgtcaagtctctactggactgccatattatccctgccttattgcaaggactactgtccccagacctgaagtttattgaagcttgcctccgatgcctgcgtaccatcttcaccagtcctgtcactccagaggagctactgtatacagggccagatcatcaaacaattttatttaaccacggtgcagttcagaatattgctcacctactaacctcactgtcctacaaagttcgaatgcaagcactgaaatgtttctcagttttagcttttgaaaacccccaggtatcgatgaccctggtaaatgttttggttgatggagaattgttaccacagatttttgtgaagatgttacagagggataagcctattgagatgcagctcacatcagcaaaatgtttaacttacatgtgtagagctggagcaattcggacagatgataactgtattgtattaaagacattaccttgtttggttcgaatgtgcagtaaggagagattactagaggagagagttgaaggagctgagacacttgcctatctgattgaaccagatgttgagctacagagaatcgctagcataactgatcacctcattgccatgcttgctgattatttcaagtatcccagctcagtgagtgccatcactgatattaaaaggcttgatcatgatttaaaacatgctcacgaactccgccaggctgcattcaagctctatgcctctcttggagcaaatgatgaagacatccggaagaagatcattgagactgaaaatatgatggaccgaattgtgactggcttgtctgagtctagtgtcaaggtgcggttagctgccgtcagatgtttgcacagtttatccagatctgtgcagcagcttcgaaccagtttccaggatcatgctgtttggaaacctttaatgaaggttttacaaaatgcaccagatgaaatcctagtggtagcatcttccatgctgtgtaatcttcttcttgaattttctccaagcaaagagccaattttggaatcaggagccgtagagctactttgtggattaactcagagtgaaaatcctgctttacgagtgaatggaatttgggctttaatgaatatggcatttcaggctgaacaaaaaataaaagcagatattttacgaagcttgagtactgaacagctattccggttattatcagattcagatttgaatgtgctgatgaagacattgggacttcttagaaatctcctctccactcgtcctcatatagataaaataatgagtactcatggaaagcaaattatgcaagccgtcactcttattctagaaggggaacataacattgaggtcaaagagcagacactgtgcatcttagccaacatagcggatgggacaacagcaaaagatcttattatgaccaatgatgatatcctacagaaaatcaagtattacatgggccattcacatgttaaactgcagcttgcagccatgttttgtatatcaaacctcatatggaatgaagaggaaggttcacaagaacgccaggataaattacgagacatgggcatcgtagatattctacacaaactgagtcagtcaccagattcaaacctttgtgacaaggcaaagatggcactgcagcagtacctggcatgatgggagtgcccctgggcacctgcgagcatcccacctccttgtttaaggaagtacaggaaccagcctcatttgattccttctatttgcacaagtcaccttggactgcagggagctgttttgcaaaagcagtttagtaggcttagatctcaaattcatcttgagaacatttttttgaggtagtaatttcctcagaagactcttgtgttttgttttggtttttttttctgagctactcggactctttattagaacaatcaatcattttcctttggacctacaatttttgcctatgctgcagccactttgtgagtgagaatgaatatgtctgtgtgaacacacaggcatgcgtgtgtatgtgcacgtacatgggccagaatgaatggatgtgtgtgtgtgagggatacctcagatttttcttttcttattttgtgtgaaaatctcttttctacagattttccagggtttaagcattgcttgctgtataaaaaactttactgaattatatacagtttgaatgaaatgttattttaaaaacaaaacaattgttaagtgttccataaaggttatgttgaattttggtcagatgaatatttgtaagtaaaaaatatatgcatttctgaacctcaacttacatagattttctttatataaaaaaaaagaaaaaaaaagaaaaagttggctatagttggcctgattaacaggcactatacatggtgctgtgcaaaatagtaagctagcatcttactgccgtcaatattagcaggtacagagccttttttcatcctaattcagtaagttctcaggcttccaagtcaaatggagaagtaaagtgaggcaacagattcaccataggctttttgaagcatcaaagggaaatataactactgatagtgaaagcccagccatgacccagatgggcttacccttgacaggaactggggaccaagagcctcccaattgccctaactcctgtcattggtattagcaatatctggccagatttagaaccagtcatggaaacttgtgctcaaactaaaagtaggtcatcacttcccagaaacagaataccttgtgcttcctgaaacagcatatatcactgtgaaactaaagaatattctacagacacccctgtagaaagaaacaaagaacaggatagtttagaaagctttctgttagctgtattcagcaaatttcatactagttgctcaggactgctagttggtatgcttttgtaaaacgagattgaaatttaataaaagatgcaactaaaatctttcctgcatgaagctaaaagcactcaagttgagagaggggcaagggaatctccccaggatgactgaagatgacttctttttacagcaagtactgttagcctttctgcaccccttagcttggcccctgctccaacttctgggtcagcagcaaggtgaactcaacagaagttgctcttgactgtttgaaggtagaagcagcctaccttttctctttgctaaaagaaggtcaaaggcttcgcaaccaggatgcaaggtctgcggtccagaagcttgcggtgagtgtgtgccactgatggagctccaagcccacccaccagccactcctgatggggttgctcacactgcagctgccctatcaccaccctgcacgttccttggaagatttaaatgtttggttgcaaatgaatgttttaaaaatgtatttaatgcaatttttcctgctctcaacatgaccacccaagattcaaacacagagacttccaagttactattttttcagaacatcaccgattttaaaatctgtcacaacaggacttggttttgtgcagatatcagagtgctaatgtgagaaacccagttaaaagaaaacttagtttattgggaagaaagcctcaggcccactcgtttctagaactgtgaaaatatccttggttggcatttttaacacaaaacactatagtgttggtattaaatagtactaggtaaatataaagaaaccaataatgaattgctgagacaatcttgaacccaaatagcattagaaagctgaaggcccaatgaaataacactttcacacttaaactctgtggataaattttgcctgtgggtataaacagatggtcaaattaaaaatgctttactataattaacttttctgatttgaatgaagggaaatgtatttattgaaacaaagctgtttgctgctttatgcaggtgcagtgttcagtcagcaaggaagtgggaagagtggacatggtattgtgtctacacccaagttcttaactaagcttctcgctctaatactgcattctgtttctccttttgtgccctgattgtaatccaaaatttatgaactagaaaagaatgtccaatttaataagttgcatttttttttctttaagcactttattcagaacaatacatgttcttctggtagtgtttggataatatgattttaacacatgctaataaaagccaagaaaaatcatggcaacttctaaaaaaagaaaa

SEQ ID NO: 308515 - DNA, 2907 bp, Homo sapiens
agcggcgcttccacctctaacccaggctcagagtagctgctgtttctgagagaacgattcgtaggacagcccctgacgccattcccttttgcccttctttctgcgggcctttccggtacttgagcggtgtccagagcgtggccagttctcgtctatctggctgcctttagggagcggtgcctagcgttggccaatagttggctgtcgaaagtgccggcccccgcgccggcgcctgcagcagccgggtgggaaggctcaagatggcgtgcttgttggagaccccaatccgcatgagcgtcctttcggaccaggaatgaaagttactgggagataacttcgaaggattttgcaacaaattcgagctgtccgactctgagaatgagacatgaaaaatgctgtaattggaaacaacaagcagaaagccaatctcattgttttaggagctgttccaagattgttgtacttgcttcagcaagaaacctcaagcacagagctgaaaactgaatgtgcagtggtgttgggaagtcttgctatgggtactgaaaacaatgtcaagtctctactggactgccatattatccctgccttattgcaaggactactgtccccagacctgaagtttattgaagcttgcctccgatgcctgcgtaccatcttcaccagtcctgtcactccagaggagctactgtatacagatgccacagtgataccacacctcatggcactgcttagcaggtcccgctatacccaggagtacatctgtcagatcttctcacactgctgtaaagggccagatcatcaaacaattttatttaaccacggtgcagttcagaatattgctcacctactaacctcactgtcctacaaagttcgaatgcaagcactgaaatgtttctcagttttagcttttgaaaacccccaggtatcgatgaccctggtaaatgttttggttgatggagaattgttaccacagatttttgtgaagatgttacagagggataagcctattgagatgcagctcacatcagcaaaatgtttaacttacatgtgtagagctggagcaattcggacagatgataactgtattgtattaaagacattaccttgtttggttcgaatgtgcagtaaggagagattactagaggagagagttgaaggagctgagacacttgcctatctgattgaaccagatgttgagctacagagaatcgctagcataactgatcacctcattgccatgcttgctgattatttcaagtatcccagctcagtgagtgccatcactgatattaaaaggcttgatcatgatttaaaacatgctcacgaactccgccaggctgcattcaagctctatgcctctcttggagcaaatgatgaagacatccggaagaagatcattgagactgaaaatatgatggaccgaattgtgactggcttgtctgagtctagtgtcaaggtgcggttagctgccgtcagatgtttgcacagtttatccagatctgtgcagcagcttcgaaccagtttccaggatcatgctgtttggaaacctttaatgaaggttttacaaaatgcaccagatgaaatcctagtggtagcatcttccatgctgtgtaatcttcttcttgaattttctccaagcaaagagccaattttggaatcaggagccgtagagctactttgtggattaactcagagtgaaaatcctgctttacgagtgaatggaatttgggctttaatgaatatggcatttcaggctgaacaaaaaataaaagcagatattttacgaagcttgagtactgaacagctattccggttattatcagattcagatttgaatgtgctgatgaagacattgggacttcttagaaatctcctctccactcgtcctcatatagataaaataatgagtactcatggaaagcaaattatgcaagccgtcactcttattctagaaggggaacataacattgaggtcaaagagcagacactgtgcatcttagccaacatagcggatgggacaacagcaaaagatcttattatgaccaatgatgatatcctacagaaaatcaagtattacatgggccattcacatgttaaactgcagcttgcagccatgttttgtatatcaaacctcatatggaatgaagaggaaggttcacaagaacgccaggataaattacgagacatgggcatcgtagatattctacacaaactgagtcagtcaccagattcaaacctttgtgacaaggcaaagatggcactgcagcagtacctggcatgatgggagtgcccctgggcacctgcgagcatcccacctccttgtttaaggaagtacaggaaccagcctcatttgattccttctatttgcacaagtcaccttggactgcagggagctgttttgcaaaagcagtttagtaggcttagatctcaaattcatcttgagaacatttttttgaggtagtaatttcctcagaagactcttgtgttttgttttggtttttttttctgagctactcggactctttattagaacaatcaatcattttcctttggacctacaatttttgcctatgctgcagccactttgtgagtgagaatgaatatgtctgtgtgaacacacaggcatgcgtgtgtatgtgcacgtacatgggccagaatgaatggatgtgtgtgtgtgagggatacctcagatttttcttttcttattttgtgtgaaaatctcttttctacagattttccagggtttaagcattgcttgctgtataaaaaactttactgaattatatacagtttgaatgaaatgttattttaaaaacaaaacaattgttaagtgttccataaaggttatgttgaattttggtcagatgaatatttgtaagtaaaaaatatatgcatttctgaacctca

SEQ ID NO: 308516 - DNA, 2003 bp, Homo sapiens
  misc_feature (1953)..(1953): n is a, c, g, or t
agcggcgcttccacctctaacccaggctcagagtagctgctgtttctgagagaacgattcgtaggacagcccctgacgccattcccttttgcccttctttctgcgggcctttccggtacttgagcggtgtccagagcgtggccagttctcgtctatctggctgcctttagggagcggtgcctagcgttggccaatagttggctgtcgaaagtgccggcccccgcgccggcgcctgcagcagccgggtgggaaggctcaagatggcgtgcttgttggagaccccaatccgcatgagcgtcctttcggaccaggaatgaaagttactgggagataacttcgaaggattttgcaacaaattcgagctgtccgactctgagaatggaagtaacagctagcagtcgccactatgttgacaggctatttgaccctgatccccagaaagttctacaaggtgtcatagacatgaaaaatgctgtaattggaaacaacaagcagaaagccaatctcattgttttaggagctgttccaagattgttgtacttgcttcagcaagaaacctcaagcacagagctgaaaactgaatgtgcagtggtgttgggaagtcttgctatgggtactgaaaacaatgtcaagtctctactggactgccatattatccctgccttattgcaaggactactgtccccagacctgaagtttattgaagcttgcctccgatgcctgcgtaccatcttcaccagtcctgtcactccagaggagctactgtatacagatgccacagtgataccacacctcatggcactgcttagcaggtcccgctatacccaggagtacatctgtcagatcttctcacactgctgtaaagggccagatcatcaaacaattttatttaaccacggtgcagttcagaatattgctcacctactaacctcactgtcctacaaagttcgaatgcaagcactgaaatgtttctcagttttagcttttgaaaacccccaggtatcgatgaccctggtaaatgttttggttgatggagaattgttaccacagatttttgtgaagatgttacagagggataagcctattgagatgcagctcacatcagcaaaatgtttaacttacatgtgtagagctggagcaattcggacagatgataactgtattgtattaaagacattaccttgtttggttcgaatgtgcagtaaggagagattactagaggagagagttgaaggagctgagacacttgcctatctgattgaaccagatgttgagctacagagaatcgctagcataactgatcacctcattgccatgcttgctgattatttcaagtatcccagctcagtgagtgccatcactgatattaaaaggcttgatcatgatttaaaacatgctcacgaactccgccaggctgcattcaagctctatgcctctcttggagcaaatgatgaagacatccggaagaaggtgagtctgggagaggggcgtcccccagtcctgacagccagcaggcagggagtgacgtcaacctgaaagtcgtggtgaagagcactaacagtgactgtttgaatataataaagcagagtgactaaaggcataattgaagaatgaatgggacccggatttggggggttgtttgtttgtttttagaacatagagtggcatggccgtgctggaatgacaaataactggcgtgctttttttttgtgtcattaatatgaattattatgttgcacatttttgcatgtgttctgataaaaatcaattctagcactgtgaagcttcagacaccttgaaagtcctaacattagaattgtaaatgttatttatggaaataccttccaatgctattgagaaattcaaatctctattgtatattgttctttgatatgtggcttagttttatgttttgattttttttgctactgtgcaagtttaatgtgaataaangatcggccggccgcaatcctctgattatattaggtatttttaagaaataa

SEQ ID NO: 308517 - DNA, 2004 bp, Homo sapiens
agcggcgcttccacctctaacccaggctcagagtagctgctgtttctgagagaacgattcgtaggacagcccctgacgccattcccttttgcccttctttctgcgggcctttccggtacttgagcggtgtccagagcgtggccagttctcgtctatctggctgcctttagggagcggtgcctagcgttggccaatagttggctgtcgaaagtgccggcccccgcgccggcgcctgcagcagccgggtgggaaggctcaagatggcgtgcttgttggagaccccaatccgcatgagcgtcctttcggaccaggaatgaaagttactgggagataacttcgaaggattttgcaacaaattcgagctgtccgactctgagaatggaagtaacagctagcagtcgccactatgttgacaggctatttgaccctgatccccagaaagttctacaaggtgtcatagacatgaaaaatgctgtaattggaaacaacaagcagaaagccaatctcattgttttaggagctgttccaagattgttgtacttgcttcagcaagaaacctcaagcacagagctgaaaactgaatgtgcagtggtgttgggaagtcttgctatgggtactgaaaacaatgtcaagtctctactggactgccatattatccctgccttattgcaaggactactgtccccagacctgaagtttattgaagcttgcctccgatgcctgcgtaccatcttcaccagtcctgtcactccagaggagctactgtatacagatgccacagtgataccacacctcatggcactgcttagcaggtcccgctatacccaggagtacatctgtcagatcttctcacactgctgtaaagggccagatcatcaaacaattttatttaaccacggtgcagttcagaatattgctcacctactaacctcactgtcctacaaagttcgaatgcaagcactgaaatgtttctcagttttagcttttgaaaacccccaggtatcgatgaccctggtaaatgttttggttgatggagaattgttaccacagatttttgtgaagatgttacagagggataagcctattgagatgcagctcacatcagcaaaatgtttaacttacatgtgtagagctggagcaattcggacagatgataactgtattgtattaaagacattaccttgtttggttcgaatgtgcagtaaggagagattactagaggagagagttgaaggagctgagacacttgcctatctgattgaaccagatgttgagctacagagaatcgctagcataactgatcacctcattgccatgcttgctgattatttcaagtatcccagctcagtgagtgccatcactgatattaaaaggcttgatcatgatttaaaacatgctcacgaactccgccaggctgcattcaagctctatgcctctcttggagcaaatgatgaagacatccggaagaaggtgagtctgggagaggggcgtcccccagtcctgacagccagcaggcagggagtgacgtcaacctgaaagtcgtggtgaagagcactaacagtgactgtttgaatataataaagcagagtgactaaaggcataattgaagaatgaatgggacccggatttggggggttgtttgtttgtttttagaacatagagtggcatggccgtgctggaatgacaaataactggcgtgctttttttttgtgtcattaatatgaattattatgttgcacatttttgcatgtgttctgataaaaatcaattctagcactgtgaagcttcagacaccttgaaagtcctaacattagaattgtaaatgttatttatggaaataccttccaatgctattgagaaattcaaatctctattgtatattgttctttgatatgtggcttagttttatgttttgattttttttgctactgtgcaagtttaatgtgaataaaccggtatgcgacgaggcccccctcttttttcgttgtgggagactaaagagca

SEQ ID NO: 308518 - DNA, 2001 bp, Homo sapiens
agcggcgcttccacctctaacccaggctcagagtagctgctgtttctgagagaacgattcgtaggacagcccctgacgccattcccttttgcccttctttctgcgggcctttccggtacttgagcggtgtccagagcgtggccagttctcgtctatctggctgcctttagggagcggtgcctagcgttggccaatagttggctgtcgaaagtgccggcccccgcgccggcgcctgcagcagccgggtgggaaggctcaagatggcgtgcttgttggagaccccaatccgcatgagcgtcctttcggaccaggaatgaaagttactgggagataacttcgaaggattttgcaacaaattcgagctgtccgactctgagaatggaagtaacagctagcagtcgccactatgttgacaggctatttgaccctgatccccagaaagttctacaaggtgtcatagacatgaaaaatgctgtaattggaaacaacaagcagaaagccaatctcattgttttaggagctgttccaagattgttgtacttgcttcagcaagaaacctcaagcacagagctgaaaactgaatgtgcagtggtgttgggaagtcttgctatgggtactgaaaacaatgtcaagtctctactggactgccatattatccctgccttattgcaaggactactgtccccagacctgaagtttattgaagcttgcctccgatgcctgcgtaccatcttcaccagtcctgtcactccagaggagctactgtatacagatgccacagtgataccacacctcatggcactgcttagcaggtcccgctatacccaggagtacatctgtcagatcttctcacactgctgtaaagggccagatcatcaaacaattttatttaaccacggtgcagttcagaatattgctcacctactaacctcactgtcctacaaagttcgaatgcaagcactgaaatgtttctcagttttagcttttgaaaacccccaggtatcgatgaccctggtaaatgttttggttgatggagaattgttaccacagatttttgtgaagatgttacagagggataagcctattgagatgcagctcacatcagcaaaatgtttaacttacatgtgtagagctggagcaattcggacagatgataactgtattgtattaaagacattaccttgtttggttcgaatgtgcagtaaggagagattactagaggagagagttgaaggagctgagacacttgcctatctgattgaaccagatgttgagctacagagaatcgctagcataactgatcacctcattgccatgcttgctgattatttcaagtatcccagctcagtgagtgccatcactgatattaaaaggcttgatcatgatttaaaacatgctcacgaactccgccaggctgcattcaagctctatgcctctcttggagcaaatgatgaagacatccggaagaaggtgagtctgggagaggggcgtcccccagtcctgacagccagcaggcagggagtgacgtcaacctgaaagtcgtggtgaagagcactaacagtgactgtttgaatataataaagcagagtgactaaaggcataattgaagaatgaatgggacccggatttggggggttgtttgtttgtttttagaacatagagtggcatggccgtgctggaatgacaaataactggcgtgctttttttttgtgtcattaatatgaattattatgttgcacatttttgcatgtgttctgataaaaatcaattctagcactgtgaagcttcagacaccttgaaagtcctaacattagaattgtaaatgttatttatggaaataccttccaatgctattgagaaattcaaatctctattgtatattgttctttgatatgtggcttagttttatgttttgattttttttgctactgtgcaagtttaatgtgaataaatcctgatgcggcaagaaccatcttcataatctaataatattaaatatat

SEQ ID NO: 308519 - DNA, 2424 bp, Homo sapiens
  misc_feature (1)..(1): n is a, c, g, or t
  misc_feature (1415)..(1415): n is a, c, g, or t
ncttgtgcaacgactctcttaatctccaccgctacaggatgccacagtgataccacacctcatggcactgcttagcaggtcccgctatacccaggagtacatctgtcagatcttctcacactgctgtaaagggccagatcatcaaacaattttatttaaccacggtgcagttcagaatattgctcacctactaacctcactgtcctacaaagttcgaatgcaagcactgaaatgtttctcagttttagcttttgaaaacccccaggtatcgatgaccctggtaaatgttttggttgatggagaattgttaccacagatttttgtgaagatgttacagagggataagcctattgagatgcagctcacatcagcaaaatgtttaacttacatgtgtagagctggagcaattcggacagatgataactgtattgtattaaagacattaccttgtttggttcgaatgtgcagtaaggagagattactagaggagagagttgaaggagctgagacacttgcctatctgattgaaccagatgttgagctacagagaatcgctagcataactgatcacctcattgccatgcttgctgattatttcaagtatcccagctcagtgagtgccatcactgatattaaaaggcttgatcatgatttaaaacatgctcacgaactccgccaggctgcattcaagctctatgcctctcttggagcaaatgatgaagacatccggaagaaggtgagtctgggagaggggcgtcccccagtcctgacagccagcaggcagggagtgacgtcaacctgaaagtcgtggtgaagagcactaacagtgactgtttgaatataataaagcagagtgactaaaggcataattgaagaatgaatgggacccggatttggggggttgtttgtttgtttttagaacatagagtggcatggccgtgctggaatgacaaataactggcgtgctttttttttgtgtcattaatatgaattattatgttgcacatttttgcatgtgttctgataaaaatcaattctagcactgtgaagcttcagacaccttgaaagtcctaacattagaattgtaaatgttatttatggaaataccttccaatgctattgagaaattcaaatctctattgtatattgttctttgatatgtggcttagttttatgttttgattttttttgctactgtgcaagtttaatgtgaataaaatctttgtggaatgatgattttatgtttagtgagtggtcatctgaattttccagctccccagaaaatgtatgcactggtatagcacccttatgttactaaagccttagtctaacactgaactcatgttcttgatgagaatacttctagatgaggagtatagtggtaagtaagctctgacttggctccttccacatanccaaaaagctggaacttaccactcaaaaacatgtataacctaataaattctacacaaggctttcaagaccatcagagagcaaaaccacatgttctgtcttgaggagccatagcagaaagagcaaattagtcattatttactgaacatgatgatttactaaatctctccatctgcattagtattttaaggagcactgtgagagaaatcacaaagtattagagtttaccatgattcagagaagttcttcaggcctgtagaaagaggagtatggaacaaccttacatttgttgaaataacttgaaaaggaaccatttcttgaagaaactgaagtaatagcaataagatttgatgtgtgagtagctttgatttaaaatcaatgcaaaaagcacaactaataaattgaatgtttccatgtacctcactttatttcagttaacaagatactttgacttgaagtgtttttagtgtatccctatgaaaatcatttttggtacatctaagttttcacttataaactgttatttcaaagcaaacatactagtgatatatatatgatttatggatgttgacgccaatgttcagtttgggtacgttggtgtattgcaaggggagaggcttttataacaatagatttgaacatttttaaaaaattggactgtgtaacttaaatacacaattatttggtttaggatggttattagggcccattagaaacaggagaagtattttacccattcttaaagctctaaaaaaccatctcatggactgaaaggtagatagacagatggaccacaatgggaaataggatgtccatttgtacttctttgtacttttttgttaataaactgttttggaattaatggcttaatttgtgatatcatgttctagaaatacctgcaacatgacagtctaatcagtagtctattaaaacttgtattcataatgtgtataatttcctggtaaggctaactcctgatcgtttctgtagaaagatgacaaataaagaaaa

SEQ ID NO: 308520 - DNA, 2021 bp, Homo sapiens
  misc_feature (1955)..(1955): n is a, c, g, or t
  misc_feature (1963)..(1963): n is a, c, g, or t
  misc_feature (1997)..(1997): n is a, c, g, or t
agcggcgcttccacctctaacccaggctcagagtagctgctgtttctgagagaacgattcgtaggacagcccctgacgccattcccttttgcccttctttctgcgggcctttccggtacttgagcggtgtccagagcgtggccagttctcgtctatctggctgcctttagggagcggtgcctagcgttggccaatagttggctgtcgaaagtgccggcccccgcgccggcgcctgcagcagccgggtgggaaggctcaagatggcgtgcttgttggagaccccaatccgcatgagcgtcctttcggaccaggaatgaaagttactgggagataacttcgaaggattttgcaacaaattcgagctgtccgactctgagaatggaagtaacagctagcagtcgccactatgttgacaggctatttgaccctgatccccagaaagttctacaaggtgtcatagacatgaaaaatgctgtaattggaaacaacaagcagaaagccaatctcattgttttaggagctgttccaagattgttgtacttgcttcagcaagaaacctcaagcacagagctgaaaactgaatgtgcagtggtgttgggaagtcttgctatgggtactgaaaacaatgtcaagtctctactggactgccatattatccctgccttattgcaaggactactgtccccagacctgaagtttattgaagcttgcctccgatgcctgcgtaccatcttcaccagtcctgtcactccagaggagctactgtatacagatgccacagtgataccacacctcatggcactgcttagcaggtcccgctatacccaggagtacatctgtcagatcttctcacactgctgtaaagggccagatcatcaaacaattttatttaaccacggtgcagttcagaatattgctcacctactaacctcactgtcctacaaagttcgaatgcaagcactgaaatgtttctcagttttagcttttgaaaacccccaggtatcgatgaccctggtaaatgttttggttgatggagaattgttaccacagatttttgtgaagatgttacagagggataagcctattgagatgcagctcacatcagcaaaatgtttaacttacatgtgtagagctggagcaattcggacagatgataactgtattgtattaaagacattaccttgtttggttcgaatgtgcagtaaggagagattactagaggagagagttgaaggagctgagacacttgcctatctgattgaaccagatgttgagctacagagaatcgctagcataactgatcacctcattgccatgcttgctgattatttcaagtatcccagctcagtgagtgccatcactgatattaaaaggcttgatcatgatttaaaacatgctcacgaactccgccaggctgcattcaagctctatgcctctcttggagcaaatgatgaagacatccggaagaaggtgagtctgggagaggggcgtcccccagtcctgacagccagcaggcagggagtgacgtcaacctgaaagtcgtggtgaagagcactaacagtgactgtttgaatataataaagcagagtgactaaaggcataattgaagaatgaatgggacccggatttggggggttgtttgtttgtttttagaacatagagtggcatggccgtgctggaatgacaaataactggcgtgctttttttttgtgtcattaatatgaattattatgttgcacatttttgcatgtgttctgataaaaatcaattctagcactgtgaagcttcagacaccttgaaagtcctaacattagaattgtaaatgttatttatggaaataccttccaatgctattgagaaattcaaatctctattgtatattgttctttgatatgtggcttagttttatgttttgattttttttgctactgtgcaagtttaatgtgaataaatancgatgcgnccaggttttttctttatttttaaatttttttttntttttttttttttttttttttttt

SEQ ID NO: 308521 - DNA, 2007 bp, Homo sapiens
agcggcgcttccacctctaacccaggctcagagtagctgctgtttctgagagaacgattcgtaggacagcccctgacgccattcccttttgcccttctttctgcgggcctttccggtacttgagcggtgtccagagcgtggccagttctcgtctatctggctgcctttagggagcggtgcctagcgttggccaatagttggctgtcgaaagtgccggcccccgcgccggcgcctgcagcagccgggtgggaaggctcaagatggcgtgcttgttggagaccccaatccgcatgagcgtcctttcggaccaggaatgaaagttactgggagataacttcgaaggattttgcaacaaattcgagctgtccgactctgagaatggaagtaacagctagcagtcgccactatgttgacaggctatttgaccctgatccccagaaagttctacaaggtgtcatagacatgaaaaatgctgtaattggaaacaacaagcagaaagccaatctcattgttttaggagctgttccaagattgttgtacttgcttcagcaagaaacctcaagcacagagctgaaaactgaatgtgcagtggtgttgggaagtcttgctatgggtactgaaaacaatgtcaagtctctactggactgccatattatccctgccttattgcaaggactactgtccccagacctgaagtttattgaagcttgcctccgatgcctgcgtaccatcttcaccagtcctgtcactccagaggagctactgtatacagatgccacagtgataccacacctcatggcactgcttagcaggtcccgctatacccaggagtacatctgtcagatcttctcacactgctgtaaagggccagatcatcaaacaattttatttaaccacggtgcagttcagaatattgctcacctactaacctcactgtcctacaaagttcgaatgcaagcactgaaatgtttctcagttttagcttttgaaaacccccaggtatcgatgaccctggtaaatgttttggttgatggagaattgttaccacagatttttgtgaagatgttacagagggataagcctattgagatgcagctcacatcagcaaaatgtttaacttacatgtgtagagctggagcaattcggacagatgataactgtattgtattaaagacattaccttgtttggttcgaatgtgcagtaaggagagattactagaggagagagttgaaggagctgagacacttgcctatctgattgaaccagatgttgagctacagagaatcgctagcataactgatcacctcattgccatgcttgctgattatttcaagtatcccagctcagtgagtgccatcactgatattaaaaggcttgatcatgatttaaaacatgctcacgaactccgccaggctgcattcaagctctatgcctctcttggagcaaatgatgaagacatccggaagaaggtgagtctgggagaggggcgtcccccagtcctgacagccagcaggcagggagtgacgtcaacctgaaagtcgtggtgaagagcactaacagtgactgtttgaatataataaagcagagtgactaaaggcataattgaagaatgaatgggacccggatttggggggttgtttgtttgtttttagaacatagagtggcatggccgtgctggaatgacaaataactggcgtgctttttttttgtgtcattaatatgaattattatgttgcacatttttgcatgtgttctgataaaaatcaattctagcactgtgaagcttcagacaccttgaaagtcctaacattagaattgtaaatgttatttatggaaataccttccaatgctattgagaaattcaaatctctattgtatattgttctttgatatgtggcttagttttatgttttgattttttttgctactgtgcaagtttaatgtgaataaacgatggcgtgcggccccatcataatataatggactatatacatcaagtcactgat

SEQ ID NO: 308522 - DNA, 2008 bp, Homo sapiens
  misc_feature (1969)..(1969): n is a, c, g, or t
  misc_feature (1977)..(1977): n is a, c, g, or t
agcggcgcttccacctctaacccaggctcagagtagctgctgtttctgagagaacgattcgtaggacagcccctgacgccattcccttttgcccttctttctgcgggcctttccggtacttgagcggtgtccagagcgtggccagttctcgtctatctggctgcctttagggagcggtgcctagcgttggccaatagttggctgtcgaaagtgccggcccccgcgccggcgcctgcagcagccgggtgggaaggctcaagatggcgtgcttgttggagaccccaatccgcatgagcgtcctttcggaccaggaatgaaagttactgggagataacttcgaaggattttgcaacaaattcgagctgtccgactctgagaatggaagtaacagctagcagtcgccactatgttgacaggctatttgaccctgatccccagaaagttctacaaggtgtcatagacatgaaaaatgctgtaattggaaacaacaagcagaaagccaatctcattgttttaggagctgttccaagattgttgtacttgcttcagcaagaaacctcaagcacagagctgaaaactgaatgtgcagtggtgttgggaagtcttgctatgggtactgaaaacaatgtcaagtctctactggactgccatattatccctgccttattgcaaggactactgtccccagacctgaagtttattgaagcttgcctccgatgcctgcgtaccatcttcaccagtcctgtcactccagaggagctactgtatacagatgccacagtgataccacacctcatggcactgcttagcaggtcccgctatacccaggagtacatctgtcagatcttctcacactgctgtaaagggccagatcatcaaacaattttatttaaccacggtgcagttcagaatattgctcacctactaacctcactgtcctacaaagttcgaatgcaagcactgaaatgtttctcagttttagcttttgaaaacccccaggtatcgatgaccctggtaaatgttttggttgatggagaattgttaccacagatttttgtgaagatgttacagagggataagcctattgagatgcagctcacatcagcaaaatgtttaacttacatgtgtagagctggagcaattcggacagatgataactgtattgtattaaagacattaccttgtttggttcgaatgtgcagtaaggagagattactagaggagagagttgaaggagctgagacacttgcctatctgattgaaccagatgttgagctacagagaatcgctagcataactgatcacctcattgccatgcttgctgattatttcaagtatcccagctcagtgagtgccatcactgatattaaaaggcttgatcatgatttaaaacatgctcacgaactccgccaggctgcattcaagctctatgcctctcttggagcaaatgatgaagacatccggaagaaggtgagtctgggagaggggcgtcccccagtcctgacagccagcaggcagggagtgacgtcaacctgaaagtcgtggtgaagagcactaacagtgactgtttgaatataataaagcagagtgactaaaggcataattgaagaatgaatgggacccggatttggggggttgtttgtttgtttttagaacatagagtggcatggccgtgctggaatgacaaataactggcgtgctttttttttgtgtcattaatatgaattattatgttgcacatttttgcatgtgttctgataaaaatcaattctagcactgtgaagcttcagacaccttgaaagtcctaacattagaattgtaaatgttatttatggaaataccttccaatgctattgagaaattcaaatctctattgtatattgttctttgatatgtggcttagttttatgttttgattttttttgctactgtgcaagtttaatgtgaataaactggataaagaaaggcncccttttnttgtggactaatttagaaaagcgaatatcga

SEQ ID NO: 308523 - DNA, 2428 bp, Homo sapiens
  misc_feature (1)..(1): n is a, c, g, or t
  misc_feature (1419)..(1419): n is a, c, g, or t
nttttgtaagtgacttgactctctaattaccaccgctacaggatgccacagtgataccacacctcatggcactgcttagcaggtcccgctatacccaggagtacatctgtcagatcttctcacactgctgtaaagggccagatcatcaaacaattttatttaaccacggtgcagttcagaatattgctcacctactaacctcactgtcctacaaagttcgaatgcaagcactgaaatgtttctcagttttagcttttgaaaacccccaggtatcgatgaccctggtaaatgttttggttgatggagaattgttaccacagatttttgtgaagatgttacagagggataagcctattgagatgcagctcacatcagcaaaatgtttaacttacatgtgtagagctggagcaattcggacagatgataactgtattgtattaaagacattaccttgtttggttcgaatgtgcagtaaggagagattactagaggagagagttgaaggagctgagacacttgcctatctgattgaaccagatgttgagctacagagaatcgctagcataactgatcacctcattgccatgcttgctgattatttcaagtatcccagctcagtgagtgccatcactgatattaaaaggcttgatcatgatttaaaacatgctcacgaactccgccaggctgcattcaagctctatgcctctcttggagcaaatgatgaagacatccggaagaaggtgagtctgggagaggggcgtcccccagtcctgacagccagcaggcagggagtgacgtcaacctgaaagtcgtggtgaagagcactaacagtgactgtttgaatataataaagcagagtgactaaaggcataattgaagaatgaatgggacccggatttggggggttgtttgtttgtttttagaacatagagtggcatggccgtgctggaatgacaaataactggcgtgctttttttttgtgtcattaatatgaattattatgttgcacatttttgcatgtgttctgataaaaatcaattctagcactgtgaagcttcagacaccttgaaagtcctaacattagaattgtaaatgttatttatggaaataccttccaatgctattgagaaattcaaatctctattgtatattgttctttgatatgtggcttagttttatgttttgattttttttgctactgtgcaagtttaatgtgaataaaatctttgtggaatgatgattttatgtttagtgagtggtcatctgaattttccagctccccagaaaatgtatgcactggtatagcacccttatgttactaaagccttagtctaacactgaactcatgttcttgatgagaatacttctagatgaggagtatagtggtaagtaagctctgacttggctccttccacatanccaaaaagctggaacttaccactcaaaaacatgtataacctaataaattctacacaaggctttcaagaccatcagagagcaaaaccacatgttctgtcttgaggagccatagcagaaagagcaaattagtcattatttactgaacatgatgatttactaaatctctccatctgcattagtattttaaggagcactgtgagagaaatcacaaagtattagagtttaccatgattcagagaagttcttcaggcctgtagaaagaggagtatggaacaaccttacatttgttgaaataacttgaaaaggaaccatttcttgaagaaactgaagtaatagcaataagatttgatgtgtgagtagctttgatttaaaatcaatgcaaaaagcacaactaataaattgaatgtttccatgtacctcactttatttcagttaacaagatactttgacttgaagtgtttttagtgtatccctatgaaaatcatttttggtacatctaagttttcacttataaactgttatttcaaagcaaacatactagtgatatatatatgatttatggatgttgacgccaatgttcagtttgggtacgttggtgtattgcaaggggagaggcttttataacaatagatttgaacatttttaaaaaattggactgtgtaacttaaatacacaattatttggtttaggatggttattagggcccattagaaacaggagaagtattttacccattcttaaagctctaaaaaaccatctcatggactgaaaggtagatagacagatggaccacaatgggaaataggatgtccatttgtacttctttgtacttttttgttaataaactgttttggaattaatggcttaatttgtgatatcatgttctagaaatacctgcaacatgacagtctaatcagtagtctattaaaacttgtattcataatgtgtataatttcctggtaaggctaactcctgatcgtttctgtagaaagatgacaaataaagaaaa

SEQ ID NO: 308524 - DNA, 2013 bp, Homo sapiens
  misc_feature (1974)..(1974): n is a, c, g, or t
agcggcgcttccacctctaacccaggctcagagtagctgctgtttctgagagaacgattcgtaggacagcccctgacgccattcccttttgcccttctttctgcgggcctttccggtacttgagcggtgtccagagcgtggccagttctcgtctatctggctgcctttagggagcggtgcctagcgttggccaatagttggctgtcgaaagtgccggcccccgcgccggcgcctgcagcagccgggtgggaaggctcaagatggcgtgcttgttggagaccccaatccgcatgagcgtcctttcggaccaggaatgaaagttactgggagataacttcgaaggattttgcaacaaattcgagctgtccgactctgagaatggaagtaacagctagcagtcgccactatgttgacaggctatttgaccctgatccccagaaagttctacaaggtgtcatagacatgaaaaatgctgtaattggaaacaacaagcagaaagccaatctcattgttttaggagctgttccaagattgttgtacttgcttcagcaagaaacctcaagcacagagctgaaaactgaatgtgcagtggtgttgggaagtcttgctatgggtactgaaaacaatgtcaagtctctactggactgccatattatccctgccttattgcaaggactactgtccccagacctgaagtttattgaagcttgcctccgatgcctgcgtaccatcttcaccagtcctgtcactccagaggagctactgtatacagatgccacagtgataccacacctcatggcactgcttagcaggtcccgctatacccaggagtacatctgtcagatcttctcacactgctgtaaagggccagatcatcaaacaattttatttaaccacggtgcagttcagaatattgctcacctactaacctcactgtcctacaaagttcgaatgcaagcactgaaatgtttctcagttttagcttttgaaaacccccaggtatcgatgaccctggtaaatgttttggttgatggagaattgttaccacagatttttgtgaagatgttacagagggataagcctattgagatgcagctcacatcagcaaaatgtttaacttacatgtgtagagctggagcaattcggacagatgataactgtattgtattaaagacattaccttgtttggttcgaatgtgcagtaaggagagattactagaggagagagttgaaggagctgagacacttgcctatctgattgaaccagatgttgagctacagagaatcgctagcataactgatcacctcattgccatgcttgctgattatttcaagtatcccagctcagtgagtgccatcactgatattaaaaggcttgatcatgatttaaaacatgctcacgaactccgccaggctgcattcaagctctatgcctctcttggagcaaatgatgaagacatccggaagaaggtgagtctgggagaggggcgtcccccagtcctgacagccagcaggcagggagtgacgtcaacctgaaagtcgtggtgaagagcactaacagtgactgtttgaatataataaagcagagtgactaaaggcataattgaagaatgaatgggacccggatttggggggttgtttgtttgtttttagaacatagagtggcatggccgtgctggaatgacaaataactggcgtgctttttttttgtgtcattaatatgaattattatgttgcacatttttgcatgtgttctgataaaaatcaattctagcactgtgaagcttcagacaccttgaaagtcctaacattagaattgtaaatgttatttatggaaataccttccaatgctattgagaaattcaaatctctattgtatattgttctttgatatgtggcttagttttatgttttgattttttttgctactgtgcaagtttaatgtgaataaatgcgtcacacgagaggccctcnttttgtctgcgggtcaaatagggtgcggggtatgcggaa

SEQ ID NO: 308525 - DNA, 2007 bp, Homo sapiens
agcggcgcttccacctctaacccaggctcagagtagctgctgtttctgagagaacgattcgtaggacagcccctgacgccattcccttttgcccttctttctgcgggcctttccggtacttgagcggtgtccagagcgtggccagttctcgtctatctggctgcctttagggagcggtgcctagcgttggccaatagttggctgtcgaaagtgccggcccccgcgccggcgcctgcagcagccgggtgggaaggctcaagatggcgtgcttgttggagaccccaatccgcatgagcgtcctttcggaccaggaatgaaagttactgggagataacttcgaaggattttgcaacaaattcgagctgtccgactctgagaatggaagtaacagctagcagtcgccactatgttgacaggctatttgaccctgatccccagaaagttctacaaggtgtcatagacatgaaaaatgctgtaattggaaacaacaagcagaaagccaatctcattgttttaggagctgttccaagattgttgtacttgcttcagcaagaaacctcaagcacagagctgaaaactgaatgtgcagtggtgttgggaagtcttgctatgggtactgaaaacaatgtcaagtctctactggactgccatattatccctgccttattgcaaggactactgtccccagacctgaagtttattgaagcttgcctccgatgcctgcgtaccatcttcaccagtcctgtcactccagaggagctactgtatacagatgccacagtgataccacacctcatggcactgcttagcaggtcccgctatacccaggagtacatctgtcagatcttctcacactgctgtaaagggccagatcatcaaacaattttatttaaccacggtgcagttcagaatattgctcacctactaacctcactgtcctacaaagttcgaatgcaagcactgaaatgtttctcagttttagcttttgaaaacccccaggtatcgatgaccctggtaaatgttttggttgatggagaattgttaccacagatttttgtgaagatgttacagagggataagcctattgagatgcagctcacatcagcaaaatgtttaacttacatgtgtagagctggagcaattcggacagatgataactgtattgtattaaagacattaccttgtttggttcgaatgtgcagtaaggagagattactagaggagagagttgaaggagctgagacacttgcctatctgattgaaccagatgttgagctacagagaatcgctagcataactgatcacctcattgccatgcttgctgattatttcaagtatcccagctcagtgagtgccatcactgatattaaaaggcttgatcatgatttaaaacatgctcacgaactccgccaggctgcattcaagctctatgcctctcttggagcaaatgatgaagacatccggaagaaggtgagtctgggagaggggcgtcccccagtcctgacagccagcaggcagggagtgacgtcaacctgaaagtcgtggtgaagagcactaacagtgactgtttgaatataataaagcagagtgactaaaggcataattgaagaatgaatgggacccggatttggggggttgtttgtttgtttttagaacatagagtggcatggccgtgctggaatgacaaataactggcgtgctttttttttgtgtcattaatatgaattattatgttgcacatttttgcatgtgttctgataaaaatcaattctagcactgtgaagcttcagacaccttgaaagtcctaacattagaattgtaaatgttatttatggaaataccttccaatgctattgagaaattcaaatctctattgtatattgttctttgatatgtggcttagttttatgttttgattttttttgctactgtgcaagtttaatgtgaataaaccaatgattcgttagaacataaaagagaaacgatcagcgggcgtccgagacgtat

SEQ ID NO: 308526 - DNA, 2005 bp, Homo sapiens
agcggcgcttccacctctaacccaggctcagagtagctgctgtttctgagagaacgattcgtaggacagcccctgacgccattcccttttgcccttctttctgcgggcctttccggtacttgagcggtgtccagagcgtggccagttctcgtctatctggctgcctttagggagcggtgcctagcgttggccaatagttggctgtcgaaagtgccggcccccgcgccggcgcctgcagcagccgggtgggaaggctcaagatggcgtgcttgttggagaccccaatccgcatgagcgtcctttcggaccaggaatgaaagttactgggagataacttcgaaggattttgcaacaaattcgagctgtccgactctgagaatggaagtaacagctagcagtcgccactatgttgacaggctatttgaccctgatccccagaaagttctacaaggtgtcatagacatgaaaaatgctgtaattggaaacaacaagcagaaagccaatctcattgttttaggagctgttccaagattgttgtacttgcttcagcaagaaacctcaagcacagagctgaaaactgaatgtgcagtggtgttgggaagtcttgctatgggtactgaaaacaatgtcaagtctctactggactgccatattatccctgccttattgcaaggactactgtccccagacctgaagtttattgaagcttgcctccgatgcctgcgtaccatcttcaccagtcctgtcactccagaggagctactgtatacagatgccacagtgataccacacctcatggcactgcttagcaggtcccgctatacccaggagtacatctgtcagatcttctcacactgctgtaaagggccagatcatcaaacaattttatttaaccacggtgcagttcagaatattgctcacctactaacctcactgtcctacaaagttcgaatgcaagcactgaaatgtttctcagttttagcttttgaaaacccccaggtatcgatgaccctggtaaatgttttggttgatggagaattgttaccacagatttttgtgaagatgttacagagggataagcctattgagatgcagctcacatcagcaaaatgtttaacttacatgtgtagagctggagcaattcggacagatgataactgtattgtattaaagacattaccttgtttggttcgaatgtgcagtaaggagagattactagaggagagagttgaaggagctgagacacttgcctatctgattgaaccagatgttgagctacagagaatcgctagcataactgatcacctcattgccatgcttgctgattatttcaagtatcccagctcagtgagtgccatcactgatattaaaaggcttgatcatgatttaaaacatgctcacgaactccgccaggctgcattcaagctctatgcctctcttggagcaaatgatgaagacatccggaagaaggtgagtctgggagaggggcgtcccccagtcctgacagccagcaggcagggagtgacgtcaacctgaaagtcgtggtgaagagcactaacagtgactgtttgaatataataaagcagagtgactaaaggcataattgaagaatgaatgggacccggatttggggggttgtttgtttgtttttagaacatagagtggcatggccgtgctggaatgacaaataactggcgtgctttttttttgtgtcattaatatgaattattatgttgcacatttttgcatgtgttctgataaaaatcaattctagcactgtgaagcttcagacaccttgaaagtcctaacattagaattgtaaatgttatttatggaaataccttccaatgctattgagaaattcaaatctctattgtatattgttctttgatatgtggcttagttttatgttttgattttttttgctactgtgcaagtttaatgtgaataaatttgagttcgcccgaaggcggccttttttttgtcccccccaccccggcgtgaa

SEQ ID NO: 308527 - DNA, 1950 bp, Homo sapiens
agcggcgcttccacctctaacccaggctcagagtagctgctgtttctgagagaacgattcgtaggacagcccctgacgccattcccttttgcccttctttctgcgggcctttccggtacttgagcggtgtccagagcgtggccagttctcgtctatctggctgcctttagggagcggtgcctagcgttggccaatagttggctgtcgaaagtgccggcccccgcgccggcgcctgcagcagccgggtgggaaggctcaagatggcgtgcttgttggagaccccaatccgcatgagcgtcctttcggaccaggaatgaaagttactgggagataacttcgaaggattttgcaacaaattcgagctgtccgactctgagaatggaagtaacagctagcagtcgccactatgttgacaggctatttgaccctgatccccagaaagttctacaaggtgtcatagacatgaaaaatgctgtaattggaaacaacaagcagaaagccaatctcattgttttaggagctgttccaagattgttgtacttgcttcagcaagaaacctcaagcacagagctgaaaactgaatgtgcagtggtgttgggaagtcttgctatgggtactgaaaacaatgtcaagtctctactggactgccatattatccctgccttattgcaaggactactgtccccagacctgaagtttattgaagcttgcctccgatgcctgcgtaccatcttcaccagtcctgtcactccagaggagctactgtatacagatgccacagtgataccacacctcatggcactgcttagcaggtcccgctatacccaggagtacatctgtcagatcttctcacactgctgtaaagggccagatcatcaaacaattttatttaaccacggtgcagttcagaatattgctcacctactaacctcactgtcctacaaagttcgaatgcaagcactgaaatgtttctcagttttagcttttgaaaacccccaggtatcgatgaccctggtaaatgttttggttgatggagaattgttaccacagatttttgtgaagatgttacagagggataagcctattgagatgcagctcacatcagcaaaatgtttaacttacatgtgtagagctggagcaattcggacagatgataactgtattgtattaaagacattaccttgtttggttcgaatgtgcagtaaggagagattactagaggagagagttgaaggagctgagacacttgcctatctgattgaaccagatgttgagctacagagaatcgctagcataactgatcacctcattgccatgcttgctgattatttcaagtatcccagctcagtgagtgccatcactgatattaaaaggcttgatcatgatttaaaacatgctcacgaactccgccaggctgcattcaagctctatgcctctcttggagcaaatgatgaagacatccggaagaaggtgagtctgggagaggggcgtcccccagtcctgacagccagcaggcagggagtgacgtcaacctgaaagtcgtggtgaagagcactaacagtgactgtttgaatataataaagcagagtgactaaaggcataattgaagaatgaatgggacccggatttggggggttgtttgtttgtttttagaacatagagtggcatggccgtgctggaatgacaaataactggcgtgctttttttttgtgtcattaatatgaattattatgttgcacatttttgcatgtgttctgataaaaatcaattctagcactgtgaagcttcagacaccttgaaagtcctaacattagaattgtaaatgttatttatggaaataccttccaatgctattgagaaattcaaatctctaacgaacccgctctctgatatcgggcttatttgattgtcttcaatgttcctagaaacatgcccacgtttacatgtaat

SEQ ID NO: 308528 - DNA, 1718 bp, Homo sapiens
agcggcgcttccacctctaacccaggctcagagtagctgctgtttctgagagaacgattcgtaggacagcccctgacgccattcccttttgcccttctttctgcgggcctttccggtacttgagcggtgtccagagcgtggccagttctcgtctatctggctgcctttagggagcggtgcctagcgttggccaatagttggctgtcgaaagtgccggcccccgcgccggcgcctgcagcagccgggtgggaaggctcaagatggcgtgcttgttggagaccccaatccgcatgagcgtcctttcggaccaggaatgaaagttactgggagataacttcgaaggattttgcaacaaattcgagctgtccgactctgagaatggaagtaacagctagcagtcgccactatgttgacaggctatttgaccctgatccccagaaagttctacaaggtgtcatagacatgaaaaatgctgtaattggaaacaacaagcagaaagccaatctcattgttttaggagctgttccaagattgttgtacttgcttcagcaagaaacctcaagcacagagctgaaaactgaatgtgcagtggtgttgggaagtcttgctatgggtactgaaaacaatgtcaagtctctactggactgccatattatccctgccttattgcaaggactactgtccccagacctgaagtttattgaagcttgcctccgatgcctgcgtaccatcttcaccagtcctgtcactccagaggagctactgtatacagatgccacagtgataccacacctcatggcactgcttagcaggtcccgctatacccaggagtacatctgtcagatcttctcacactgctgtaaagggccagatcatcaaacaattttatttaaccacggtgcagttcagaatattgctcacctactaacctcactgtcctacaaagttcgaatgcaagcactgaaatgtttctcagttttagcttttgaaaacccccaggtatcgatgaccctggtaaatgttttggttgatggagaattgttaccacagatttttgtgaagatgttacagagggataagcctattgagatgcagctcacatcagcaaaatgtttaacttacatgtgtagagctggagcaattcggacagatgataactgtattgtattaaagacattaccttgtttggttcgaatgtgcagtaaggagagattactagaggagagagttgaaggagctgagacacttgcctatctgattgaaccagatgttgagctacagagaatcgctagcataactgatcacctcattgccatgcttgctgattatttcaagtatcccagctcagtgagtgccatcactgatattaaaaggcttgatcatgatttaaaacatgctcacgaactccgccaggctgcattcaagctctatgcctctcttggagcaaatgatgaagacatccggaagaaggtgagtctgggagaggggcgtcccccagtcctgacagccagcaggcagggagtgacgtcaacctgaaagtcgtggtgaagagcactaacagtgactgtttgaatataataaagcagagtgactaaaggcataattgaagaatgaatgggacccggatttggggggttgtttgtttgtttttagaacatagagtggcatggccgtgctgcgtcgacgcgccctcgcatttagtagtagtagtatcgacc

SEQ ID NO: 308529 - DNA, 2224 bp, Homo sapiens
  misc_feature (1215)..(1215): n is a, c, g, or t
ggacgcgtgggtcgacccacgcgtcggcaaggactactgtccccagacctgaagtttattgaagcttgcctccgatgcctgcgtaccatcttcaccagtcctgtcactccagaggagctactgtatacagatgccacagtgataccacacctcatggcactgcttagcaggtcccgctatacccaggagtacatctgtcagatcttctcacactgctgtaaagggccagatcatcaaacaattttatttaaccacggtgcagttcagaatattgctcacctactaacctcactgtcctacaaagttcgaatgcaagcactgaaatgtttctcagttttagcttttgaaaacccccaggtatcgatgaccctggtaaatgtttaacttacatgtgtagagctggagcaattcggacagatgataactgtattgtattaaagcttgatcatgatttaaaacatgctcacgaactccgccaggctgcattcaagctctatgcctctcttggagcaaatgatgaagacatccggaagaaggtgagtctgggagaggggcgtcccccagtcctgacagccagcaggcagggagtgacgtcaacctgaaagtcgtggtgaagagcactaacagtgactgtttgaatataataaagcagagtgactaaaggcataattgaagaatgaatgggacccggatttggggggttgtttgtttgtttttagaacatagagtggcatggccgtgctggaatgacaaataactggcgtgctttttttttgtgtcattaatatgaattattatgttgcacatttttgcatgtgttctgataaaaatcaattctagcactgtgaagcttcagacaccttgaaagtcctaacattagaattgtaaatgttatttatggaaataccttccaatgctattgagaaattcaaatctctattgtatattgttctttgatatgtggcttagttttatgttttgattttttttgctactgtgcaagtttaatgtgaataaaatctttgtggaatgatgattttatgtttagtgagtggtcatctgaattttccagctccccagaaaatgtatgcactggtatagcacccttatgttactaaagccttagtctaacactgaactcatgttcttgatgagaatacttctagatgaggagtatagtggtaagtaagctctgacttggctccttccacatanccaaaaagctggaacttaccactcaaaaacatgtataacctaataaattctacacaaggctttcaagaccatcagagagcaaaaccacatgttctgtcttgaggagccatagcagaaagagcaaattagtcattatttactgaacatgatgatttactaaatctctccatctgcattagtattttaaggagcactgtgagagaaatcacaaagtattagagtttaccatgattcagagaagttcttcaggcctgtagaaagaggagtatggaacaaccttacatttgttgaaataacttgaaaaggaaccatttcttgaagaaactgaagtaatagcaataagatttgatgtgtgagtagctttgatttaaaatcaatgcaaaaagcacaactaataaattgaatgtttccatgtacctcactttatttcagttaacaagatactttgacttgaagtgtttttagtgtatccctatgaaaatcatttttggtacatctaagttttcacttataaactgttatttcaaagcaaacatactagtgatatatatatgatttatggatgttgacgccaatgttcagtttgggtacgttggtgtattgcaaggggagaggcttttataacaatagatttgaacatttttaaaaaattggactgtgtaacttaaatacacaattatttggtttaggatggttattagggcccattagaaacaggagaagtattttacccattcttaaagctctaaaaaaccatctcatggactgaaaggtagatagacagatggaccacaatgggaaataggatgtccatttgtacttctttgtacttttttgttaataaactgttttggaattaatggcttaatttgtgatatcatgttctagaaatacctgcaacatgacagtctaatcagtagtctattaaaacttgtattcataatgtgtataatttcctggtaaggctaactcctgatcgtttctgtagaaagatgacaaataaagaaaa

SEQ ID NO: 308530 - DNA, 1849 bp, Homo sapiens
  misc_feature (840)..(840): n is a, c, g, or t
cagttaatgttattgaaagttgaatttatggactgagttggaacatatcctttttttccccatagcttgatcatgatttaaaacatgctcacgaactccgccaggctgcattcaagctctatgcctctcttggagcaaatgatgaagacatccggaagaaggtgagtctgggagaggggcgtcccccagtcctgacagccagcaggcagggagtgacgtcaacctgaaagtcgtggtgaagagcactaacagtgactgtttgaatataataaagcagagtgactaaaggcataattgaagaatgaatgggacccggatttggggggttgtttgtttgtttttagaacatagagtggcatggccgtgctggaatgacaaataactggcgtgctttttttttgtgtcattaatatgaattattatgttgcacatttttgcatgtgttctgataaaaatcaattctagcactgtgaagcttcagacaccttgaaagtcctaacattagaattgtaaatgttatttatggaaataccttccaatgctattgagaaattcaaatctctattgtatattgttctttgatatgtggcttagttttatgttttgattttttttgctactgtgcaagtttaatgtgaataaaatctttgtggaatgatgattttatgtttagtgagtggtcatctgaattttccagctccccagaaaatgtatgcactggtatagcacccttatgttactaaagccttagtctaacactgaactcatgttcttgatgagaatacttctagatgaggagtatagtggtaagtaagctctgacttggctccttccacatanccaaaaagctggaacttaccactcaaaaacatgtataacctaataaattctacacaaggctttcaagaccatcagagagcaaaaccacatgttctgtcttgaggagccatagcagaaagagcaaattagtcattatttactgaacatgatgatttactaaatctctccatctgcattagtattttaaggagcactgtgagagaaatcacaaagtattagagtttaccatgattcagagaagttcttcaggcctgtagaaagaggagtatggaacaaccttacatttgttgaaataacttgaaaaggaaccatttcttgaagaaactgaagtaatagcaataagatttgatgtgtgagtagctttgatttaaaatcaatgcaaaaagcacaactaataaattgaatgtttccatgtacctcactttatttcagttaacaagatactttgacttgaagtgtttttagtgtatccctatgaaaatcatttttggtacatctaagttttcacttataaactgttatttcaaagcaaacatactagtgatatatatatgatttatggatgttgacgccaatgttcagtttgggtacgttggtgtattgcaaggggagaggcttttataacaatagatttgaacatttttaaaaaattggactgtgtaacttaaatacacaattatttggtttaggatggttattagggcccattagaaacaggagaagtattttacccattcttaaagctctaaaaaaccatctcatggactgaaaggtagatagacagatggaccacaatgggaaataggatgtccatttgtacttctttgtacttttttgttaataaactgttttggaattaatggcttaatttgtgatatcatgttctagaaatacctgcaacatgacagtctaatcagtagtctattaaaacttgtattcataatgtgtataatttcctggtaaggctaactcctgatcgtttctgtagaaagatgacaaataaagaaaa

SEQ ID NO: 308531 - DNA, 1983 bp, Homo sapiens
  misc_feature (974)..(974): n is a, c, g, or t
aatctcatttctgttaataggactactgtccccagacctgaagtttattgaagcttgcctccgatgcctgcgtaccatcttcaccagtcctgtcactccagaggagctactgtatacagggccagatcatcaaacaattttatttaaccacggtgcagttcagaatattgctcacctactaacctcactgtcctacaaacttgatcatgatttaaaacatgctcacgaactccgccaggctgcattcaagctctatgcctctcttggagcaaatgatgaagacatccggaagaaggtgagtctgggagaggggcgtcccccagtcctgacagccagcaggcagggagtgacgtcaacctgaaagtcgtggtgaagagcactaacagtgactgtttgaatataataaagcagagtgactaaaggcataattgaagaatgaatgggacccggatttggggggttgtttgtttgtttttagaacatagagtggcatggccgtgctggaatgacaaataactggcgtgctttttttttgtgtcattaatatgaattattatgttgcacatttttgcatgtgttctgataaaaatcaattctagcactgtgaagcttcagacaccttgaaagtcctaacattagaattgtaaatgttatttatggaaataccttccaatgctattgagaaattcaaatctctattgtatattgttctttgatatgtggcttagttttatgttttgattttttttgctactgtgcaagtttaatgtgaataaaatctttgtggaatgatgattttatgtttagtgagtggtcatctgaattttccagctccccagaaaatgtatgcactggtatagcacccttatgttactaaagccttagtctaacactgaactcatgttcttgatgagaatacttctagatgaggagtatagtggtaagtaagctctgacttggctccttccacatanccaaaaagctggaacttaccactcaaaaacatgtataacctaataaattctacacaaggctttcaagaccatcagagagcaaaaccacatgttctgtcttgaggagccatagcagaaagagcaaattagtcattatttactgaacatgatgatttactaaatctctccatctgcattagtattttaaggagcactgtgagagaaatcacaaagtattagagtttaccatgattcagagaagttcttcaggcctgtagaaagaggagtatggaacaaccttacatttgttgaaataacttgaaaaggaaccatttcttgaagaaactgaagtaatagcaataagatttgatgtgtgagtagctttgatttaaaatcaatgcaaaaagcacaactaataaattgaatgtttccatgtacctcactttatttcagttaacaagatactttgacttgaagtgtttttagtgtatccctatgaaaatcatttttggtacatctaagttttcacttataaactgttatttcaaagcaaacatactagtgatatatatatgatttatggatgttgacgccaatgttcagtttgggtacgttggtgtattgcaaggggagaggcttttataacaatagatttgaacatttttaaaaaattggactgtgtaacttaaatacacaattatttggtttaggatggttattagggcccattagaaacaggagaagtattttacccattcttaaagctctaaaaaaccatctcatggactgaaaggtagatagacagatggaccacaatgggaaataggatgtccatttgtacttctttgtacttttttgttaataaactgttttggaattaatggcttaatttgtgatatcatgttctagaaatacctgcaacatgacagtctaatcagtagtctattaaaacttgtattcataatgtgtataatttcctggtaaggctaactcctgatcgtttctgtagaaagatgacaaataaagaaaa

SEQ ID NO: 308532 - DNA, 1109 bp, Homo sapiens
agcggcgcttccacctctaacccaggctcagagtagctgctgtttctgagagaacgattcgtaggacagcccctgacgccattcccttttgcccttctttctgcgggcctttccggtacttgagcggtgtccagagcgtggccagttctcgtctatctggctgcctttagggagcggtgcctagcgttggccaatagttggctgtcgaaagtgccggcccccgcgccggcgcctgcagcagccgggtgggaaggctcaagatggcgtgcttgttggagaccccaatccgcatgagcgtcctttcggaccaggaatgaaagttactgggagataacttcgaaggattttgcaacaaattcgagctgtccgactctgagaatggaagtaacagctagcagtcgccactatgttgacaggctatttgaccctgatccccagaaagttctacaaggtgtcatagacatgaaaaatgctgtaattggaaacaacaagcagaaagccaatctcattgttttaggagctgttccaagattgttgtacttgcttcagcaagaaacctcaagcacagagctgaaaactgaatgtgcagtggtgttgggaagtcttgctatgggtactgaaaacaatgtcaagtctctactggactgccatattatccctgccttattgcaaggactactgtccccagacctgaagtttattgaagcttgcctccgatgcctgcgtaccatcttcaccagtcctgtcactccagaggagctactgtatacagatgccacagtgataccacacctcatggcactgcttagcaggtcccgctatacccaggagtacatctgtcagatcttctcacactgctgtaaagggccagatcatcaaacaattttatttaaccacggtgcagttcagaatattgctcacctactaacctcactgtcctacaaagtaagatgttaaaaattgtggccagatttgtataccttgtttgtgatttctagaaacagacccacatatttttattgtttctttgataattgtgatcaaaagtagtattttatcagtaaaatgttatagggcatcattttagctatagaatgctctttaaaaaa

SEQ ID NO: 308533 - DNA, 1944 bp, Homo sapiens
gcggccgcccgcccgccctccaggaagcctcatcccggtctccaccattcccccaagcgtggtgtgcctcctgggcaccaccccctggggtggaccccggctcagtctcgggccagggagtgagcgagggtggagaggcgggatagacgggcagaggggaccgcggccgagccaaagacgtttccaactccgggagctcccgccggtgcgggttcccaggatggcgtctggcaggcggggtggctgggcttatagacaactggctgggcggcgcggcttggactttgccaagcgtttcactgagccttccttttagcgatgccgcttcccgggggccgaacgctctgccttgtgaagcgccgggcttgcagccggcctgagaacgagcgcccactcagctctcccgggctttggcaagaagaggtgcaggctccttggcccccatttcctcagagctgccaggccaagtctgtgcggcttctatcgcgtcccagcacctgggcaccggctgaagcagtttgctttttggcaatggtgattcgtatcagctgcaactcttcctagtgtgtgtggttttttaagcccctttcctccgctctgctcagaggtcgcggctctgagtcagaggaactctatgttccctgtgcctggtattccgtttttctttaaggggagtcaaacattgaaggggggaacaagggggtgagatttatttccccattgttgaaagaagggaacgtattgacatgccaggaagtaaaacctgttttttttttttttaaaacaaagtttttttaaagaaaaagacgactttcacctttcactatgttgctcttgaaccaggaccaggaatgaaagttactgggagataacttcgaaggattttgcaacaaattcgagctgtccgactctgagaatggaagtaacagctagcagtcgccactatgttgacaggctatttgaccctgatccccagaaagttctacaaggtgtcatagacatgaaaaatgctgtaattggaaacaacaagcagaaagccaatctcattgttttaggagctgttccaagattgttgtacttgcttcagcaagaaacctcaagcacagagctgaaaactgaatgtgcagtggtgttgggaagtcttgctatgggtactgaaaacaatgtcaagtctctactggactgccatattatccctgccttattgcaaggactactgtccccagacctgaagtttattgaagcttgcctccgatgcctgcgtaccatcttcaccagtcctgtcactccagaggagctactgtatacagatgccacagtgataccacacctcatggcactgcttagcaggtcccgctatacccaggagtacatctgtcagatcttctcacactgctgtaaagtaagaaccagaataaatgttatctataatgtaaaatcttattatgcctttaagagatgtaccttctttgtgtaccctcccaggggtagtcatacatatataagtagacctgtgtgtgtgcgtgtatatatatatatatatatatatatatatatatatatatgtatatgtatatgtatatataaaatatatatatatttaaaacacaaatgacagcataccatacatactgttctgcaccttaacatttttcacttgacatatctctaaggctattccatatcagtacataaggacctctccctcattctttttttttttttttaacagtgcatagtattttagtgtgtagatttatttgtccagtcctctattgtggagcatttagtttgtttccagtcttatgctattacaaaacagtgctgcaaaaaataccttgtatatgaggcattttataagaaataaaattttggggtcaaagaatatatgtatttgtaattttaccacatttttaaataaagattataccactttatactacc

SEQ ID NO: 308534 - DNA, 1528 bp, Homo sapiens
gcggccgcccgcccgccctccaggaagcctcatcccggtctccaccattcccccaagcgtggtgtgcctcctgggcaccaccccctggggtggaccccggctcagtctcgggccagggagtgagcgagggtggagaggcgggatagacgggcagaggggaccgcggccgagccaaagacgtttccaactccgggagctcccgccggtgcgggttcccaggatggcgtctggcaggcggggtggctgggcttatagacaactggctgggcggcgcggcttggactttgccaagcgtttcactgagccttccttttagcgatgccgcttcccgggggccgaacgctctgccttgtgaagcgccgggcttgcagccggcctgagaacgagcgcccactcagctctcccgggctttggcaagaagaggtgcaggctccttggcccccatttcctcagagctgccaggccaagtctgtgcggcttctatcgcgtcccagcacctgggcaccggctgaagcagtttgctttttggcaatggtgattcgtatcagctgcaactcttcctagtgtgtgtggttttttaagcccctttcctccgctctgctcagaggtcgcggctctgagtcagaggaactctatgttccctgtgcctggtattccgtttttctttaaggggagtcaaacattgaaggggggaacaagggggtgagatttatttccccattgttgaaagaagggaacgtattgacatgccaggaagtaaaacctgttttttttttttttaaaacaaagtttttttaaagaaaaagacgactttcacctttcactatgttgctcttgaaccaggaccaggaatgaaagttactgggagataacttcgaaggattttgcaacaaattcgagctgtccgactctgagaatggaagtaacagctagcagtcgccactatgttgacaggctatttgaccctgatccccagaaagttctacaaggtgtcatagacatgaaaaatgctgtaattggaaacaacaagcagaaagccaatctcattgttttaggagctgttccaagattgttgtacttgcttcagcaagaaacctcaagcacagagctgaaaactgaatgtgcagtggtgttgggaagtcttgctatgggtactgaaaacaatgtcaagtctctactggactgccatattatccctgccttattgcaaggactactgtccccagacctgaagtttattgaagcttgcctccgatgcctgcgtaccatcttcaccagtcctgtcactccagaggagctactgtatacagtgagttttagatgtatttgagacattagttacatttccaccaccagcgtactcttaatttgcttagcatcttcagcttcatcataactgtgttatgtaaaaaagtctcagttggtcatgtgggctcaccccagtatcccagtgctttgggaggctgaggtgggaggattgcttgaggcccaggagttcaagatcaaccagagtgacataacaagactc

SEQ ID NO: 308535 - DNA, 4253 bp, Homo sapiens
actgataagctttttctcactgacattgtaacgcatgactgctaatcagagagaaaaagaaggggaagggaattggggaggaaaaaaaatcagaaggaagacgaaagatggggctataaaaacaaaactacctgatagttgaaacgctttcagagttgttcaaatcagtgagagtggcaacggaacacacaaacaactaattatggaactctactctggggatcctctctggctagataacctgtgctgatgtgcagacacgtggacatccccctctgagactggcggtccagaggcagtctctgccaggcagcattacccgctccgaggtggagcctcagcccccttcttagagctgttaagtctaaggtgtggcagagcagacagagatagaggcatctgaagtgagtataggttttttgactaagaaaaaaaacaacagcaaacatgactagtgatcttgaaatattttgtaccgagagaaagactgcatttatttgtagaatttatcaggtttctgataccactcattggatgtaaacatttcatgtttcctcacttttgatatgaaagtcggtaaaatgcagtattagtcccgggaggatgtgcacagctggtcagagcttccagaaggaatatcttccgaggactaaggtgatcaggttaagagggttcaacatcccacggccctcaccttcctccctcccacattccaggcatggagatatctggtttcagagtcagccccaaatctcctgcctataattactttaactggggtctctaaggttcccacttgagggctaaaatgtagttgggaaagagggcctactggggaggtctcacaggaggcagtgccctgggaaatgccaagtccagactcagtgccaagcagtaaccatctgcactcggggacagcgaggagctgaccgtggcctctgatgaccagcaggtattagatggaagtgaatgagagagagagagagagagtatgtgtgtgtgtgtgtatgtgtgtgttcgaacacatatgattgccagtatggagaatgaaagattaataatgctttctggagagtttgatgcaaaagtgggggaaacggagaaaaggcgctaaggctaaatccatctgcatttgctatatttcattagctaaagtcaggtcagggcagggccaaggcctccaattggcaaaggacagtgttatggctttaaaaagctgaaaccccaacctctaagtagatcacaatgttttctgagctttgcagtaattttctatggaaactaaaacctctaaaacatacaagctggcccaaatgagaacacaagcaaaagatgtggaagacagcaaaacctgagcactggtttgaaccaggcactgacatttgaaatgctttaagccttttcacattccttctttattccctccaaaaaaaaaagtcttgagtttaatttaggtctattttggctgagattagcatacctctgactcacaggatttaataaattatagtattattgaatacataggacatccctctaccccagcttactcttatctttttaatttaaaatagtattctgctaccaagaaggatgcaactgctagttttagatgtaaatagtgttatttactggactttgtgatattattttcttaactacactttactatggccctgttgaaaacagactatcaagttttttgtctctgttctgtcatctctcttaagccaggcacctttagagtgtttgcaatttgttcgaagtggttgaggatctcaggccctgctcacgtgaggtggagtgcaggggagctaccggtttccctgctgacctgctgaatgctaccttcccctcgagttgaatacaccttaaggaaaatgataacacgagggacgtgtaacttgttttgaagcattaaaaaccagcagctcttcactatgttccatattttaaccaaactactgtagactactaaacatagccaagccagaacattccttctggattaagcctaggccacttgaggggcagccaggggtgatggtgtcaggtgagaatcctgtgtcttgaaggagtggcctttacaggaagagtgcccatgttttcacctgcagcgttgccaccagagtgtgcaatacctcctgcacacaggctcagggtaaactgctccaaagctgggttttgtgttgcatacaaagtcaataaaatagttgctaatcctgaatggcagccagtgatgtgaaggtactattaaagtgaacaaaaactagattgcaacagttttctttccttgcttgaagtataacacacgctccatttgatcctgcctgaaagaagctaacattatatttgtgacagacagaggctccatcaagccaagcaacaattaacagctcaagtgtaagatttataaatgcccgtgtactcacccttcaattgttaccacccagaggttacaggactctttcccagcatttaggggaacaggcttttagagtatttagaagaccaggctataatcagtaatgtgcctgggagcaggaaatagctcccaatttatttatggccttgggaaaactcaatccggtgtctccttgtagctcagaacactaatagcccccctggaagagagtggcacattgagctccaaacccaatcaacatacatccacttggctgcagatctgactgctgggtcatgaaggccgtgaaatgatgtttgccctcaagtcactagatattttaagaagccctatttttctccctttttgcaggagtagagagatgaaagaggacagaccattgaaaacttttagatgcaggagaattgagacttccacaagggagagaaacacagcctccccagaatccattatgccatcgggttgtggcactctcacccttgccataataccgtttcctaacaatatcaaatcagtggatgaaatacaagctcagaaacaggaacattttcctaaatcataacctaatagcaaacaaaaattgaaaaaacaattattctgaagctcattattcttagatctgtagatatatatgtgttgactcccacaggatggcaccaagtaaagatcttaagagcatagtaggggttctgagaccgactgtcacccgtggatcctgatggggaagaacagaggcttcactgtagctatagttttccaccaagtcaatcaaattaaaacatgactcattgtcccctccaaagattcataaaattcttgagctaaagtgatcttctgaagaaaagccacctaacaatgttaggaggctcataaagctcatttctcttttccctggtatgcacaaatatcaagcctataaaaaagtaattatttccccaaacctgtaaccactgcattcgttttctttggaggaacattgtagcatttcaggagggtcgagagatctaaagagtttggtctgaatgtgtgtctgtacaattccctttggcattaaactctgaaacctacaatcaatggccttcaaattggtgttaaattgggagaacaccctactgctttctgagtctacgagcaacagaaagactggtcttagtgcaattaggcaggagggatttggactcagaaacagccacagaagtatttctcagcactcccagttcctgccaacttagctggaaacgatgccacagcgagaccagaaagaggagtcgccttaaggtatccctacaaagtcacctttctgataaaaaggagggaaaaaaaagttagatatctaaaataagcctagaatctcacacacagctgtgacttctaagtgaaactcttttctccctcatgtccttaaatagtcacagaatcacacacagcctgacttttaaagacaagcttggctacaggaaatgaaccaaccccaaagactcttctaacctgtctcctgactgggctccttcagaaagtgttctcctgttccatctgtagggctgcttactactggaacctaaaacaaaacctgttgtttgtaccatcactttttctggtgtttcctgtgcttttgtgattccaagtctgttcataagttctgaagataaattatgtgaaatcatattttggcatatgggggtggaggatgaattctttacagactttttaagatgatccatttgtaccacagaaaacattttggaagttgttatatatgagtatataaatttttcttttcatattttacattaaaataaagctttattcagtcattaaaaaaaaaaag

SEQ ID NO: 308536 - DNA, 4199 bp, Homo sapiens
actgataagctttttctcactgacattgtaacgcatgactgctaatcagagagaaaaagaaggggaagggaattggggaggaaaaaaaatcagaaggaagacgaaagatggggctataaaaacaaaactacctgatagttgaaacgctttcagagttgttcaaatcagtgagagtggcaacggaacacacaaacaactaattatggaactctactctggggatcctctctggctagataacctgtgctgatgtgcagacacgtggacatccccctctgagactggcggtccagaggcagtctctgccaggcagcattacccgctccgaggtggagcctcagcccccttcttagagctgttaagtctaaggtgtggcagagcagacagagatagaggcatctgaagtgagtataggttttttgactaagaaaaaaaacaacagcaaacatgactagtgatcttgaaatattttgtaccgagagaaagactgcatttatttgtagaatttatcaggtttctgataccactcattggatgtaaacatttcatgtttcctcacttttgatatgaaagtcggtaaaatgcagtattagtcccgggaggatgtgcacagctggtcagagcttccagaaggaatatcttccgaggactaaggtgatcaggttaagagggttcaacatcccacggccctcaccttcctccctcccacattccaggcatggagatatctggtttcagagtcagccccaaatctcctgcctataattactttaactggggtctctaaggttcccacttgagggctaaaatgtagttgggaaagagggcctactggggaggtctcacaggaggcagtgccctgggaaatgccaagtccagactcagtgccaagcagtaaccatctgcactcggggacagcgaggagctgaccgtggcctctgatgaccagcaggtattagatggaagtgaatgagagagagagagagagagtatgtgtgtgtgtgtgtatgtgtgtgttcgaacacatatgattgccagtatggagaatgaaagattaataatgctttctggagagtttgatgcaaaagtgggggaaacggagaaaaggcgctaaggctaaatccatctgcatttgctatatttcattagctaaagtcaggtcagggcagggccaaggcctccaattggcaaaggacagtgttatggctttaaaaagctgaaaccccaacctctaagtagatcacaatgttttctgagctttgcagtaattttctatggaaactaaaacctctaaaacatacaagctggcccaaatgagaacacaagcaaaagatgtggaagacagcaaaacctgagcactggtttgaaccaggcactgacatttgaaatgctttaagccttttcacattccttctttattccctccaaaaaaaaaagtcttgagtttaatttaggtctattttggctgagattagcatacctctgactcacaggatttaataaattatagtattattgaatacataggacatccctctaccccagcttactcttatctttttaatttaaaatagtattctgctaccaagaaggatgcaactgctagttttagatgtaaatagtgttatttactggactttgtgatattattttcttaactacactttactatggccctgttgaaaacagactatcaagttttttgtctctgttctgtcatctctcttaagccaggcacctttagagtgtttgcaatttgttcgaagtggttgaggatctcaggccctgctcacgtgaggtggagtgcaggggagctaccggtttccctgctgacctgctgaatgctaccttcccctcgagttgaatacaccttaaggaaaatgataacacgagggacgtgtaacttgttttgaagcattaaaaaccagcagctcttcactatgttccatattttaaccaaactactgtagactactaaacatagccaagccagaacattccttctggattaagcctaggccacttgaggggcagccaggggtgatggtgtcaggtgagaatcctgtgtcttgaaggagtggcctttacaggaagagtgcccatgttttcacctgcagcgttgccaccagagtgtgcaatacctcctgcacacaggctcagggtaaactgctccaaagctgggttttgtgttgcatacaaagtcaataaaatagttgctaatcctgaatggcagccagtgatgtgaaggtactattaaagtgaacaaaaactagattgcaacagttttctttccttgcttgaagtataacacacgctccatttgatcctgcctgaaagaagctaacattatatttgtgacagacagaggctccatcaagccaagcaacaattaacagctcaagtgtaagatttataaatgcccgtgtactcacccttcaattgttaccacccagaggttacaggactctttcccagcatttaggggaacaggcttttagagtatttagaagaccaggctataatcagtaatgtgcctgggagcaggaaatagctcccaatttatttatggccttgggaaaactcaatccggtgtctccttgtagctcagaacactaatagcccccctggaagagagtggcacattgagctccaaacccaatcaacatacatccacttggctgcagatctgactgctgggtcatgaaggccgtgaaatgatgtttgccctcaagtcactagatattttaagaagccctatttttctccctttttgcaggagtagagagatgaaagaggacagaccattgtccccagaatccattatgccatcgggttgtggcactctcacccttgccataataccgtttcctaacaatatcaaatcagtggatgaaatacaagctcagaaacaggaacattttcctaaatcataacctaatagcaaacaaaaattgaaaaaacaattattctgaagctcattattcttagatctgtagatatatatgtgttgactcccacaggatggcaccaagtaaagatcttaagagcatagtaggggttctgagaccgactgtcacccgtggatcctgatggggaagaacagaggcttcactgtagctatagttttccaccaagtcaatcaaattaaaacatgactcattgtcccctccaaagattcataaaattcttgagctaaagtgatcttctgaagaaaagccacctaacaatgttaggaggctcataaagctcatttctcttttccctggtatgcacaaatatcaagcctataaaaaagtaattatttccccaaacctgtaaccactgcattcgttttctttggaggaacattgtagcatttcaggagggtcgagagatctaaagagtttggtctgaatgtgtgtctgtacaattccctttggcattaaactctgaaacctacaatcaatggccttcaaattggtgttaaattgggagaacaccctactgctttctgagtctacgagcaacagaaagactggtcttagtgcaattaggcaggagggatttggactcagaaacagccacagaagtatttctcagcactcccagttcctgccaacttagctggaaacgatgccacagcgagaccagaaagaggagtcgccttaaggtatccctacaaagtcacctttctgataaaaaggagggaaaaaaaagttagatatctaaaataagcctagaatctcacacacagctgtgacttctaagtgaaactcttttctccctcatgtccttaaatagtcacagaatcacacacagcctgacttttaaagacaagcttggctacaggaaatgaaccaaccccaaagactcttctaacctgtctcctgactgggctccttcagaaagtgttctcctgttccatctgtagggctgcttactactggaacctaaaacaaaacctgttgtttgtaccatcactttttctggtgtttcctgtgcttttgtgattccaagtctgttcataagttctgaagataaattatgtgaaatcatattttggcatatgggggtggaggatgaattctttacagactttttaagatgatccatttgtaccacagaaaacattttggaagttgttatatatgagtatataaatttttcttttcatattttacattaaaataaagctttattcagtcattaaaaaaaaaaag

SEQ ID NO: 308537 - DNA, 3816 bp, Homo sapiens
ttatactttcaggtatggtttaggaatgatttattacaagcaagaaaaattcagccttgcagaaatgcatttccaaaaagcgcttgatatcaaccctcaaagttcagttttactttgccacattggagtagttcaacatgcactgaaaaaatcagagaaggctttggataccctaaacaaagccattgtcattgatcccaagaaccctctatgcaaatttcacagagcctcagttttatttgcaaatgaaaaatataagtctgctttacaagaacttgaagaattgaaacaaattgttcccaaagaatccctcgtttacttcttaataggaaaggtttacaagaagttaggtcaaacgcacctcgccctgatgaatttctcttgggctatggatttagatcctaaaggagccaataaccagattaaagaggcaattgataagcgttatcttccagatgatgaggagccaataacccaagaagaacagatcatgggaacagatgaatcccaggagagcagcatgacagatgcggatgacacacaacttcatgcagctgaaagtgatgaattttaacttctggaaatcagacttttacaactggatgtgtgactagtgctgacgtgtttcttgtccctctgtatactgagtctttactcttgagctggcggtgtcatcgtccgtcacttataccatgagtgtgccactttcattggaccctgactgtatacagaatgaaaggcagtgcaatatttagctgctaacaagactggctcttttaccagtatgaatgacaatttatggggggtagggtggggaactttcttttctgtttttctttaatctccctttgttggaaagtatcatgaaaggaagagttatgctttatcttgaaggaaccattagatatggaaaatagtgatgaaccagagtttcttggttgctttttcaaaaatttgtttttatttggttctgttcctgataaacagagtaactgaccttcatttctaggttcttcaagaatggtgtttgcaagtgccagatggaacaataaaagacgttgcctataacagtgacttgattgccaaggaatgtaaattaccttaaacttgcagtatctcccataaacaaatgtaatgggcatattgggactcgtatgtaggaatcaaatatccctccatacagtgtactcttattcttggcaagaatgctttaatgtctaaccaagaattttaatttattcatcttgcttcaaagtgttgatcattgttgtcttggtattgcaaactttaaaattgtttcttaccatattgcctcttctctttgagctctgtgggatcacctttaacattcagagatgatagagtggttccccactgagaagccaaaacaaggcccttaataaccccttaagttcaccatatgaatcagaaggagaacactaaagtggagagacttttaagagatcatgatagtgaaagccttaatataatcagaattgtaccataaccttgaatctatatttgttcaaaacatccctttgacttttctaagtgtttgcttaagcagagtgtaagaatgtgtggttacctttggttgagatcctttccattctttttgactctctgcttcagattttttcagtagtgtgagtcaccaaaacatttactaagagtaattgggtttaggatgttggaaatttttagcttgggggaaaaaacattcttatgaaggagataggttctcttctgagtttgtcataatatagattggtgtctttggaaaatggccacaattttaagaattcaattatgcatataaaatgataattattggaattccacagtaacagatttaaacagtcttaaattgtttatctcctttactgtaatgtattgaaatttttagagaaattttagttgttaacattttattaagtgccagtgtcagaatataacaaattatagtttcttatgaatgacaggcctacagttattattctggattatttgatggaggacaaacttacctgtatttgttagtcaagctgtgaaaataaggtggattacaaaagatgtgaaaaaaattttagtctgtagactcagtaattttctataatttactgttaatctcatttgaacatggattaggtacaatttataaattaattcaagtcagggtctttaggtatcaggtgccagagagatatttaacagatttccctacctaaatttatgtatatgtactgtctaaaacaatacttttttaaaaaaaaggaacagttgggagaaaataaatataatgaaaaattcccagaggctagcacttggattctaacacgtatgctattgtattatccattagttctgtaatatttaattttagattcttttatttttttaattggcaaagcacaaggtgctgtataacagtgtcatttagagttttatagaaagcttcaacctgagttctgcgttataaagcctggagaaagctaagcttagaacataacttgctgaagtataattatctttttgtagcaggaatttatgtgccagaggtgagagtctttctggtactgattttttgagaccaaggataaaaggatcgttttgtaagacatgccatggcaatggctggttgggggacagtttccgcccaagcttggcctattttatttttcctcatacctactttcaaagtcatttaggtatttgaagccttatttcccacgtagtaacactttctggcttttgcagtttctttttttgtttggttttgttttttgcatggaatggggatcaaacaacccgaagaagaacacattttgatcaagcaaaatgtttgcttcaaatttcagaagtttattttacagaaattaaattaagtagtttgacatccttttctctgtttcacacatatattaggttggtgcataagtaattgtggtttttgccatgacttttatggcaaaacctgcaattacttttgcaccaacttaatacatctatatacatatatatatacgcgcacacacttgttcagaagttatgttgtggccttggatttgtttttccccttggaaatggttcttaactctgggattttagaaggttagaatattttttcaagagaacagtggtactcaaaagaatgaaaggtggtccctacattttctgtattcatcacttaaaatttttaatttttccgagaactacaagtaacatttgaaccatgctgctgttgtaccttaaacaaaaactcagtgataaccagtatttagtctattaaaaatgctctttttgaagaaaaaagtttggaagtctctgattagccagagtatagtatgagtcttcactgagaaatatggtgacccattttctttgtgaaaacctgggaaaatgcaagtgtgggtatgaagtgtgtgttctgtttgcattgaaacaatgtaattttgtgtcttctttttgctttaactgacttatttcagaaattgtacagtgttgagggggaaagtcttttctgttaatatatttgcaattcattaaaggatatggaaaatccaaataagttacttttgaaagcaatttataatcaagttgttaaagctatatgaaagctgtgccatctgtattttaataagaaggcacagaaaaacagagatacagttttatgtttcacaaaaaactagagcaatgtttatctaattttttaaaacttacactcttaatatatttatatttttaaacggtcatactcttttttagtattatttggaatatcaaaataaatactatgacaaaaacaatggtaatttt

SEQ ID NO: 308538 - DNA, 3761 bp, Homo sapiens
ttatactttcaggtatggtttaggaatgatttattacaagcaagaaaaattcagccttgcagaaatgcatttccaaaaagcgcttgatatcaaccctcaaagttcagttttactttgccacattggagtagttcaacatgcactgaaaaaatcagagaaggctttggataccctaaacaaagccattgtcattgatcccaagaaccctctatgcaaatttcacagagcctcagttttatttgcaaatgaaaaatataagtctgctttacaagaacttgaagaattgaaacaaattgttcccaaagaatccctcgtttacttcttaataggaaaggtttacaagaagttaggtcaaacgcacctcgccctgatgaatttctcttgggctatggatttagatcctaaaggagccaataaccagattaaagaggcaattgataagcgttatcttccagatgatgaggagccaataacccaagaagaacagatcatgggaacagatgaatcccaggagagcagcatgacagatgcggatgacacacaacttcatgcagctgaaagtgatgaattttaacttctggaaatcagacttttacaactggatgtgtgactagtgctgacgtgtttcttgtccctctgtatactgagtctttactcttgagctggcggtgtcatcgtccgtcacttataccatgagtgtgccactttcattggaccctgactgtatacagaatgaaaggcagtgcaatatttagctgctaacaagactggctcttttaccagtatgaatgacaatttatggggggtagggtggggaactttcttttctgtttttctttaatctccctttgttggaaagtatcatgaaaggaagagttatgctttatcttgaaggaaccattagatatggaaaatagtgatgaaccagagtttcttggttgctttttcaaaaatttgtttttatttggttctgttcctgataaacagagtaactgaccttcatttctaggttcttcaagaatggtgtttgcaagtgccagatggaacaataaaagacgttgcctataacagtgacttgattgccaaggaatgtaaattaccttaaacttgcagtatctcccataaacaaatgtaatgggcatattgggactcgtatgtaggaatcaaatatccctccatacagtgtactcttattcttggcaagaatgctttaatgtctaaccaagaattttaatttattcatcttgcttcaaagtgttgatcattgttgtcttggtattgcaaactttaacattcagagatgatagagtggttccccactgagaagccaaaacaaggcccttaataaccccttaagttcaccatatgaatcagaaggagaacactaaagtggagagacttttaagagatcatgatagtgaaagccttaatataatcagaattgtaccataaccttgaatctatatttgttcaaaacatccctttgacttttctaagtgtttgcttaagcagagtgtaagaatgtgtggttacctttggttgagatcctttccattctttttgactctctgcttcagattttttcagtagtgtgagtcaccaaaacatttactaagagtaattgggtttaggatgttggaaatttttagcttgggggaaaaaacattcttatgaaggagataggttctcttctgagtttgtcataatatagattggtgtctttggaaaatggccacaattttaagaattcaattatgcatataaaatgataattattggaattccacagtaacagatttaaacagtcttaaattgtttatctcctttactgtaatgtattgaaatttttagagaaattttagttgttaacattttattaagtgccagtgtcagaatataacaaattatagtttcttatgaatgacaggcctacagttattattctggattatttgatggaggacaaacttacctgtatttgttagtcaagctgtgaaaataaggtggattacaaaagatgtgaaaaaaattttagtctgtagactcagtaattttctataatttactgttaatctcatttgaacatggattaggtacaatttataaattaattcaagtcagggtctttaggtatcaggtgccagagagatatttaacagatttccctacctaaatttatgtatatgtactgtctaaaacaatacttttttaaaaaaaaggaacagttgggagaaaataaatataatgaaaaattcccagaggctagcacttggattctaacacgtatgctattgtattatccattagttctgtaatatttaattttagattcttttatttttttaattggcaaagcacaaggtgctgtataacagtgtcatttagagttttatagaaagcttcaacctgagttctgcgttataaagcctggagaaagctaagcttagaacataacttgctgaagtataattatctttttgtagcaggaatttatgtgccagaggtgagagtctttctggtactgattttttgagaccaaggataaaaggatcgttttgtaagacatgccatggcaatggctggttgggggacagtttccgcccaagcttggcctattttatttttcctcatacctactttcaaagtcatttaggtatttgaagccttatttcccacgtagtaacactttctggcttttgcagtttctttttttgtttggttttgttttttgcatggaatggggatcaaacaacccgaagaagaacacattttgatcaagcaaaatgtttgcttcaaatttcagaagtttattttacagaaattaaattaagtagtttgacatccttttctctgtttcacacatatattaggttggtgcataagtaattgtggtttttgccatgacttttatggcaaaacctgcaattacttttgcaccaacttaatacatctatatacatatatatatacgcgcacacacttgttcagaagttatgttgtggccttggatttgtttttccccttggaaatggttcttaactctgggattttagaaggttagaatattttttcaagagaacagtggtactcaaaagaatgaaaggtggtccctacattttctgtattcatcacttaaaatttttaatttttccgagaactacaagtaacatttgaaccatgctgctgttgtaccttaaacaaaaactcagtgataaccagtatttagtctattaaaaatgctctttttgaagaaaaaagtttggaagtctctgattagccagagtatagtatgagtcttcactgagaaatatggtgacccattttctttgtgaaaacctgggaaaatgcaagtgtgggtatgaagtgtgtgttctgtttgcattgaaacaatgtaattttgtgtcttctttttgctttaactgacttatttcagaaattgtacagtgttgagggggaaagtcttttctgttaatatatttgcaattcattaaaggatatggaaaatccaaataagttacttttgaaagcaatttataatcaagttgttaaagctatatgaaagctgtgccatctgtattttaataagaaggcacagaaaaacagagatacagttttatgtttcacaaaaaactagagcaatgtttatctaattttttaaaacttacactcttaatatatttatatttttaaacggtcatactcttttttagtattatttggaatatcaaaataaatactatgacaaaaacaatggtaatttt

SEQ ID NO: 308539 - DNA, 3722 bp, Homo sapiens
atgcattttattttcacagcaataagaactaatacaataaggaagtatattgattaagatttagttagcttttgtgaagatgattgggaaatcaaataagtaaaaacgcttggtcaaaactttaaaaatttttgctactttaaggtttttctttgcctttttcagtctgctttacaagaacttgaagaattgaaacaaattgttcccaaagaatccctcgtttacttcttaataggaaaggtttacaagaagttaggtcaaacgcacctcgccctgatgaatttctcttgggctatggatttagatcctaaaggagccaataaccagattaaagaggcaattgataagcgttatcttccagatgatgaggagccaataacccaagaagaacagatcatgggaacagatgaatcccaggagagcagcatgacagatgcggatgacacacaacttcatgcagctgaaagtgatgaattttaacttctggaaatcagacttttacaactggatgtgtgactagtgctgacgtgtttcttgtccctctgtatactgagtctttactcttgagctggcggtgtcatcgtccgtcacttataccatgagtgtgccactttcattggaccctgactgtatacagaatgaaaggcagtgcaatatttagctgctaacaagactggctcttttaccagtatgaatgacaatttatggggggtagggtggggaactttcttttctgtttttctttaatctccctttgttggaaagtatcatgaaaggaagagttatgctttatcttgaaggaaccattagatatggaaaatagtgatgaaccagagtttcttggttgctttttcaaaaatttgtttttatttggttctgttcctgataaacagagtaactgaccttcatttctaggttcttcaagaatggtgtttgcaagtgccagatggaacaataaaagacgttgcctataacagtgacttgattgccaaggaatgtaaattaccttaaacttgcagtatctcccataaacaaatgtaatgggcatattgggactcgtatgtaggaatcaaatatccctccatacagtgtactcttattcttggcaagaatgctttaatgtctaaccaagaattttaatttattcatcttgcttcaaagtgttgatcattgttgtcttggtattgcaaactttaaaattgtttcttaccatattgcctcttctctttgagctctgtgggatcacctttaacattcagagatgatagagtggttccccactgagaagccaaaacaaggcccttaataaccccttaagttcaccatatgaatcagaaggagaacactaaagtggagagacttttaagagatcatgatagtgaaagccttaatataatcagaattgtaccataaccttgaatctatatttgttcaaaacatccctttgacttttctaagtgtttgcttaagcagagtgtaagaatgtgtggttacctttggttgagatcctttccattctttttgactctctgcttcagattttttcagtagtgtgagtcaccaaaacatttactaagagtaattgggtttaggatgttggaaatttttagcttgggggaaaaaacattcttatgaaggagataggttctcttctgagtttgtcataatatagattggtgtctttggaaaatggccacaattttaagaattcaattatgcatataaaatgataattattggaattccacagtaacagatttaaacagtcttaaattgtttatctcctttactgtaatgtattgaaatttttagagaaattttagttgttaacattttattaagtgccagtgtcagaatataacaaattatagtttcttatgaatgacaggcctacagttattattctggattatttgatggaggacaaacttacctgtatttgttagtcaagctgtgaaaataaggtggattacaaaagatgtgaaaaaaattttagtctgtagactcagtaattttctataatttactgttaatctcatttgaacatggattaggtacaatttataaattaattcaagtcagggtctttaggtatcaggtgccagagagatatttaacagatttccctacctaaatttatgtatatgtactgtctaaaacaatacttttttaaaaaaaaggaacagttgggagaaaataaatataatgaaaaattcccagaggctagcacttggattctaacacgtatgctattgtattatccattagttctgtaatatttaattttagattcttttatttttttaattggcaaagcacaaggtgctgtataacagtgtcatttagagttttatagaaagcttcaacctgagttctgcgttataaagcctggagaaagctaagcttagaacataacttgctgaagtataattatctttttgtagcaggaatttatgtgccagaggtgagagtctttctggtactgattttttgagaccaaggataaaaggatcgttttgtaagacatgccatggcaatggctggttgggggacagtttccgcccaagcttggcctattttatttttcctcatacctactttcaaagtcatttaggtatttgaagccttatttcccacgtagtaacactttctggcttttgcagtttctttttttgtttggttttgttttttgcatggaatggggatcaaacaacccgaagaagaacacattttgatcaagcaaaatgtttgcttcaaatttcagaagtttattttacagaaattaaattaagtagtttgacatccttttctctgtttcacacatatattaggttggtgcataagtaattgtggtttttgccatgacttttatggcaaaacctgcaattacttttgcaccaacttaatacatctatatacatatatatatacgcgcacacacttgttcagaagttatgttgtggccttggatttgtttttccccttggaaatggttcttaactctgggattttagaaggttagaatattttttcaagagaacagtggtactcaaaagaatgaaaggtggtccctacattttctgtattcatcacttaaaatttttaatttttccgagaactacaagtaacatttgaaccatgctgctgttgtaccttaaacaaaaactcagtgataaccagtatttagtctattaaaaatgctctttttgaagaaaaaagtttggaagtctctgattagccagagtatagtatgagtcttcactgagaaatatggtgacccattttctttgtgaaaacctgggaaaatgcaagtgtgggtatgaagtgtgtgttctgtttgcattgaaacaatgtaattttgtgtcttctttttgctttaactgacttatttcagaaattgtacagtgttgagggggaaagtcttttctgttaatatatttgcaattcattaaaggatatggaaaatccaaataagttacttttgaaagcaatttataatcaagttgttaaagctatatgaaagctgtgccatctgtattttaataagaaggcacagaaaaacagagatacagttttatgtttcacaaaaaactagagcaatgtttatctaattttttaaaacttacactcttaatatatttatatttttaaacggtcatactcttttttagtattatttggaatatcaaaataaatactatgacaaaaacaatggtaatttt

SEQ ID NO: 308540 - DNA, 3563 bp, Homo sapiens
ttatactttcaggtatggtttaggaatgatttattacaagcaagaaaaattcagccttgcagaaatgcatttccaaaaagcgcttgatatcaaccctcaaagttcagttttactttgccacattggagtagttcaacatgcactgaaaaaatcagagaaggctttggataccctaaacaaagccattgtcattgatcccaagaaccctctatgcaaatttcacagagcctcagttttatttgcaaatgaaaaatataagtctgctttacaagaacttgaagaattgaaacaaattgttcccaaagaatccctcgtttacttcttaataggaaaggtttacaagaagttaggtcaaacgcacctcgccctgatgaatttctcttgggctatggatttagatcctaaaggagccaataaccagattaaagaggcaattgataagcgttatcttccagatgatgaggagccaataacccaagaagaacagatcatgggaacagatgaatcccaggagagcagcatgacagatgcggatgacacacaacttcatgcagctgaaagtgatgaattttaacttctggaaatcagacttttacaactggatgtgtgactagtgctgacgtgtttcttgtccctctgtatactgagtctttactcttgagctggcggtgtcatcgtccgtcacttataccatgagtgtgccactttcattggaccctgactgtatacagaatgaaaggcagtgcaatatttagctgctaacaagactggctcttttaccagtatgaatgacaatttatggggggtagggtggggaactttcttttctgtttttctttaatctccctttgttggaaagtatcatgaaaggaagagttatgctttatcttgaaggaaccattagatatggaaaatagtgatgaaccagagtttcttggttgctttttcaaaaatttgtttttatttggttctgttcctgataaacagagtaactgaccttcatttctaggttcttcaagaatggtgtttgcaagtgccagatggaacaataaaagacgttgcctataacagtgacttgattgccaaggaatgtaaattaccttaaacttgcagtatctcccataaacaaatgtaatgggcatattgggactcgtatgtaggaatcaaatatccctccatacagtgtactcttattcttggcaagaatgctttaatgtctaaccaagaattttaatttattcatcttgcttcaaagtgttgatcattgttgtcttggtattgcaaactttaaaattgtttcttaccatattgcctcttctctttgagctctgtgggatcacctttaacattcagagatgatagagtggttccccactgagaagccaaaacaaggcccttaataaccccttaagttcaccatatgaatcagaaggagaacactaaagtggagagacttttaagagatcatgatagtgaaagccttaatataatcagaattgtaccataaccttgaatctatatttgttcaaaacatccctttgacttttctaagtgtttgcttaagcagagtgtaagaatgtgtggttacctttggttgagatcctttccattctttttgactctctgcttcagattttttcagtagtgtgagtcaccaaaacatttactaagagtaattgggtttaggatgttggaaatttttagcttgggggaaaaaacattcttatgaaggagataggttctcttctgagtttgtcataatatagattggtgtctttggaaaatggccacaattttaagaattcaattatgcatataaaatgataattattggaattccacagtaacagatttaaacagtcttaaattgtttatctcctttactgtaatgtattgaaatttttagagaaattttagttgttaacattttattaagtgccagtgtcagaatataacaaattatagtttcttatgaatgacaggcctacagttattattctggattatttgatggaggacaaacttacctgtatttgttagtcaagctgtgaaaataaggtggattacaaaagatgtgaaaaaaattttagtctgtagactcagtaattttctataatttactgttaatctcatttgaacatggattaggtacaatttataaattaattcaagtcagggtctttaggtatcaggtgccagagagatatttaacagatttccctacctaaatttatgtatatgtactgtctaaaacaatacttttttaaaaaaaaggaacagttgggagaaaataaatataatgaaaaattcccagaggctagcacttggattctaacacgtatgctattgtattatccattagttctgtaatatttaattttagattcttttatttttttaattggcaaagcacaaggtgctgtataacagtgtcatttagagttttatagaaagcttcaacctgagttctgcgttataaagcctggagaaagctaagcttagaacataacttgctgaagtataattatctttttgtagcaggaatttatgtgccagaggtgagagtctttctggtactgattttttgagaccaaggataaaaggatcgttttgtaagacatgccatggcaatggctggttgggggacagtttccgcccaagcttggcctattttatttttcctcatacctactttcaaagtcatttaggtatttgaagccttatttcccacgtagtaacactttctggcttttgcagtttctttttttgtttggttttgttttttgcatggaatggggatcaaacaacccgaagaagaacacattttgatcaagcaaaatgtttgcttcaaatttcagaagtttattttacagaaattaaattaagtagtttgacatccttttctctgtttcacacatatattaggttggtgcataagtaattgtggtttttgccatgacttttatggcaaaacctgcaattacttttgcaccaacttaatacatctatatacatatatatatacgcgcacacacttgttcagaagttatgttgtggccttggatttgtttttccccttggaaatggttcttaactctgggattttagaaggttagaatattttttcaagagaacagtggtactcaaaagaatgaaaggtggtccctacattttctgtattcatcacttaaaatttttaatttttccgagaactacaagtaacatttgaaccatgctgctgttgtaccttaaacaaaaactcagtgataaccagtatttagtctattaaaaatgctctttttgaagaaaaaagtttggaagtctctgattagccagagtatagtatgagtcttcactgagaaatatggtgacccattttctttgtgaaaacctgggaaaatgcaagtgtgggtatgaagtgtgtgttctgtttgcattgaaacaatgtaattttgtgtcttctttttgctttaactgacttatttcagaaattgtacagtgttgagggggaaagtcttttctgttaatatatttgcaattcattaaaggatatggaaaatcca

SEQ ID NO: 308541 - DNA, 3738 bp, Homo sapiens
ttatactttcaggtatggtttaggaatgatttattacaagcaagaaaaattcagccttgcagaaatgcatttccaaaaagcgcttgatatcaaccctcaaagttcagttttactttgccacattggagtagttcaacatgcactgaaaaaatcagagaaggctttggataccctaaacaaagccattgtcattgatcccaagaaccctctatgcaaatttcacagagcctcagttttatttgcaaatgaaaaatataagtctgctttacaagaacttgaagaattgaaacaaattgttcccaaagaatccctcgtttacttcttaataggaaaggtttacaagaagttaggtcaaacgcacctcgccctgatgaatttctcttgggctatggatttagatcctaaaggagccaataaccagattaaagaggcaattgataagcgttatcttccagatgatgaggagccaataacccaagaagaacagatcatgggaacagatgaatcccaggagagcagcatgacagatgcggatgacacacaacttcatgcagctgaaagtgatgaattttaacttctggaaatcagacttttacaactggatgtgtgactagtgctgacgtgtttcttgtccctctgtatactgagtctttactcttgagctggcggtgtcatcgtccgtcacttataccatgagtgtgccactttcattggaccctgactgtatacagaatgaaaggcagtgcaatatttagctgctaacaagactggctcttttaccagtatgaatgacaatttatggggggtagggtggggaactttcttttctgtttttctttaatctccctttgttggaaagtatcatgaaaggaagagttatgctttatcttgaaggaaccattagatatggaaaatagtgatgaaccagagtttcttggttgctttttcaaaaatttgtttttatttggttctgttcctgataaacagagtaactgaccttcatttctaggttcttcaagaatggtgtttgcaagtgccagatggaacaataaaagacgttgcctataacagtgacttgattgccaaggaatgtaaattaccttaaacttgcagtatctcccataaacaaatgtaatgggcatattgggactcgtatgtaggaatcaaatatccctccatacagtgtactcttattcttggcaagaatgctttaatgtctaaccaagaattttaatttattcatcttgcttcaaagtgttgatcattgttgtcttggtattgcaaactttaaaattgtttcttaccatattgcctcttctctttgagctctgtgggatcacctttaacattcagagatgatagagtggttccccactgagaagccaaaacaaggcccttaataaccccttaagttcaccatatgaatcagaaggagaacactaaagtggagagacttttaagagatcatgatagtgaaagccttaatataatcagaattgtaccataaccttgaatctatatttgttcaaaacatccctttgacttttctaagtgtttgcttaagcagagtgtaagaatgtgtggttacctttggttgagatcctttccattctttttgactctctgcttcagattttttcagtagtgtgagtcaccaaaacatttactaagagtaattgggtttaggatgttggaaatttttagcttgggggaaaaaacattcttatgaaggagataggttctcttctgagtttgtcataatatagattggtgtctttggaaaatggccacaattttaagaattcaattatgcatataaaatgataattattggaattccacagtaacagatttaaacagtcttaaattgtttatctcctttactgtaatgtattgaaatttttagagaaattttagttgttaacattttattaagtgccagtgtcagaatataacaaattatagtttcttatgaatgacaggcctacagttattattctggattatttgatggaggacaaacttacctgtatttgttagtcaagctgtgaaaataaggtggattacaaaagatgtgaaaaaaattttagtctgtagactcagtaattttctataatttactgttaatctcatttgaacatggattaggtacaatttataaattaattcaagtcagggtctttaggtatcaggtgccagagagatatttaacagatttccctacctaaatttatgtatatgtactgtctaaaacaatacttttttaaaaaaaaggaacagttgggagaaaataaatataatgaaaaattcccagaggctagcacttggattctaacacgtatgctattgtattatccattagttctgtaatatttaattttagattcttttatttttttaattggcaaagcacaaggtgctgtataacagtgtcatttagagttttatagaaagcttcaacctgagttctgcgttataaagcctggagaaagctaagcttagaacataacttgctgaagtataattatctttttgtagcaggaatttatgtgccagaggtgagagtctttctggtactgattttttgagaccaaggataaaaggatcgttttgtaagacatgccatggcaatggctggttgggggacagtttccgcccaagcttggcctattttatttttcctcatacctactttcaaagtcatttaggtatttgaagccttatttcccacgtagtaacactttctggcttttgcagtttctttttttgtttggttttgttttttgcatggaatggggatcaaacaacccgaagaagaacacattttgatcaagcaaaatgtttgcttcaaatttcagaagtttattttacagaaattaaattaagtagtttgacatccttttctctgtttcaccaacttaatacatctatatacatatatatatacgcgcacacacttgttcagaagttatgttgtggccttggatttgtttttccccttggaaatggttcttaactctgggattttagaaggttagaatattttttcaagagaacagtggtactcaaaagaatgaaaggtggtccctacattttctgtattcatcacttaaaatttttaatttttccgagaactacaagtaacatttgaaccatgctgctgttgtaccttaaacaaaaactcagtgataaccagtatttagtctattaaaaatgctctttttgaagaaaaaagtttggaagtctctgattagccagagtatagtatgagtcttcactgagaaatatggtgacccattttctttgtgaaaacctgggaaaatgcaagtgtgggtatgaagtgtgtgttctgtttgcattgaaacaatgtaattttgtgtcttctttttgctttaactgacttatttcagaaattgtacagtgttgagggggaaagtcttttctgttaatatatttgcaattcattaaaggatatggaaaatccaaataagttacttttgaaagcaatttataatcaagttgttaaagctatatgaaagctgtgccatctgtattttaataagaaggcacagaaaaacagagatacagttttatgtttcacaaaaaactagagcaatgtttatctaattttttaaaacttacactcttaatatatttatatttttaaacggtcatactcttttttagtattatttggaatatcaaaataaatactatgacaaaaacaatggtaatttt

SEQ ID NO: 308542 - DNA, 3752 bp, Homo sapiens
ttatactttcaggtatggtttaggaatgatttattacaagcaagaaaaattcagccttgcagaaatgcatttccaaaaagcgcttgatatcaaccctcaaagttcagttttactttgccacattggagtagttcaacatgcactgaaaaaatcagagaaggctttggataccctaaacaaagccattgtcattgatcccaagaaccctctatgcaaatttcacagagcctcagttttatttgcaaatgaaaaatataagtctgctttacaagaacttgaagaattgaaacaaattgttcccaaagaatccctcgtttacttcttaataggaaagatcctaaaggagccaataaccagattaaagaggcaattgataagcgttatcttccagatgatgaggagccaataacccaagaagaacagatcatgggaacagatgaatcccaggagagcagcatgacagatgcggatgacacacaacttcatgcagctgaaagtgatgaattttaacttctggaaatcagacttttacaactggatgtgtgactagtgctgacgtgtttcttgtccctctgtatactgagtctttactcttgagctggcggtgtcatcgtccgtcacttataccatgagtgtgccactttcattggaccctgactgtatacagaatgaaaggcagtgcaatatttagctgctaacaagactggctcttttaccagtatgaatgacaatttatggggggtagggtggggaactttcttttctgtttttctttaatctccctttgttggaaagtatcatgaaaggaagagttatgctttatcttgaaggaaccattagatatggaaaatagtgatgaaccagagtttcttggttgctttttcaaaaatttgtttttatttggttctgttcctgataaacagagtaactgaccttcatttctaggttcttcaagaatggtgtttgcaagtgccagatggaacaataaaagacgttgcctataacagtgacttgattgccaaggaatgtaaattaccttaaacttgcagtatctcccataaacaaatgtaatgggcatattgggactcgtatgtaggaatcaaatatccctccatacagtgtactcttattcttggcaagaatgctttaatgtctaaccaagaattttaatttattcatcttgcttcaaagtgttgatcattgttgtcttggtattgcaaactttaaaattgtttcttaccatattgcctcttctctttgagctctgtgggatcacctttaacattcagagatgatagagtggttccccactgagaagccaaaacaaggcccttaataaccccttaagttcaccatatgaatcagaaggagaacactaaagtggagagacttttaagagatcatgatagtgaaagccttaatataatcagaattgtaccataaccttgaatctatatttgttcaaaacatccctttgacttttctaagtgtttgcttaagcagagtgtaagaatgtgtggttacctttggttgagatcctttccattctttttgactctctgcttcagattttttcagtagtgtgagtcaccaaaacatttactaagagtaattgggtttaggatgttggaaatttttagcttgggggaaaaaacattcttatgaaggagataggttctcttctgagtttgtcataatatagattggtgtctttggaaaatggccacaattttaagaattcaattatgcatataaaatgataattattggaattccacagtaacagatttaaacagtcttaaattgtttatctcctttactgtaatgtattgaaatttttagagaaattttagttgttaacattttattaagtgccagtgtcagaatataacaaattatagtttcttatgaatgacaggcctacagttattattctggattatttgatggaggacaaacttacctgtatttgttagtcaagctgtgaaaataaggtggattacaaaagatgtgaaaaaaattttagtctgtagactcagtaattttctataatttactgttaatctcatttgaacatggattaggtacaatttataaattaattcaagtcagggtctttaggtatcaggtgccagagagatatttaacagatttccctacctaaatttatgtatatgtactgtctaaaacaatacttttttaaaaaaaaggaacagttgggagaaaataaatataatgaaaaattcccagaggctagcacttggattctaacacgtatgctattgtattatccattagttctgtaatatttaattttagattcttttatttttttaattggcaaagcacaaggtgctgtataacagtgtcatttagagttttatagaaagcttcaacctgagttctgcgttataaagcctggagaaagctaagcttagaacataacttgctgaagtataattatctttttgtagcaggaatttatgtgccagaggtgagagtctttctggtactgattttttgagaccaaggataaaaggatcgttttgtaagacatgccatggcaatggctggttgggggacagtttccgcccaagcttggcctattttatttttcctcatacctactttcaaagtcatttaggtatttgaagccttatttcccacgtagtaacactttctggcttttgcagtttctttttttgtttggttttgttttttgcatggaatggggatcaaacaacccgaagaagaacacattttgatcaagcaaaatgtttgcttcaaatttcagaagtttattttacagaaattaaattaagtagtttgacatccttttctctgtttcacacatatattaggttggtgcataagtaattgtggtttttgccatgacttttatggcaaaacctgcaattacttttgcaccaacttaatacatctatatacatatatatatacgcgcacacacttgttcagaagttatgttgtggccttggatttgtttttccccttggaaatggttcttaactctgggattttagaaggttagaatattttttcaagagaacagtggtactcaaaagaatgaaaggtggtccctacattttctgtattcatcacttaaaatttttaatttttccgagaactacaagtaacatttgaaccatgctgctgttgtaccttaaacaaaaactcagtgataaccagtatttagtctattaaaaatgctctttttgaagaaaaaagtttggaagtctctgattagccagagtatagtatgagtcttcactgagaaatatggtgacccattttctttgtgaaaacctgggaaaatgcaagtgtgggtatgaagtgtgtgttctgtttgcattgaaacaatgtaattttgtgtcttctttttgctttaactgacttatttcagaaattgtacagtgttgagggggaaagtcttttctgttaatatatttgcaattcattaaaggatatggaaaatccaaataagttacttttgaaagcaatttataatcaagttgttaaagctatatgaaagctgtgccatctgtattttaataagaaggcacagaaaaacagagatacagttttatgtttcacaaaaaactagagcaatgtttatctaattttttaaaacttacactcttaatatatttatatttttaaacggtcatactcttttttagtattatttggaatatcaaaataaatactatgacaaaaacaatggtaatttt

SEQ ID NO: 308543 - DNA, 726 bp, Homo sapiens
gcggatctctgaggatccccatagttttagaagtttcaatagaacagtggtactcaaaagaatgaaaggtggtccctacattttctgtattcatcacttaaaatttttaatttttccgagaactacaagtaacatttgaaccatgctgctgttgtaccttaaacaaaaactcagtgataaccagtatttagtctattaaaaatgctctttttgaagaaaaaagtttggaagtctctgattagccagagtatagtatgagtcttcactgagaaatatggtgacccattttctttgtgaaaacctgggaaaatgcaagtgtgggtatgaagtgtgtgttctgtttgcattgaaacaatgtaattttgtgtcttctttttgctttaactgacttatttcagaaattgtacagtgttgagggggaaagtcttttctgttaatatatttgcaattcattaaaggatatggaaaatccaaataagttacttttgaaagcaatttataatcaagttgttaaagctatatgaaagctgtgccatctgtattttaataagaaggcacagaaaaacagagatacagttttatgtttcacaaaaaactagagcaatgtttatctaattttttaaaacttacactcttaatatatttatatttttaaacggtcatactcttttttagtattatttggaatatcaaaataaatactatgacaaaaacaatggtaatttt

SEQ ID NO: 308544 - DNA, 972 bp, Homo sapiens
atgcattttattttcacagcaataagaactaatacaataaggaagtatattgattaagatttagttagcttttgtgaagatgattgggaaatcaaataagtaaaaacgcttggtcaaaactttaaaaatttttgctactttaaggtttttctttgcctttttcagtctgctttacaagaacttgaagaattgaaacaaattgttcccaaagaatccctcgtttacttcttaataggaaaggtttacaagaagttaggtcaaacgcacctcgccctgatgaatttctcttgggctatggatttagatcctaaaggagccaataaccagattaaagaggcaattgataagcgttatcttccagatgatgaggagccaataacccaagaagaacagatcatgggaacagatgaatcccaggagagcagcatgacagatgcggatgacacacaacttcatgcagctgaaagtgatgaattttaacttctggaaatcagacttttacaactggatgtgtgactagtgctgacgtgtttcttgtccctctgtatactgagtctttactcttgagctggcggtgtcatcgtccgtcacttataccatgagtgtgccactttcattggaccctgactgtatacagaatgaaaggcagtgcaatatttagctgctaacaagactggctcttttaccagtatgaatgacaatttatggggggtagggtggggaactttcttttctgtttttctttaatctccctttgttggaaagtatcatgaaaggaagagttatgctttatcttgaaggaaccattagatatggaaaatagtgatgaaccagagtttcttggttgctttttcaaaaatttgtttttatttggttctgttcctgataaacagagtaactgaccttcatttctaggttcttcaagaatggtcagttactctgtttatcaggaacagaaccaaaaaaaaaaaa

SEQ ID NO: 308545 - DNA, 348 bp, Homo sapiens
ttatactttcaggtatggtttaggaatgatttattacaagcaagaaaaattcagccttgcagaaatgcatttccaaaaagcgcttgatatcaaccctcaaagttcagttttactttgccacattggagtagttcaacatgcactgaaaaaatcagagaaggctttggataccctaaacaaagccattgtcattgatcccaagaaccctctatgcaaatttcacagagcctcagttttatttgcaaatgaaaaatataaggtaagataaatatcttaagggtcttcagtgttgtattgcttaaaaacaacgttatcccttgttttcaataaactgaaagttatttattt

SEQ ID NO: 308546 - DNA, 658 bp, Homo sapiens
ctgccatttcttagtacctattgtcatataagtatgcattttattttcacagcaataagaactaatacaataaggaagtatattgattaagatttagttagcttttgtgaagatgattgggaaatcaaataagtaaaaacgcttggtcaaaactttaaaaatttttgctactttaaggtttttctttgcctttttcagtctgctttacaagaacttgaagaattgaaacaaattgttcccaaagaatccctcgtttacttcttaataggaaaggtaaagactggggtcatggtcccaaacagtgactttcatagcaaataatgacattttataagaataaatgtaatacttcctgtacatatctattgagcaaattaaactaaagctccgaactgagtgctctgggaataacagatttagttctaacacttaagaaaatgatatcctagccaggcatggtgcctcacgcctgtaatcccagcactttgggaggcctaggcaggtagattacgtgaggtcaggagtttaagaccagcctgaccaacatggtgaaacctgacctctactaaaaatacaaaaaattagctgggcatggtgacacatgcctgtaatcccagctactccagaggctgaggcacgagaatcacttgaacctggg

SEQ ID NO: 308547 - DNA, 463 bp, Homo sapiens
tatgtaccagaggacctagatttttatcacagagcaaattatttaagatctctagacttcagtattctcatctttagtgaagcagttgaactagaattagaagtgattttagagataatctattaatcatttggtaattaattactaaatccacttaatgcagtggacaatccagttagaccctacaaccttatctctaataatttgattatgttggttttgagtcacgttggttctcacctttcttcataaatatcaagagggagtattaacatgatctttatttcttacaggttcaacatgcactgaaaaaatcagagaaggctttggataccctaaacaaagccattgtcattgatcccaagaaccctctatgcaaatttcacagagcctcagttttatttgcaaatgaaaaatataaggtaagataaatatcttaagggtcttcagtgttgtattgctt

SEQ ID NO: 308548 - DNA, 3345 bp, Homo sapiens
gcctccgtatcaggcctgctcaccttgctgggagctttattctgatctcattttgaatgttccagagggagcatcataagagcccagagctccgatttccaaagagtgatattgacatttatggagattggtgttgtaacatattttgataaatactaacttattttgttggggttttggttgtctcttgtcttaggacctggtagttatttgcttgatttttttttccgttattttctacataggcaaagagaattcgagggatagacagtctccaagaaaagtgaagtggtgggagagaattgcttttttcttttttttcttttctctagtttttctttctggctgagatttccgtgcaagacagcacccaatagactatttagagttgacatttgacattttaatgggcgccatggctcattttgtagattgagaaggtgcgtctcccctgctccaagtctcatcatgacagcgtgctgacagctgggagtctgtggccttcctcacgcagaggccttaaagctggacacagaagcacgcctaggctgggcagggatgggacccatgccccctccttagaggacgggcttcctggttaggaaaggacacgtgggggtgccttgcataatagttcactggtcaccgtgcttttatgagtagtgtttttgtgcacttgccaggggttttctctctgtgtgagaggggagtgatttaagcaatggtgtctggagtaagccttacaattttaatagactttttcttatcatatccctcatttctttccctgaaataaaaatacacacaagcaaaaaaaaatgatagtttcacatctcttagttcccttgcccaaacaagaatattcttagttccactggccaggattttcctacatagtcagaacttacacattactagaggcacacccaccaaggagtattgtgtctacttttatctgtgcaccagccacaaatacccacattggaaagacccatttgtgatgggtaaacatcccttcctgtctcccacaacccctgtgactgccctgcatgtgttcatgacctccgaaggcccaaattcatgaagcagcaaacccagcagatctccacccccctgcctcaggacctctgctgaagagggggatgaagtgggtctccagggaggcagtgggggccttgttgggcagctctgcagttgggaggggcaccgtccggaggagaccaggcctctacacaccccccactctacttatcatccctgctcacacacccttgtccaaggctttatgcatcggatttatttttccaaatcaagaggacagtgatagatgcattttccccaggctgtctcagaaaggtcgctaaatgtatactgttgtcagaattgctgagatctccccccacttttggtttttgcagcagtaaaaactctttccactgtgacttattttctctctcaggcagccagccacctggtcccttgtgctgactctagcacagtggccaggatccaatacgagtccaggggtgaccgcaggatggtgggggcagcgggcttctccacctaccccagccaccaaggccctgacgcactgcctcctgcaccttcagcacatccctgtgcacagctggaagggtgcatggcccgctcacctttgttcagatgggtggaaacgctgatgataccagctcctccctgccgtgcccctgccacggagcaggcattgtgaactggctggtgtttgcagtcccacgtggcatggcctccagcccaacccacagtggagactggagacagggcaatgagtctggtcgggggcacgtggacatgccccataggggccccacccagacttaacaggcaaggtcctgggcattgcgcgacgcaggactcaatgctaaagcaagcctgcctggctctgtgccagggcccctcttctgatttacacatcccatttttacacagacccttccttcttaataaaggctgacagttctgttggcagccaagaacccacaccatgaagacagggagtgaggggcctttgtgcccaactccagcacagctgcgttctggggtgtgtgagaggcatgttcgtgtctgtgcgctggtggtctcgtgagacagttccgaggacggggaaattgcagggtggtgggggcgtgaggcttatatgtggaactgatgcagagttcgcctgcagacggatctggatatacactatgtataattgttacgtgtaatttaaaatatatctgtttgccatcgtcatgagaagattatatgtaaggctctgaagggagagggagatgtacattctgccaggctcctggggaccttatccgagtcatgaaattgatgactgttgatccagtggtgcaagaagctacactccatgtgtcatcacgcttatgactcctaatgtatttttaaggcaaaaaatgtcagccgactccatcttcacccctcgattcctcgagtccagcctttctgtgccagtgcttcactgagccacaacgctctcgccatcgggacccggctgggcctggagtctcggggcacagttgccatggagccctcctgggtcattctacaaatgtgctgagtgccagctgaaaaccccacaggagatggagtaccttggccaagcttaaagagaagattttctcagggtatttattagtgtgtccagcagggtcaggaagcaggatggaaagatgcattcagactgttaatttattaacaaggcaaatgattttgtgtttcttgatgacagactattaagtttgggacttattttcccatttgagaagttataatatatatttaagatgataagtttcctgcttaagttgtgcctttcagcttcaatgagtttaaggagcactaagggtaatgataccaatgagggttggtttattatcaaacctgaatagctgtggtttctccagtaaatattttcttctactgaacatggagccattattaagagttgtgtgttttttattatgtacatttgtatatttttttgcttgtttgatgttctatttttctaatagttttcttttagtttcttaaagttgtgatactagatttagattctgatgctaactgcaaatcaggttggtctctgctgggtctctcctgcttttattttactttaaggacaagtgtagttgtcgtccaccacctttcaaaaaatgtgaaactgccctgcctcccctttttgctgacaacactgtgtacattgaccacttcctaccatactttatgttgtaaaatcaaactcttttgtggtacattatctcatgcttctgcaaattcgaataaattctatggcttcca

SEQ ID NO: 308549 - DNA, 3292 bp, Homo sapiens
gcctccgtatcaggcctgctcaccttgctgggagctttattctgatctcattttgaatgttccagagggagcatcataagagcccagagctccgatttccaaagagtgatattgacatttatggagattggtgttgtaacatattttgataaatactaacttattttgttggggttttggttgtctcttgtcttaggacctggtagttatttgcttgatttttttttccgttattttctacataggcaaagagaattcgagggatagacagtctccaagtttttctttctggctgagatttccgtgcaagacagcacccaatagactatttagagttgacatttgacattttaatgggcgccatggctcattttgtagattgagaaggtgcgtctcccctgctccaagtctcatcatgacagcgtgctgacagctgggagtctgtggccttcctcacgcagaggccttaaagctggacacagaagcacgcctaggctgggcagggatgggacccatgccccctccttagaggacgggcttcctggttaggaaaggacacgtgggggtgccttgcataatagttcactggtcaccgtgcttttatgagtagtgtttttgtgcacttgccaggggttttctctctgtgtgagaggggagtgatttaagcaatggtgtctggagtaagccttacaattttaatagactttttcttatcatatccctcatttctttccctgaaataaaaatacacacaagcaaaaaaaaatgatagtttcacatctcttagttcccttgcccaaacaagaatattcttagttccactggccaggattttcctacatagtcagaacttacacattactagaggcacacccaccaaggagtattgtgtctacttttatctgtgcaccagccacaaatacccacattggaaagacccatttgtgatgggtaaacatcccttcctgtctcccacaacccctgtgactgccctgcatgtgttcatgacctccgaaggcccaaattcatgaagcagcaaacccagcagatctccacccccctgcctcaggacctctgctgaagagggggatgaagtgggtctccagggaggcagtgggggccttgttgggcagctctgcagttgggaggggcaccgtccggaggagaccaggcctctacacaccccccactctacttatcatccctgctcacacacccttgtccaaggctttatgcatcggatttatttttccaaatcaagaggacagtgatagatgcattttccccaggctgtctcagaaaggtcgctaaatgtatactgttgtcagaattgctgagatctccccccacttttggtttttgcagcagtaaaaactctttccactgtgacttattttctctctcaggcagccagccacctggtcccttgtgctgactctagcacagtggccaggatccaatacgagtccaggggtgaccgcaggatggtgggggcagcgggcttctccacctaccccagccaccaaggccctgacgcactgcctcctgcaccttcagcacatccctgtgcacagctggaagggtgcatggcccgctcacctttgttcagatgggtggaaacgctgatgataccagctcctccctgccgtgcccctgccacggagcaggcattgtgaactggctggtgtttgcagtcccacgtggcatggcctccagcccaacccacagtggagactggagacagggcaatgagtctggtcgggggcacgtggacatgccccataggggccccacccagacttaacaggcaaggtcctgggcattgcgcgacgcaggactcaatgctaaagcaagcctgcctggctctgtgccagggcccctcttctgatttacacatcccatttttacacagacccttccttcttaataaaggctgacagttctgttggcagccaagaacccacaccatgaagacagggagtgaggggcctttgtgcccaactccagcacagctgcgttctggggtgtgtgagaggcatgttcgtgtctgtgcgctggtggtctcgtgagacagttccgaggacggggaaattgcagggtggtgggggcgtgaggcttatatgtggaactgatgcagagttcgcctgcagacggatctggatatacactatgtataattgttacgtgtaatttaaaatatatctgtttgccatcgtcatgagaagattatatgtaaggctctgaagggagagggagatgtacattctgccaggctcctggggaccttatccgagtcatgaaattgatgactgttgatccagtggtgcaagaagctacactccatgtgtcatcacgcttatgactcctaatgtatttttaaggcaaaaaatgtcagccgactccatcttcacccctcgattcctcgagtccagcctttctgtgccagtgcttcactgagccacaacgctctcgccatcgggacccggctgggcctggagtctcggggcacagttgccatggagccctcctgggtcattctacaaatgtgctgagtgccagctgaaaaccccacaggagatggagtaccttggccaagcttaaagagaagattttctcagggtatttattagtgtgtccagcagggtcaggaagcaggatggaaagatgcattcagactgttaatttattaacaaggcaaatgattttgtgtttcttgatgacagactattaagtttgggacttattttcccatttgagaagttataatatatatttaagatgataagtttcctgcttaagttgtgcctttcagcttcaatgagtttaaggagcactaagggtaatgataccaatgagggttggtttattatcaaacctgaatagctgtggtttctccagtaaatattttcttctactgaacatggagccattattaagagttgtgtgttttttattatgtacatttgtatatttttttgcttgtttgatgttctatttttctaatagttttcttttagtttcttaaagttgtgatactagatttagattctgatgctaactgcaaatcaggttggtctctgctgggtctctcctgcttttattttactttaaggacaagtgtagttgtcgtccaccacctttcaaaaaatgtgaaactgccctgcctcccctttttgctgacaacactgtgtacattgaccacttcctaccatactttatgttgtaaaatcaaactcttttgtggtacattatctcatgcttctgcaaattcgaataaattctatggcttcca

SEQ ID NO: 308550 - DNA, 3375 bp, Homo sapiens
gcctccgtatcaggcctgctcaccttgctgggagctttattctgatctcattttgaatgttccagagggagcatcataagagcccagagctccgatttccaaagagtgatattgacatttatggagattggtgttgtaacatattttgataaatactaacttattttgttggggttttggttgtctcttgtcttaggacctggtagttatttgcttgatttttttttccgttattttctacataggcaaagagaattcgagggatagacagtctccaagaaaagtgaagtggtgggagagaattgcttttttcttttttttcttttctctagtttttctttctggctgagatttccgtgcaagacagcacccaatagactatttagagttgacatttgacattttaatgggcgccatggctcattttgtagattgagaaggtgcgtctcccctgctccaagtctcatcatgacagcgtgctgacagctgggagtctgtggccttcctcacgcagaggccttaaagctggacacagaagcacgcctaggctgggcagggatgggacccatgccccctccttagaggacgggcttcctggttaggaaaggacacgtgggggtgccttgcataatagttcactggtcaccgtgcttttatgagtagtgtttttgtgcacttgccaggggttttctctctgtgtgagaggggagtgatttaagcaatggtgtctggagtaagccttacaattttaatagactttttcttatcatatccctcatttctttccctgaaataaaaatacacacaagcaaaaaaaaatgatagtttcacatctcttagttcccttgcccaaacaagaatattcttagttccactggccaggattttcctacatagtcagaacttacacattactagaggcacacccaccaaggagtattgtgtctacttttatctgtgcaccagccacaaatacccacattggaaagacccatttgtgatgggtaaacatcccttcctgtctcccacaacccctgtgactgccctgcatgtgttcatgacctccgaaggcccaaattcatgaagcagcaaacccagcagatctccacccccctgcctcaggacctctgctgaagagggggatgaagtgggtctccagggaggcagtgggggccttgttggcagctggctcgggagccggcttacaggagggcagctctgcagttgggaggggcaccgtccggaggagaccaggcctctacacaccccccactctacttatcatccctgctcacacacccttgtccaaggctttatgcatcggatttatttttccaaatcaagaggacagtgatagatgcattttccccaggctgtctcagaaaggtcgctaaatgtatactgttgtcagaattgctgagatctccccccacttttggtttttgcagcagtaaaaactctttccactgtgacttattttctctctcaggcagccagccacctggtcccttgtgctgactctagcacagtggccaggatccaatacgagtccaggggtgaccgcaggatggtgggggcagcgggcttctccacctaccccagccaccaaggccctgacgcactgcctcctgcaccttcagcacatccctgtgcacagctggaagggtgcatggcccgctcacctttgttcagatgggtggaaacgctgatgataccagctcctccctgccgtgcccctgccacggagcaggcattgtgaactggctggtgtttgcagtcccacgtggcatggcctccagcccaacccacagtggagactggagacagggcaatgagtctggtcgggggcacgtggacatgccccataggggccccacccagacttaacaggcaaggtcctgggcattgcgcgacgcaggactcaatgctaaagcaagcctgcctggctctgtgccagggcccctcttctgatttacacatcccatttttacacagacccttccttcttaataaaggctgacagttctgttggcagccaagaacccacaccatgaagacagggagtgaggggcctttgtgcccaactccagcacagctgcgttctggggtgtgtgagaggcatgttcgtgtctgtgcgctggtggtctcgtgagacagttccgaggacggggaaattgcagggtggtgggggcgtgaggcttatatgtggaactgatgcagagttcgcctgcagacggatctggatatacactatgtataattgttacgtgtaatttaaaatatatctgtttgccatcgtcatgagaagattatatgtaaggctctgaagggagagggagatgtacattctgccaggctcctggggaccttatccgagtcatgaaattgatgactgttgatccagtggtgcaagaagctacactccatgtgtcatcacgcttatgactcctaatgtatttttaaggcaaaaaatgtcagccgactccatcttcacccctcgattcctcgagtccagcctttctgtgccagtgcttcactgagccacaacgctctcgccatcgggacccggctgggcctggagtctcggggcacagttgccatggagccctcctgggtcattctacaaatgtgctgagtgccagctgaaaaccccacaggagatggagtaccttggccaagcttaaagagaagattttctcagggtatttattagtgtgtccagcagggtcaggaagcaggatggaaagatgcattcagactgttaatttattaacaaggcaaatgattttgtgtttcttgatgacagactattaagtttgggacttattttcccatttgagaagttataatatatatttaagatgataagtttcctgcttaagttgtgcctttcagcttcaatgagtttaaggagcactaagggtaatgataccaatgagggttggtttattatcaaacctgaatagctgtggtttctccagtaaatattttcttctactgaacatggagccattattaagagttgtgtgttttttattatgtacatttgtatatttttttgcttgtttgatgttctatttttctaatagttttcttttagtttcttaaagttgtgatactagatttagattctgatgctaactgcaaatcaggttggtctctgctgggtctctcctgcttttattttactttaaggacaagtgtagttgtcgtccaccacctttcaaaaaatgtgaaactgccctgcctcccctttttgctgacaacactgtgtacattgaccacttcctaccatactttatgttgtaaaatcaaactcttttgtggtacattatctcatgcttctgcaaattcgaataaattctatggcttcca

SEQ ID NO: 308551 - DNA, 3663 bp, Homo sapiens
  misc_feature (3395)..(3395): n is a, c, g, or t
gcctccgtatcaggcctgctcaccttgctgggagctttattctgatctcattttgaatgttccagagggagcatcataagagcccagagctccgatttccaaagagtgatattgacatttatggagattggtgttgtaacatattttgataaatactaacttattttgttggggttttggttgtctcttgtcttaggacctggtagttatttgcttgatttttttttccgttattttctacataggcaaagagaattcgagggatagacagtctccaagaaaagtgaagtggtgggagagaattgcttttttcttttttttcttttctctagtttttctttctggctgagatttccgtgcaagacagcacccaatagactatttagagttgacatttgacattttaatgggcgccatggctcattttgtagattgagaaggtgcgtctcccctgctccaagtctcatcatgacagcgtgctgacagctgggagtctgtggccttcctcacgcagaggccttaaagctggacacagaagcacgcctaggctgggcagggatgggacccatgccccctccttagaggacgggcttcctggttaggaaaggacacgtgggggtgccttgcataatagttcactggtcaccgtgcttttatgagtagtgtttttgtgcacttgccaggggttttctctctgtgtgagaggggagtgatttaagcaatggtgtctggagtaagccttacaattttaatagactttttcttatcatatccctcatttctttccctgaaataaaaatacacacaagcaaaaaaaaatgatagtttcacatctcttagttcccttgcccaaacaagaatattcttagttccactggccaggattttcctacatagtcagaacttacacattactagaggcacacccaccaaggagtattgtgtctacttttatctgtgcaccagccacaaatacccacattggaaagacccatttgtgatgggtaaacatcccttcctgtctcccacaacccctgtgactgccctgcatgtgttcatgacctccgaaggcccaaattcatgaagcagcaaacccagcagatctccacccccctgcctcaggacctctgctgaagagggggatgaagtgggtctccagggaggcagtgggggccttgttggcagctggctcgggagccggcttacaggagggcagctctgcagttgggaggggcaccgtccggaggagaccaggcctctacacaccccccactctacttatcatccctgctcacacacccttgtccaaggctttatgcatcggatttatttttccaaatcaagaggacagtgatagatgcattttccccaggctgtctcagaaaggtcgctaaatgtatactgttgtcagaattgctgagatctccccccacttttggtttttgcagcagtaaaaactctttccactgtgacttattttctctctcaggcagccagccacctggtcccttgtgctgactctagcacagtggccaggatccaatacgagtccaggggtgaccgcaggatggtgggggcagcgggcttctccacctaccccagccaccaaggccctgacgcactgcctcctgcaccttcagcacatccctgtgcacagctggaagggtgcatggcccgctcacctttgttcagatgggtggaaacgctgatgataccagctcctccctgccgtgcccctgccacggagcaggcattgtgaactggctggtgtttgcagtcccacgtggcatggcctccagcccaacccacagtggagactggagacagggcaatgagtctggtcgggggcacgtggacatgccccataggggccccacccagacttaacaggcaaggtcctgggcattgcgcgacgcaggactcaatgctaaagcaagcctgcctggctctgtgccagggcccctcttctgatttacacatcccatttttacacagacccttccttcttaataaaggctgacagttctgttggcagccaagaacccacaccatgaagacagggagtgaggggcctttgtgcccaactccagcacagctgcgttctggggtgtgtgagaggcatgttcgtgtctgtgcgctggtggtctcgtgagacagttccgaggacggggaaattgcagggtggtgggggcgtgaggcttatatgtggaactgatgcagagttcgcctgcagacggatctggatatacactatgtataattgttacgtgtaatttaaaatatatctgtttgccatcgtcatgagaagattatatgtaaggctctgaagggagagggagatgtacattctgccaggctcctggggaccttatccgagtcatgaaattgatgactgttgatccagtggtgcaagaagctacactccatgtgtcatcacgcttatgactcctaatgtatttttaaggcaaaaaatgtcagccgactccatcttcacccctcgattcctcgagtccagcctttctgtgccagtgcttcactgagccacaacgctctcgccatcgggacccggctgggcctggagtctcggggcacagttgccatggagccctcctgggtcattctacaaatgtgctgagtgccagctgaaaaccccacaggagatggagtaccttggccaagcttaaagagaagattttctcagggtatttattagtgtgtccagcagggtcaggaagcaggatggaaagatgcattcagactgttaatttattaacaaggcaaatgattttgtgtttcttgatgacagactattaagtttgggacttattttcccatttgagaagttataatatatatttaagatgataagtttcctgcttaagttgtgcctttcagcttcaatgagtttaaggagcactaagggtaatgataccaatgagggttggtttattatcaaacctgaatagctgtggtttctccagtaaatattttcttctactgaacatggagccattattaagagttgtgtgttttttattatgtacatttgtatatttttttgcttgtttgatgttctatttttctaatagttttcttttagtttcttaaagttgtgatactagatttagattctgatgctaactgcaaatcaggttggtctctgctgggtctctcctgcttttattttactttaaggacaagtgtagttgtcgtccaccacctttcaaaaaatgtgaaactgccctgcctcccctttttgctgacaacactgtgtacattgaccacttcctaccatactttatgttgtaaaatcaaactcttttgtggtacattatctcatgcttctgcaaattcgaataaattctatggcttccaaaaaaaaaaaaaaaaaaaanaaaaaaaaaaaaaaaaaaaaaaacacacacaagacacaaaacaatcaccgagaggcgcaaaagtgcgggacggggacaacaaagggaaggagaggagagacagaaacggacgcgacaaagagacggagcagagcacacgacagtacgtgatcgcgataagaggggagaggagagatgggccggaacccgcaatgttgagggggaagctgctttataagttggcacagaaagagggaggaaaagagaaggatacacacagaggagaaaa

SEQ ID NO: 308552 - DNA, 4870 bp, Homo sapiens
gcaggacccggaagtgagggtgtgagaggcctctctggaagttgtcccgggtgttcgccgctggagcccgggtcgagaggacgaggtgccgctgcctggagaatcctccgctgccgtcggctcccggagcccagccctttcctaacccaacccaacctagcccagtcccagccgccagcgcctgtccctgtcacggaccccagcgttaccatgcatcctgccgtcttcctatccttacccgacctcagatgctcccttctgctcctggtaacttgggtttttactcctgtaacaactgaaataacaagtcttgatacagagaatatagatgaaattttaaacaatgctgatgttgctttagtaaatttttatgctgactggtgtcgtttcagtcagatgttgcatccaatttttgaggaagcttccgatgtcattaaggaagaatttccaaatgaaaatcaagtagtgtttgccagagttgattgtgatcagcactctgacatagcccagagatacaggataagcaaatacccaaccctcaaattgtttcgtaatgggatgatgatgaagagagaatacaggggtcagcgatcagtgaaagcattggcagattacatcaggcaacaaaaaagtgaccccattcaagaaattcgggacttagcagaaatcaccactcttgatcgcagcaaaagaaatatcattggatattttgagcaaaaggactcggacaactatagagtttttgaacgagtagcgaatattttgcatgatgactgtgcctttctttctgcatttggggatgtttcaaaaccggaaagatatagtggcgacaacataatctacaaaccaccagggcattctgctccggatatggtgtacttgggagctatgacaaattttgatgtgacttacaattggattcaagataaatgtgttcctcttgtccgagaaataacatttgaaaatggagaggaattgacagaagaaggactgccttttctcatactctttcacatgaaagaagatacagaaagtttagaaatattccagaatgaagtagctcggcaattaataagtgaaaaaggtacaataaactttttacatgccgattgtgacaaatttagacatcctcttctgcacatacagaaaactccagcagattgtcctgtaatcgctattgacagctttaggcatatgtatgtgtttggagacttcaaagatgtattaattcctggaaaactcaagcaattcgtatttgacttacattctggaaaactgcacagagaattccatcatggacctgacccaactgatacagccccaggagagcaagcccaagatgtagcaagcagtccacctgagagctccttccagaaactagcacccagtgaatataggtatactctattgagggatcgagatgagctttaaaaacttgaaaaacagtttgtaagcctttcaacagcagcatcaacctacgtggtggaaatagtaaacctatattttcataattctatgtgtatttttattttgaataaacagaaagaaattttgggtttttaatttttttctccccgactcaaaatgcattgtcatttaatatagtagcctcttaaaaaaaaaaaaacctgctaggatttaaaaataaaaatcagaggcctatctccactttaaatctgtcctgtaaaagttttataaatcaaatgaaaggtgacattgccagaaacttaccattaacttgcactactagggtagggaggacttaggatgtttcctgtgtcgtatgtgcttttctttctttcatatgatcaattctgttggtattttcagtatctcatttctcaaagctaaagagatatacattctggatacttgggaggggaataaattaaagttttcacactgtgtactgtgttttactgattggttggatattgcttatgaaaattccatagtggtatttttttggattcttaatgtgtaacttaaacatactttgaagtggaggagagtcataagacagaacatttggcaggaattgtccttatgaaacaagaaaaagaaaatgaaaagtattattaagcttctgtgtttgtctaaaaatgtggcatatggatggcatttaaaactttgaatgaattatacctaaatctgggacagggaggtgacagtggaacaggctaccaatcagaactagatgacttttaaggctcctcctattatgagacttcaatttccaaagagaagaactagcagagaaattgtatttcagtaattttaagctccttctgtcttgtagagtcttgttatagttgtataaatcaaaaacacagaataaggaacatatttaactttttttcattataaaatggttagaggaccctaccccctctagattccctgatttccccaggcctgcagcatacagtaagatgggtccctgtgccaggcctcaatactgccagggaataaaaccagagggagaggaccctcagtgtcatatcaggaagcccagtgccagaggacagacaggttcaaaactggcttttcctctgggcctgggttggtgctataggccaagggtcattttatacttgggtataaatcaatcccagtttgggaaaagattatttttaagcttaaaaggctgacatgtgccattatatgtagtatgtaatatatgtaacatcttccaattcttttaaaataaaattaatatttataatggatatttaatgattgttatttttaaaaaccagcttataattcctcgttatgcatgatttatccaaagtttccatagttttattcaaaataataaatgttaataaggtgataaggggtatatttaatgtattgtatcaaattgtgaataagaaagtaggatggagctttctagaggttgggccttagttctgttatcctcattgcttttaaccaataagttaaatgaagttagagttatggtcttcaggttagattatggaccagatctgtgagggtcagcatggaaattcacattcaacaaggtagcacacaggaccaagagcagcacatgcaatcaactggaataatatagtaatcctgtaactgggtttgaaaaaataatcaacaaaagatacaattcaagggttaggttgcagagagctggcttgagagtagttattatgaaaaaggcctcaaggagtacgtgttcagtatgctctaagatgataaagtggctgttaaaaagggagttgatttgaggaagtattacttagcattcatgcatattgggcttaggctctagccctgccactatcattgtcttctctggactgtgaagtcactgaggacaaggaaactaaatttaatgtctgtatcactagtgcctagaatttctggacacttagtagtcaccatcaggcgtttatttaatgaatgagaagcaaagtgaccttggttacttttttaccctgaggggctcagcactcattaggacttggtgcctaattttataaaaagtcactaagctcaagtgcttggatgaaaggacagcgtggataaaaaggtttttaaaacatggatgttaaggctgttttgcttggagaagacttgggactgggacagtctttagatattatttgaaatgctggcactgtctatctggatcccagggcttgaactaggatttgaggaagtcacagggaagcagatttcagtctgacatttattcagtgcaagttttttggtgctgtagtatatgatgaaagatgtaaagctgaataaagcattatttctgccctagagttgttcacagcctagtcaggcatatggatatgtaaacaatgactgtaacgtgttatagatgtaaagacaaaataaaggttaaagagggcataaaggagcactcaattgcagagatttgaggacattatttttattttgagctttaaaaagatgaataggtgttctcaggaggtagggatctggctgagagggaataatctgagcaaaggtatgaaacagcctaatgcattagagaaaaaagttcttttagtaaggcatttggggttggggaagctagaaaaagaaatgggagctggtcacacagggccttgtgtgccagactaaggggtttgtagtatatattgtaggcagaagagatccatcaacagattgcaagcaaggaagtatgttcactttaaagtttgagaaagaatagtgtggaagcacgtctcaaatttagacttacttgttccccctctgaaccgtgaatcagaccatttcaggtagaagtcttccccggtttatctgatctactcggggcctcaggcttctcagctgggaagagaggatgcaagaccagactgaagaacacggttgagtccccagaaccaaaagggggcctttctgcttcttagccagctacctcttcgagtttttcaaattgtgagggggaccataaaaggatggaaacttttagatgacattctacaaattatttttttctttaaattaaaagaacctagccaataagatagagaatgggcatctaaggcatctcagagctctctgatgaagccaggttgtcaaagatcatttgcaaaagaagggaaaactggcatgacaaaagctacagagaggagagtgaaatatagaagtgtttgaaatgttcaagctcacaataagcttaaatttatagaaaatgctaaggttgtcaagaaggcttttttttttttcttttttaaacctgagggcaaaaaggaatggataaagtagtgtaatggattgacaatcaggaagaacagaataactcagtttttttttctcctacaaggagatatggctggaccaaaataaaatgacatgaaattgcaaaaatgaaaat

SEQ ID NO: 308553 - DNA, 606 bp, Homo sapiens
  misc_feature (551)..(551): n is a, c, g, or t
  misc_feature (563)..(563): n is a, c, g, or t
  misc_feature (597)..(597): n is a, c, g, or t
  misc_feature (600)..(600): n is a, c, g, or t
gcaggacccggaagtgagggtgtgagaggcctctctggaagttgtcccgggtgttcgccgctggagcccgggtcgagaggacgaggtgccgctgcctggagaatcctccgctgccgtcggctcccggagcccagccctttcctaacccaacccaacctagcccagtcccagccgccagcgcctgtccctgtcacggaccccagcgttaccatgcatcctgccgtcttcctatccttacccgacctcagatgctcccttctgctcctggtaacttgggtttttactcctgtaacaactgaaataacaagtcttgatacagagaatatagatgaaattttaaacaatgctgatgttgctttagtaaatttttatgctgactggtgtcgtttcagtcagatgttgcatccaatttttgaggaagcttccgatgtcattaaggaagaatttccaaatgaaaatcaagtagtgtttgccagagttgattgtgatcagcacttctggacataagcccaggagatacagggattaaggccaaaataccccaacccttnaaaaatggtttncgtaaatgggggaatggaatggattgaaagaagnagnaattcc

SEQ ID NO: 308554 - DNA, 1230 bp, Homo sapiens
  misc_feature (974)..(974): n is a, c, g, or t
  misc_feature (976)..(976): n is a, c, g, or t
  misc_feature (979)..(979): n is a, c, g, or t
  misc_feature (981)..(982): n is a, c, g, or t
  misc_feature (993)..(993): n is a, c, g, or t
  misc_feature (1000)..(1001): n is a, c, g, or t
  misc_feature (1008)..(1008): n is a, c, g, or t
  misc_feature (1229)..(1229): n is a, c, g, or t
gcaggacccggaagtgagggtgtgagaggcctctctggaagttgtcccgggtgttcgccgctggagcccgggtcgagaggacgaggtgccgctgcctggagaatcctccgctgccgtcggctcccggagcccagccctttcctaacccaacccaacctagcccagtcccagccgccagcgcctgtccctgtcacggaccccagcgttaccatgcatcctgccgtcttcctatccttacccgacctcagatgctcccttctgctcctggtaacttgggtttttactcctgtaacaactgaaataacaagtcttgatacagagaatatagatgaaattttaaacaatgctgatgttgctttagtaaatttttatgctgactggtgtcgtttcagtcagatgttgcatccaatttttgaggaagcttccgatgtcattaaggaagaatttccaaatgaaaatcaagtagtgtttgccagagttgattgtgatcagcactctgacatagcccagagatacaggataagcaaatacccaaccctcaaattgtttcgtaatgggatgatgatgaagagagaatacaggggtcagcgatcagtgaaagcattggcagattacatcaggcaacaaaaaagtgaccccattcaagaaattcgggacttagcagaaatcaccactcttgatcgcagcaaaagaaatatcattggatattttgagcaaaaggactcggacaactatagagtttttgaacgagtagcgaatattttgcatgatgactgtgcctttctttctgcatttggggatgtttcaaaaccggaaagatatagtggcgacaacataatctacaaaccaccagggcattctgctccggatatggtgtacttgggagctatgacaaattttgatgtgacttacaattggattcaagataaatgtgttcctcttgtccgagaaataacatttgaaaatggagaggnantgncnnagaaggctgcnttccatnntctttcntgaagaaatcggacgtggcaatattcagaatgaagtaggtggattatagggacaggggatactttaatgcgttggcacttaatcctttggttagaatcgggagggtgacgcatgcagtagtagtgttgggatagagtatcgtgtgaggcgcttgagcgagtagcgactgcgcaaggtggctaggaactgtagggagaattcagatttatgtggttgtatanc

SEQ ID NO: 308555 - DNA, 919 bp, Homo sapiens
gcaggacccggaagtgagggtgtgagaggcctctctggaagttgtcccgggtgttcgccgctggagcccgggtcgagaggacgaggtgccgctgcctggagaatcctccgctgccgtcggctcccggagcccagccctttcctaacccaacccaacctagcccagtcccagccgccagcgcctgtccctgtcacggaccccagcgttaccatgcatcctgccgtcttcctatccttacccgacctcagatgctcccttctgctcctggtaacttgggtttttactcctgtaacaactgaaataacaagtcttgatacagagaatatagatgaaattttaaacaatgctgatgttgctttagtaaatttttatgctgactggtgtcgtttcagtcagatgttgcatccaatttttgaggaagcttccgatgtcattaaggaagaatttccaaatgaaaatcaagtagtgtttgccagagttgattgtgatcagcactctgacatagcccagagatacaggataagcaaatacccaaccctcaaattgtttcgtaatgggatgatgatgaagagagaatacaggggtcagcgatcagtgaaagcattggcagattacatcaggcaacaaaaaagtgaccccattcaagaaattcgggacttagcagaaatcaccactcttgatcgcagcaaaagaaatatcattggatattttgagcaaaaggactcggacaactatagagtttttgaacgagtagcgaatattttgcatgatgactgtgcctttctttctgcatttggggatgtttcaaaaccggaaagatatagtggcgacaacataatctacaaaccaccagggcattctgctccggatatggtgtacttgggtactacgctttggcattgggtactacgctttggca

SEQ ID NO: 308556 - DNA, 4913 bp, Homo sapiens
gcaggacccggaagtgagggtgtgagaggcctctctggaagttgtcccgggtgttcgccgctggagcccgggtcgagaggacgaggtgccgctgcctggagaatcctccgctgccgtcggctcccggagcccagccctttcctaacccaacccaacctagcccagtcccagccgccagcgcctgtccctgtcacggaccccagcgttaccatgcatcctgccgtcttcctatccttacccgacctcagatgctcccttctgctcctggtaacttgggtttttactcctgtaacaactgaaataacaagtcttgatacagagaatatagatgaaattttaaacaatgctgatgttgctttagtaaatttttatgctgactggtgtcgtttcagtcagatgttgcatccaatttttgaggaagcttccgatgtcattaaggaagaatttccaaatgaaaatcaagtagtgtttgccagagttgattgtgatcagcactctgacatagcccagagatacaggataagcaaatacccaaccctcaaattgtttcgtaatgggatgatgatgaagagagaatacaggggtcagcgatcagtgaaagcattggcagattacatcaggcaacaaaaaagtgaccccattcaagaaattcgggacttagcagaaatcaccactcttgatcgcagcaaaagaaatatcattggatattttgagcaaaaggactcggacaactatagagtttttgaacgagtagcgaatattttgcatgatgactgtgcctttctttctgcatttggggatgtttcaaaaccggaaagatatagtggcgacaacataatctacaaaccaccagggcattctgctccggatatggtgtacttggggagctatgaacaaaaattttttgtggaattggtttggaacttttaacaaaattgtgggaatttccaagggattaaaaatgttgtttcctttcgttgttcccgagaaaataacatttggaaaaatgggagaggaattgacagaagaaggactgccttttctcatactctttcacatgaaagaagatacagaaagtttagaaatattccagaatgaagtagctcggcaattaataagtgaaaaaggtacaataaactttttacatgccgattgtgacaaatttagacatcctcttctgcacatacagaaaactccagcagattgtcctgtaatcgctattgacagctttaggcatatgtatgtgtttggagacttcaaagatgtattaattcctggaaaactcaagcaattcgtatttgacttacattctggaaaactgcacagagaattccatcatggacctgacccaactgatacagccccaggagagcaagcccaagatgtagcaagcagtccacctgagagctccttccagaaactagcacccagtgaatataggtatactctattgagggatcgagatgagctttaaaaacttgaaaaacagtttgtaagcctttcaacagcagcatcaacctacgtggtggaaatagtaaacctatattttcataattctatgtgtatttttattttgaataaacagaaagaaattttgggtttttaatttttttctccccgactcaaaatgcattgtcatttaatatagtagcctcttaaaaaaaaaaaaacctgctaggatttaaaaataaaaatcagaggcctatctccactttaaatctgtcctgtaaaagttttataaatcaaatgaaaggtgacattgccagaaacttaccattaacttgcactactagggtagggaggacttaggatgtttcctgtgtcgtatgtgcttttctttctttcatatgatcaattctgttggtattttcagtatctcatttctcaaagctaaagagatatacattctggatacttgggaggggaataaattaaagttttcacactgtgtactgtgttttactgattggttggatattgcttatgaaaattccatagtggtatttttttggattcttaatgtgtaacttaaacatactttgaagtggaggagagtcataagacagaacatttggcaggaattgtccttatgaaacaagaaaaagaaaatgaaaagtattattaagcttctgtgtttgtctaaaaatgtggcatatggatggcatttaaaactttgaatgaattatacctaaatctgggacagggaggtgacagtggaacaggctaccaatcagaactagatgacttttaaggctcctcctattatgagacttcaatttccaaagagaagaactagcagagaaattgtatttcagtaattttaagctccttctgtcttgtagagtcttgttatagttgtataaatcaaaaacacagaataaggaacatatttaactttttttcattataaaatggttagaggaccctaccccctctagattccctgatttccccaggcctgcagcatacagtaagatgggtccctgtgccaggcctcaatactgccagggaataaaaccagagggagaggaccctcagtgtcatatcaggaagcccagtgccagaggacagacaggttcaaaactggcttttcctctgggcctgggttggtgctataggccaagggtcattttatacttgggtataaatcaatcccagtttgggaaaagattatttttaagcttaaaaggctgacatgtgccattatatgtagtatgtaatatatgtaacatcttccaattcttttaaaataaaattaatatttataatggatatttaatgattgttatttttaaaaaccagcttataattcctcgttatgcatgatttatccaaagtttccatagttttattcaaaataataaatgttaataaggtgataaggggtatatttaatgtattgtatcaaattgtgaataagaaagtaggatggagctttctagaggttgggccttagttctgttatcctcattgcttttaaccaataagttaaatgaagttagagttatggtcttcaggttagattatggaccagatctgtgagggtcagcatggaaattcacattcaacaaggtagcacacaggaccaagagcagcacatgcaatcaactggaataatatagtaatcctgtaactgggtttgaaaaaataatcaacaaaagatacaattcaagggttaggttgcagagagctggcttgagagtagttattatgaaaaaggcctcaaggagtacgtgttcagtatgctctaagatgataaagtggctgttaaaaagggagttgatttgaggaagtattacttagcattcatgcatattgggcttaggctctagccctgccactatcattgtcttctctggactgtgaagtcactgaggacaaggaaactaaatttaatgtctgtatcactagtgcctagaatttctggacacttagtagtcaccatcaggcgtttatttaatgaatgagaagcaaagtgaccttggttacttttttaccctgaggggctcagcactcattaggacttggtgcctaattttataaaaagtcactaagctcaagtgcttggatgaaaggacagcgtggataaaaaggtttttaaaacatggatgttaaggctgttttgcttggagaagacttgggactgggacagtctttagatattatttgaaatgctggcactgtctatctggatcccagggcttgaactaggatttgaggaagtcacagggaagcagatttcagtctgacatttattcagtgcaagttttttggtgctgtagtatatgatgaaagatgtaaagctgaataaagcattatttctgccctagagttgttcacagcctagtcaggcatatggatatgtaaacaatgactgtaacgtgttatagatgtaaagacaaaataaaggttaaagagggcataaaggagcactcaattgcagagatttgaggacattatttttattttgagctttaaaaagatgaataggtgttctcaggaggtagggatctggctgagagggaataatctgagcaaaggtatgaaacagcctaatgcattagagaaaaaagttcttttagtaaggcatttggggttggggaagctagaaaaagaaatgggagctggtcacacagggccttgtgtgccagactaaggggtttgtagtatatattgtaggcagaagagatccatcaacagattgcaagcaaggaagtatgttcactttaaagtttgagaaagaatagtgtggaagcacgtctcaaatttagacttacttgttccccctctgaaccgtgaatcagaccatttcaggtagaagtcttccccggtttatctgatctactcggggcctcaggcttctcagctgggaagagaggatgcaagaccagactgaagaacacggttgagtccccagaaccaaaagggggcctttctgcttcttagccagctacctcttcgagtttttcaaattgtgagggggaccataaaaggatggaaacttttagatgacattctacaaattatttttttctttaaattaaaagaacctagccaataagatagagaatgggcatctaaggcatctcagagctctctgatgaagccaggttgtcaaagatcatttgcaaaagaagggaaaactggcatgacaaaagctacagagaggagagtgaaatatagaagtgtttgaaatgttcaagctcacaataagcttaaatttatagaaaatgctaaggttgtcaagaaggcttttttttttttcttttttaaacctgagggcaaaaaggaatggataaagtagtgtaatggattgacaatcaggaagaacagaataactcagtttttttttctcctacaaggagatatggctggaccaaaataaaatgacatgaaattgcaaaaatgaaaat

SEQ ID NO: 308557 - DNA, 4965 bp, Homo sapiens
  misc_feature (7)..(7): n is a, c, g, or t
  misc_feature (16)..(16): n is a, c, g, or t
cagattncacggccgntgcgactacggctgcgcagaagacgacagaaggaatcagagaaaaatctttaactccaccattagcacccaaagctaagattctaatttaaactattctctgttctttcatggggaagcagatttgggtaccacccaagtattgactcacccatcaacaaccaaaaaaaaaaaaaaaaaaaaaaaaagcgccgctcgtcgacgcggccgcgaattcgcggcgtgcaaagcgggctgcgagaagacgacagaagggagcgcctgtccctgtcacggaccccagcgttaccatgcatcctgccgtcttcctatccttacccgacctcagatgctcccttctgctcctggtaacttgggtttttactcctgtaacaactgaaataacaagtcttgatacagagaatatagatgaaattttaaacaatgctgatgttgctttagtaaatttttatgctgactggtgtcgtttcagtcagatgttgcatccaatttttgaggaagcttccgatgtcattaaggaagaatttccaaatgaaaatcaagtagtgtttgccagagttgattgtgatcagcactctgacatagcccagagatacaggataagcaaatacccaaccctcaaattgtttcgtaatgggatgatgatgaagagagaatacaggggtcagcgatcagtgaaagcattggcagattacatcaggcaacaaaaaagtgaccccattcaagaaattcgggacttagcagaaatcaccactcttgatcgcagcaaaagaaatatcattggatattttgagcaaaaggactcggacaactatagagtttttgaacgagtagcgaatattttgcatgatgactgtgcctttctttctgcatttggggatgtttcaaaaccggaaagatatagtggcgacaacataatctacaaaccaccagggcattctgctccggatatggtgtacttgggagctatgacaaattttgatgtgacttacaattggattcaagataaatgtgttcctcttgtccgagaaataacatttgaaaatggagaggaattgacagaagaaggactgccttttctcatactctttcacatgaaagaagatacagaaagtttagaaatattccagaatgaagtagctcggcaattaataagtgaaaaaggtacaataaactttttacatgccgattgtgacaaatttagacatcctcttctgcacatacagaaaactccagcagattgtcctgtaatcgctattgacagctttaggcatatgtatgtgtttggagacttcaaagatgtattaattcctggaaaactcaagcaattcgtatttgacttacattctggaaaactgcacagagaattccatcatggacctgacccaactgatacagccccaggagagcaagcccaagatgtagcaagcagtccacctgagagctccttccagaaactagcacccagtgaatataggtatactctattgagggatcgagatgagctttaaaaacttgaaaaacagtttgtaagcctttcaacagcagcatcaacctacgtggtggaaatagtaaacctatattttcataattctatgtgtatttttattttgaataaacagaaagaaattttgggtttttaatttttttctccccgactcaaaatgcattgtcatttaatatagtagcctcttaaaaaaaaaaaaacctgctaggatttaaaaataaaaatcagaggcctatctccactttaaatctgtcctgtaaaagttttataaatcaaatgaaaggtgacattgccagaaacttaccattaacttgcactactagggtagggaggacttaggatgtttcctgtgtcgtatgtgcttttctttctttcatatgatcaattctgttggtattttcagtatctcatttctcaaagctaaagagatatacattctggatacttgggaggggaataaattaaagttttcacactgtgtactgtgttttactgattggttggatattgcttatgaaaattccatagtggtatttttttggattcttaatgtgtaacttaaacatactttgaagtggaggagagtcataagacagaacatttggcaggaattgtccttatgaaacaagaaaaagaaaatgaaaagtattattaagcttctgtgtttgtctaaaaatgtggcatatggatggcatttaaaactttgaatgaattatacctaaatctgggacagggaggtgacagtggaacaggctaccaatcagaactagatgacttttaaggctcctcctattatgagacttcaatttccaaagagaagaactagcagagaaattgtatttcagtaattttaagctccttctgtcttgtagagtcttgttatagttgtataaatcaaaaacacagaataaggaacatatttaactttttttcattataaaatggttagaggaccctaccccctctagattccctgatttccccaggcctgcagcatacagtaagatgggtccctgtgccaggcctcaatactgccagggaataaaaccagagggagaggaccctcagtgtcatatcaggaagcccagtgccagaggacagacaggttcaaaactggcttttcctctgggcctgggttggtgctataggccaagggtcattttatacttgggtataaatcaatcccagtttgggaaaagattatttttaagcttaaaaggctgacatgtgccattatatgtagtatgtaatatatgtaacatcttccaattcttttaaaataaaattaatatttataatggatatttaatgattgttatttttaaaaaccagcttataattcctcgttatgcatgatttatccaaagtttccatagttttattcaaaataataaatgttaataaggtgataaggggtatatttaatgtattgtatcaaattgtgaataagaaagtaggatggagctttctagaggttgggccttagttctgttatcctcattgcttttaaccaataagttaaatgaagttagagttatggtcttcaggttagattatggaccagatctgtgagggtcagcatggaaattcacattcaacaaggtagcacacaggaccaagagcagcacatgcaatcaactggaataatatagtaatcctgtaactgggtttgaaaaaataatcaacaaaagatacaattcaagggttaggttgcagagagctggcttgagagtagttattatgaaaaaggcctcaaggagtacgtgttcagtatgctctaagatgataaagtggctgttaaaaagggagttgatttgaggaagtattacttagcattcatgcatattgggcttaggctctagccctgccactatcattgtcttctctggactgtgaagtcactgaggacaaggaaactaaatttaatgtctgtatcactagtgcctagaatttctggacacttagtagtcaccatcaggcgtttatttaatgaatgagaagcaaagtgaccttggttacttttttaccctgaggggctcagcactcattaggacttggtgcctaattttataaaaagtcactaagctcaagtgcttggatgaaaggacagcgtggataaaaaggtttttaaaacatggatgttaaggctgttttgcttggagaagacttgggactgggacagtctttagatattatttgaaatgctggcactgtctatctggatcccagggcttgaactaggatttgaggaagtcacagggaagcagatttcagtctgacatttattcagtgcaagttttttggtgctgtagtatatgatgaaagatgtaaagctgaataaagcattatttctgccctagagttgttcacagcctagtcaggcatatggatatgtaaacaatgactgtaacgtgttatagatgtaaagacaaaataaaggttaaagagggcataaaggagcactcaattgcagagatttgaggacattatttttattttgagctttaaaaagatgaataggtgttctcaggaggtagggatctggctgagagggaataatctgagcaaaggtatgaaacagcctaatgcattagagaaaaaagttcttttagtaaggcatttggggttggggaagctagaaaaagaaatgggagctggtcacacagggccttgtgtgccagactaaggggtttgtagtatatattgtaggcagaagagatccatcaacagattgcaagcaaggaagtatgttcactttaaagtttgagaaagaatagtgtggaagcacgtctcaaatttagacttacttgttccccctctgaaccgtgaatcagaccatttcaggtagaagtcttccccggtttatctgatctactcggggcctcaggcttctcagctgggaagagaggatgcaagaccagactgaagaacacggttgagtccccagaaccaaaagggggcctttctgcttcttagccagctacctcttcgagtttttcaaattgtgagggggaccataaaaggatggaaacttttagatgacattctacaaattatttttttctttaaattaaaagaacctagccaataagatagagaatgggcatctaaggcatctcagagctctctgatgaagccaggttgtcaaagatcatttgcaaaagaagggaaaactggcatgacaaaagctacagagaggagagtgaaatatagaagtgtttgaaatgttcaagctcacaataagcttaaatttatagaaaatgctaaggttgtcaagaaggcttttttttttttcttttttaaacctgagggcaaaaaggaatggataaagtagtgtaatggattgacaatcaggaagaacagaataactcagtttttttttctcctacaaggagatatggctggaccaaaataaaatgacatgaaattgcaaaaatgaaaat

SEQ ID NO: 308558 - DNA, 4797 bp, Homo sapiens
gcaggacccggaagtgagggtgtgagaggcctctctggaagttgtcccgggtgttcgccgctggagcccgggtcgagaggacgaggtgccgctgcctggagaatcctccgctgccgtcggctcccggagcccagccctttcctaacccaacccaacctagcccagtcccagccgccagcgcctgtccctgtcacggaccccagcgttaccatgcatcctgccgtcttcctatccttacccgacctcagatgctcccttctgctcctgacaatgctgatgttgctttagtaaatttttatgctgactggtgtcgtttcagtcagatgttgcatccaatttttgaggaagcttccgatgtcattaaggaagaatttccaaatgaaaatcaagtagtgtttgccagagttgattgtgatcagcactctgacatagcccagagatacaggataagcaaatacccaaccctcaaattgtttcgtaatgggatgatgatgaagagagaatacaggggtcagcgatcagtgaaagcattggcagattacatcaggcaacaaaaaagtgaccccattcaagaaattcgggacttagcagaaatcaccactcttgatcgcagcaaaagaaatatcattggatattttgagcaaaaggactcggacaactatagagtttttgaacgagtagcgaatattttgcatgatgactgtgcctttctttctgcatttggggatgtttcaaaaccggaaagatatagtggcgacaacataatctacaaaccaccagggcattctgctccggatatggtgtacttgggagctatgacaaattttgatgtgacttacaattggattcaagataaatgtgttcctcttgtccgagaaataacatttgaaaatggagaggaattgacagaagaaggactgccttttctcatactctttcacatgaaagaagatacagaaagtttagaaatattccagaatgaagtagctcggcaattaataagtgaaaaaggtacaataaactttttacatgccgattgtgacaaatttagacatcctcttctgcacatacagaaaactccagcagattgtcctgtaatcgctattgacagctttaggcatatgtatgtgtttggagacttcaaagatgtattaattcctggaaaactcaagcaattcgtatttgacttacattctggaaaactgcacagagaattccatcatggacctgacccaactgatacagccccaggagagcaagcccaagatgtagcaagcagtccacctgagagctccttccagaaactagcacccagtgaatataggtatactctattgagggatcgagatgagctttaaaaacttgaaaaacagtttgtaagcctttcaacagcagcatcaacctacgtggtggaaatagtaaacctatattttcataattctatgtgtatttttattttgaataaacagaaagaaattttgggtttttaatttttttctccccgactcaaaatgcattgtcatttaatatagtagcctcttaaaaaaaaaaaaacctgctaggatttaaaaataaaaatcagaggcctatctccactttaaatctgtcctgtaaaagttttataaatcaaatgaaaggtgacattgccagaaacttaccattaacttgcactactagggtagggaggacttaggatgtttcctgtgtcgtatgtgcttttctttctttcatatgatcaattctgttggtattttcagtatctcatttctcaaagctaaagagatatacattctggatacttgggaggggaataaattaaagttttcacactgtgtactgtgttttactgattggttggatattgcttatgaaaattccatagtggtatttttttggattcttaatgtgtaacttaaacatactttgaagtggaggagagtcataagacagaacatttggcaggaattgtccttatgaaacaagaaaaagaaaatgaaaagtattattaagcttctgtgtttgtctaaaaatgtggcatatggatggcatttaaaactttgaatgaattatacctaaatctgggacagggaggtgacagtggaacaggctaccaatcagaactagatgacttttaaggctcctcctattatgagacttcaatttccaaagagaagaactagcagagaaattgtatttcagtaattttaagctccttctgtcttgtagagtcttgttatagttgtataaatcaaaaacacagaataaggaacatatttaactttttttcattataaaatggttagaggaccctaccccctctagattccctgatttccccaggcctgcagcatacagtaagatgggtccctgtgccaggcctcaatactgccagggaataaaaccagagggagaggaccctcagtgtcatatcaggaagcccagtgccagaggacagacaggttcaaaactggcttttcctctgggcctgggttggtgctataggccaagggtcattttatacttgggtataaatcaatcccagtttgggaaaagattatttttaagcttaaaaggctgacatgtgccattatatgtagtatgtaatatatgtaacatcttccaattcttttaaaataaaattaatatttataatggatatttaatgattgttatttttaaaaaccagcttataattcctcgttatgcatgatttatccaaagtttccatagttttattcaaaataataaatgttaataaggtgataaggggtatatttaatgtattgtatcaaattgtgaataagaaagtaggatggagctttctagaggttgggccttagttctgttatcctcattgcttttaaccaataagttaaatgaagttagagttatggtcttcaggttagattatggaccagatctgtgagggtcagcatggaaattcacattcaacaaggtagcacacaggaccaagagcagcacatgcaatcaactggaataatatagtaatcctgtaactgggtttgaaaaaataatcaacaaaagatacaattcaagggttaggttgcagagagctggcttgagagtagttattatgaaaaaggcctcaaggagtacgtgttcagtatgctctaagatgataaagtggctgttaaaaagggagttgatttgaggaagtattacttagcattcatgcatattgggcttaggctctagccctgccactatcattgtcttctctggactgtgaagtcactgaggacaaggaaactaaatttaatgtctgtatcactagtgcctagaatttctggacacttagtagtcaccatcaggcgtttatttaatgaatgagaagcaaagtgaccttggttacttttttaccctgaggggctcagcactcattaggacttggtgcctaattttataaaaagtcactaagctcaagtgcttggatgaaaggacagcgtggataaaaaggtttttaaaacatggatgttaaggctgttttgcttggagaagacttgggactgggacagtctttagatattatttgaaatgctggcactgtctatctggatcccagggcttgaactaggatttgaggaagtcacagggaagcagatttcagtctgacatttattcagtgcaagttttttggtgctgtagtatatgatgaaagatgtaaagctgaataaagcattatttctgccctagagttgttcacagcctagtcaggcatatggatatgtaaacaatgactgtaacgtgttatagatgtaaagacaaaataaaggttaaagagggcataaaggagcactcaattgcagagatttgaggacattatttttattttgagctttaaaaagatgaataggtgttctcaggaggtagggatctggctgagagggaataatctgagcaaaggtatgaaacagcctaatgcattagagaaaaaagttcttttagtaaggcatttggggttggggaagctagaaaaagaaatgggagctggtcacacagggccttgtgtgccagactaaggggtttgtagtatatattgtaggcagaagagatccatcaacagattgcaagcaaggaagtatgttcactttaaagtttgagaaagaatagtgtggaagcacgtctcaaatttagacttacttgttccccctctgaaccgtgaatcagaccatttcaggtagaagtcttccccggtttatctgatctactcggggcctcaggcttctcagctgggaagagaggatgcaagaccagactgaagaacacggttgagtccccagaaccaaaagggggcctttctgcttcttagccagctacctcttcgagtttttcaaattgtgagggggaccataaaaggatggaaacttttagatgacattctacaaattatttttttctttaaattaaaagaacctagccaataagatagagaatgggcatctaaggcatctcagagctctctgatgaagccaggttgtcaaagatcatttgcaaaagaagggaaaactggcatgacaaaagctacagagaggagagtgaaatatagaagtgtttgaaatgttcaagctcacaataagcttaaatttatagaaaatgctaaggttgtcaagaaggcttttttttttttcttttttaaacctgagggcaaaaaggaatggataaagtagtgtaatggattgacaatcaggaagaacagaataactcagtttttttttctcctacaaggagatatggctggaccaaaataaaatgacatgaaattgcaaaaatgaaaat

SEQ ID NO: 308559 - DNA, 4456 bp, Homo sapiens
gcaggacccggaagtgagggtgtgagaggcctctctggaagttgtcccgggtgttcgccgctggagcccgggtcgagaggacgaggtgccgctgcctggagaatcctccgctgccgtcggctcccggagcccagccctttcctaacccaacccaacctagcccagtcccagccgccagcgcctgtccctgtcacggaccccagcgttaccatgcatcctgccgtcttcctatccttacccgacctcagatgctcccttctgctcctgcgcagcaaaagaaatatcattggatattttgagcaaaaggactcggacaactatagagtttttgaacgagtagcgaatattttgcatgatgactgtgcctttctttctgcatttggggatgtttcaaaaccggaaagatatagtggcgacaacataatctacaaaccaccagggcattctgctccggatatggtgtacttgggagctatgacaaattttgatgtgacttacaattggattcaagataaatgtgttcctcttgtccgagaaataacatttgaaaatggagaggaattgacagaagaaggactgccttttctcatactctttcacatgaaagaagatacagaaagtttagaaatattccagaatgaagtagctcggcaattaataagtgaaaaaggtacaataaactttttacatgccgattgtgacaaatttagacatcctcttctgcacatacagaaaactccagcagattgtcctgtaatcgctattgacagctttaggcatatgtatgtgtttggagacttcaaagatgtattaattcctggaaaactcaagcaattcgtatttgacttacattctggaaaactgcacagagaattccatcatggacctgacccaactgatacagccccaggagagcaagcccaagatgtagcaagcagtccacctgagagctccttccagaaactagcacccagtgaatataggtatactctattgagggatcgagatgagctttaaaaacttgaaaaacagtttgtaagcctttcaacagcagcatcaacctacgtggtggaaatagtaaacctatattttcataattctatgtgtatttttattttgaataaacagaaagaaattttgggtttttaatttttttctccccgactcaaaatgcattgtcatttaatatagtagcctcttaaaaaaaaaaaaacctgctaggatttaaaaataaaaatcagaggcctatctccactttaaatctgtcctgtaaaagttttataaatcaaatgaaaggtgacattgccagaaacttaccattaacttgcactactagggtagggaggacttaggatgtttcctgtgtcgtatgtgcttttctttctttcatatgatcaattctgttggtattttcagtatctcatttctcaaagctaaagagatatacattctggatacttgggaggggaataaattaaagttttcacactgtgtactgtgttttactgattggttggatattgcttatgaaaattccatagtggtatttttttggattcttaatgtgtaacttaaacatactttgaagtggaggagagtcataagacagaacatttggcaggaattgtccttatgaaacaagaaaaagaaaatgaaaagtattattaagcttctgtgtttgtctaaaaatgtggcatatggatggcatttaaaactttgaatgaattatacctaaatctgggacagggaggtgacagtggaacaggctaccaatcagaactagatgacttttaaggctcctcctattatgagacttcaatttccaaagagaagaactagcagagaaattgtatttcagtaattttaagctccttctgtcttgtagagtcttgttatagttgtataaatcaaaaacacagaataaggaacatatttaactttttttcattataaaatggttagaggaccctaccccctctagattccctgatttccccaggcctgcagcatacagtaagatgggtccctgtgccaggcctcaatactgccagggaataaaaccagagggagaggaccctcagtgtcatatcaggaagcccagtgccagaggacagacaggttcaaaactggcttttcctctgggcctgggttggtgctataggccaagggtcattttatacttgggtataaatcaatcccagtttgggaaaagattatttttaagcttaaaaggctgacatgtgccattatatgtagtatgtaatatatgtaacatcttccaattcttttaaaataaaattaatatttataatggatatttaatgattgttatttttaaaaaccagcttataattcctcgttatgcatgatttatccaaagtttccatagttttattcaaaataataaatgttaataaggtgataaggggtatatttaatgtattgtatcaaattgtgaataagaaagtaggatggagctttctagaggttgggccttagttctgttatcctcattgcttttaaccaataagttaaatgaagttagagttatggtcttcaggttagattatggaccagatctgtgagggtcagcatggaaattcacattcaacaaggtagcacacaggaccaagagcagcacatgcaatcaactggaataatatagtaatcctgtaactgggtttgaaaaaataatcaacaaaagatacaattcaagggttaggttgcagagagctggcttgagagtagttattatgaaaaaggcctcaaggagtacgtgttcagtatgctctaagatgataaagtggctgttaaaaagggagttgatttgaggaagtattacttagcattcatgcatattgggcttaggctctagccctgccactatcattgtcttctctggactgtgaagtcactgaggacaaggaaactaaatttaatgtctgtatcactagtgcctagaatttctggacacttagtagtcaccatcaggcgtttatttaatgaatgagaagcaaagtgaccttggttacttttttaccctgaggggctcagcactcattaggacttggtgcctaattttataaaaagtcactaagctcaagtgcttggatgaaaggacagcgtggataaaaaggtttttaaaacatggatgttaaggctgttttgcttggagaagacttgggactgggacagtctttagatattatttgaaatgctggcactgtctatctggatcccagggcttgaactaggatttgaggaagtcacagggaagcagatttcagtctgacatttattcagtgcaagttttttggtgctgtagtatatgatgaaagatgtaaagctgaataaagcattatttctgccctagagttgttcacagcctagtcaggcatatggatatgtaaacaatgactgtaacgtgttatagatgtaaagacaaaataaaggttaaagagggcataaaggagcactcaattgcagagatttgaggacattatttttattttgagctttaaaaagatgaataggtgttctcaggaggtagggatctggctgagagggaataatctgagcaaaggtatgaaacagcctaatgcattagagaaaaaagttcttttagtaaggcatttggggttggggaagctagaaaaagaaatgggagctggtcacacagggccttgtgtgccagactaaggggtttgtagtatatattgtaggcagaagagatccatcaacagattgcaagcaaggaagtatgttcactttaaagtttgagaaagaatagtgtggaagcacgtctcaaatttagacttacttgttccccctctgaaccgtgaatcagaccatttcaggtagaagtcttccccggtttatctgatctactcggggcctcaggcttctcagctgggaagagaggatgcaagaccagactgaagaacacggttgagtccccagaaccaaaagggggcctttctgcttcttagccagctacctcttcgagtttttcaaattgtgagggggaccataaaaggatggaaacttttagatgacattctacaaattatttttttctttaaattaaaagaacctagccaataagatagagaatgggcatctaaggcatctcagagctctctgatgaagccaggttgtcaaagatcatttgcaaaagaagggaaaactggcatgacaaaagctacagagaggagagtgaaatatagaagtgtttgaaatgttcaagctcacaataagcttaaatttatagaaaatgctaaggttgtcaagaaggcttttttttttttcttttttaaacctgagggcaaaaaggaatggataaagtagtgtaatggattgacaatcaggaagaacagaataactcagtttttttttctcctacaaggagatatggctggaccaaaataaaatgacatgaaattgcaaaaatgaaaat

SEQ ID NO: 308560 - DNA, 778 bp, Homo sapiens
gctgcagtgagccgagattgtgccactgcactctagcctgggtgacagagtaagaccccatctcaatttaaaatatatatattatttcaaactttaaaaagattctaaaaatagtacaaataattcccatatacccttcacttagcttcctcaaacattaacaccttatgtaaccgtagtccaaataccaagataagaaaattaacattagcagtctctagacctcattcccattttaatcagttgtctcactgatgtcctatttctgccccgggaccctctctggagccacacagttagttgttagacctccctgtctccttcgatgtgggatagttccagtctttttttgtcatgaccttggtatttttgaagagtactggccattgactttggaaagcccttcagcttggattgtctggtgttttctcattatttggagttttacatttttggtaagaataaagtgctgttttgcccttccaggacctctttcaaggtggcacatgtggtcggtatatcttatcttaggtggtgctaattttgattattagttaaggtggtgtctgccacgtttctccactgtaaaatcactatccttccctttacaattggtcagtatatttgggggagataattttaaactatgtagatgtcctagttctagctaccattgatgagattactgtggtatttgagaaattgtgatttttaaaaactttttacgtgtattaattggaattctataaggagccaatttctgttctccatttattca

SEQ ID NO: 308561 - DNA, 2376 bp, Homo sapiens
tccagcgcgtgcccggggcggcggcgcgcggcggggggtggttggggtgcgcgccggcccgagtggacgccgtcgcgaccgccatgcagctgacggtgaaggcgctgcagggccgcgagtgcagcctgcaggtgccagaggacgagctggtgtccacgctgaagcagctggtctccgagaagctgaacgtcccagtgcgccagcagcggctgctgttcaagggcaaggccctggcagatgggaaacgactctcggattatagcatcgggcccaactccaagctcaacctagtggtcaaacccctggagaaggtgctactagaagaaggcgaggcccagaggctggccgactccccacccccgcaggtctggcagctgatctccaaagtcttggcccgccacttcagtgcggcagatgccagcagggtcctggaacagctacagagggattacgagaggtccctgagtcgcctgacgctggacgacatcgaacggttggccagccgcttcctgcaccctgaagtgactgagacaatggagaagggcttctccaaatagaattctcggagcatggggaggtgcccaacgccaggctaccgctgcatgtcgcactaagtgtgttctcctgttgcagttgggctcatcatcgtcatagctggcatgtacctggctctggccaggtgctaggcactcctcacagcttgacctgggtttgcttccacaccctcagaagaggagagccggcacagcagaggcaccggcgatgaagtggcacagccccagtcggaatccagcggcttctgaaagtgccttggtgtgagaaggaggaaggggccgcttggagagctgggctctcgcatgtcatgtttagcccactgagaatataccctcaggtgactccctcccgatcctgaaagggaaagcagctgtcacctgacttctggcgggtccaacatagccctcagcttacctctgcaggaggccgagtgacagccagccctggaaccccccgacccccgcagctgctgcagccagtgtgccagtgtgcgttcgacaaatggaaaagcagattggggccagggagtcagcaaggcaccccagctctgtgatgtgactttgggcgagtctcagtgccacttggtccccagccatggactctatacagtgagggccactcaccgacctgagtcagtgtcctctgtctcacagggcccctctcccttctgttcagtaaacaaactgaagccaaaaatgaagccgtggccaagcgtgacccagagatggggtgtcctggcccttagtgacacagctcctctctggggcaccctatctgcttgtctcgtccaggaagcgttagggctgatgggtgactcagcaaggcagtgtcagagctgggactgggcgtaggcctttgtcctcatccccagcactggcctccctgtggaagatgaacatatcccagccacctgtgtacaggggctcactttgtgtgctccttgttgcctgagaagaaaccttggggtgccagggtgggggcagaagcatgggctgggttccggttcatcctcctccaccctgccgtgtgtgtgggcacaagaggacatctaaccacctgctccttggaggaggcccccaggggtggtagaggctggaaggaagccacatcaggaggacgccactccggcccttcacccttgccaagtgagctgctcacagtgtggtcagggctgcgcgtgctggaggccctcctgcctgggccttgtggggcaaatattgggtccccaggctggaaagatggacagaggcccaatgggtgaaggctttgaagagcacacagaagcccctggccccccacgagagctggagagccatgtatatggcttcaaagccacctacggcagggacacactcgtgagcatgtgtggcctgcagttcaggtgatacatttaccagtgttcttgtttgtgtggtgccaggaaattgattttggaaaaagtgaaataacattaaaggtgaatgtgaggcttctacttttatccaaaaggagctatattagctaggctgtttctgatatccaatcattggtttaacaataaaggcaatttgtttaatcagttaacggaaatttcttggcttatgaaagtgaaaagtccagtggtattggcattggcagcaggtgagcaatttcacccagtgtcttctgcctccctctgcgttggtatctgctacatcccaggccaccacctccgaggatgaaaagatggctgcctgcagcttccacggaatccctccctcactgccagagcagcatcttctctgtgtaccacctctgctgtctcagatgcccccagcaaataaacactcttctcgttggtca

SEQ ID NO: 308562 - DNA, 2113 bp, Homo sapiens
tccagcgcgtgcccggggcggcggcgcgcggcggggggtggttggggtgcgcgccggcccgagtggacgccgtcgcgaccgccatgcagctgacggtgaaggcgctgcagggccgcgagtgcagcctgcaggtgccagaggacgagctggtgtccacgctgaagcagctggtctccgagaagctgaacgtcccagtgcgccagcagcggctgctgttcaagggcaaggccctggcagatgggaaacgactctcggattatagcatcgggcccaactccaagctcaacctagtggtcaaacccctggagaaggtgctactagaagaaggcgaggcccagaggctggccgactccccacccccgcaggtctggcagctgatctccaaagtcttggcccgccacttcagtgcggcagatgccagcagggtcctggaacagctacagagggattacgagaggtccctgagtcgcctgacgctggacgacatcgaacggttggccagccgcttcctgcaccctgaagtgactgagacaatggagaagggcttctccaaatagaattctcggagcatggggaggtgcccaacgccaggctaccgctgcatgtcgcactaagtgtgttctcctgttgcagttgggctcatcatcgtcatagctggcatgtacctggctctggccaggtgctaggcactcctcacagcttgacctgggtttgcttccacaccctcagaagaggagagccggcacagcagaggcaccggcgatgaagtggcacagccccagtcggaatccagcggcttctgaaagtgccttggtgtgagaaggaggaaggggccgcttggagagctgggctctcgcatgtcatgtttagcccactgagaatataccctcaggtgactccctcccgatcctgaaagggaaagcagctgtcacctgacttctggcgggtccaacatagccctcagcttacctctgcaggaggccgagtgacagccagccctggaaccccccgacccccgcagctgctgcagccagtgtgccagtgtgcgttcgacaaatggaaaagcagattggggccagggagtcagcaaggcaccccagctctgtgatgtgactttgggcgagtctcagtgccacttggtccccagccatggactctatacagtgagggccactcaccgacctgagtcagtgtcctctgtctcacagggcccctctcccttctgttcagtaaacaaactgaagccaaaaatgaagccgtggccaagcgtgacccagagatggggtgtcctggcccttagtgacacagctcctctctggggcaccctatctgcttgtctcgtccaggaagcgttagggctgatgggtgactcagcaaggcagtgtcagagctgggactgggcgtaggcctttgtcctcatccccagcactggcctccctgtggaagatgaacatatcccagccacctgtgtacaggggctcactttgtgtgctccttgttgcctgagaagaaaccttggggtgccagggtgggggcagaagcatgggctgggttccggttcatcctcctccaccctgccgtgtgtgtgggcacaagaggacatctaaccacctgctccttggaggaggcccccaggggtggtagaggctggaaggaagccacatcaggaggacgccactccggcccttcacccttgccaagtgagctgctcacagtgtggtcagggctgcgcgtgctggaggccctcctgcctgggccttgtggggcaaatattgggtccccaggctggaaagatggacagaggcccaatgggtgaaggctttgaagagcacacagaagcccctggccccccacgagagctggagagccatgtatatggcttcaaagccacctacggcagggacacactcgtgagcatgtgtggcctgcagttcaggtgatacatttaccagtgttcttgtttgtgtggtgccaggaaattgattttggaaaaagtgaaataacattaaaggtgaatgtgaggcttctacttttatccaaaaggagctatattagctaggctgtttctgatatccaatcattggtttaacaataaaggcaatttgtttaatca

SEQ ID NO: 308563 - DNA, 2262 bp, Homo sapiens
gcggccgcatgcctcacagccggatgccgcagcgctccgctcccgccgcccgaggcggcctcgcgccccgggccacccccacggcggtggaggaggaggaacccatcgatctgtctttggcagatgggaaacgactctcggattatagcatcgggcccaactccaagctcaacctagtggtcaaacccctggagaaggtgctactagaagaaggcgaggcccagaggctggccgactccccacccccgcaggtctggcagctgatctccaaagtcttggcccgccacttcagtgcggcagatgccagcagggtcctggaacagctacagagggattacgagaggtccctgagtcgcctgacgctggacgacatcgaacggttggccagccgcttcctgcaccctgaagtgactgagacaatggagaagggcttctccaaatagaattctcggagcatggggaggtgcccaacgccaggctaccgctgcatgtcgcactaagtgtgttctcctgttgcagttgggctcatcatcgtcatagctggcatgtacctggctctggccaggtgctaggcactcctcacagcttgacctgggtttgcttccacaccctcagaagaggagagccggcacagcagaggcaccggcgatgaagtggcacagccccagtcggaatccagcggcttctgaaagtgccttggtgtgagaaggaggaaggggccgcttggagagctgggctctcgcatgtcatgtttagcccactgagaatataccctcaggtgactccctcccgatcctgaaagggaaagcagctgtcacctgacttctggcgggtccaacatagccctcagcttacctctgcaggaggccgagtgacagccagccctggaaccccccgacccccgcagctgctgcagccagtgtgccagtgtgcgttcgacaaatggaaaagcagattggggccagggagtcagcaaggcaccccagctctgtgatgtgactttgggcgagtctcagtgccacttggtccccagccatggactctatacagtgagggccactcaccgacctgagtcagtgtcctctgtctcacagggcccctctcccttctgttcagtaaacaaactgaagccaaaaatgaagccgtggccaagcgtgacccagagatggggtgtcctggcccttagtgacacagctcctctctggggcaccctatctgcttgtctcgtccaggaagcgttagggctgatgggtgactcagcaaggcagtgtcagagctgggactgggcgtaggcctttgtcctcatccccagcactggcctccctgtggaagatgaacatatcccagccacctgtgtacaggggctcactttgtgtgctccttgttgcctgagaagaaaccttggggtgccagggtgggggcagaagcatgggctgggttccggttcatcctcctccaccctgccgtgtgtgtgggcacaagaggacatctaaccacctgctccttggaggaggcccccaggggtggtagaggctggaaggaagccacatcaggaggacgccactccggcccttcacccttgccaagtgagctgctcacagtgtggtcagggctgcgcgtgctggaggccctcctgcctgggccttgtggggcaaatattgggtccccaggctggaaagatggacagaggcccaatgggtgaaggctttgaagagcacacagaagcccctggccccccacgagagctggagagccatgtatatggcttcaaagccacctacggcagggacacactcgtgagcatgtgtggcctgcagttcaggtgatacatttaccagtgttcttgtttgtgtggtgccaggaaattgattttggaaaaagtgaaataacattaaaggtgaatgtgaggcttctacttttatccaaaaggagctatattagctaggctgtttctgatatccaatcattggtttaacaataaaggcaatttgtttaatcagttaacggaaatttcttggcttatgaaagtgaaaagtccagtggtattggcattggcagcaggtgagcaatttcacccagtgtcttctgcctccctctgcgttggtatctgctacatcccaggccaccacctccgaggatgaaaagatggctgcctgcagcttccacggaatccctccctcactgccagagcagcatcttctctgtgtaccacctctgctgtctcagatgcccccagcaaataaacactcttctcgttggtca

SEQ ID NO: 308564 - DNA, 2119 bp, Homo sapiens
tccagcgcgtgcccggggcggcggcgcgcggcggggggtggttggggtgcgcgccggcccgagtggacgccgtcgcgaccgccatgcagctgacggtgaaggcgctgcagggccgcgagtgcagcctgcaggtgccagaggacgagctggtgtccacgctgaagcagctggtctccgagaagctgaacgtcccagtgcgccagcagcggctgctgttcaagggcaaggccctggcagatgggaaacgactctcggattatagcatcgggcccaactccaagctcaacctagtggtcaaacccctggagaaggtgctactagaagaaggcgaggcccagaggctggccgactccccacccccgcaggtctggcagctgatctccaaagtcttggcccgccacttcagtgcggcagatgccagcagggtcctggaacagctacagagggattacgagaggtccctgagtcgcctgacgctggacgacatcgaacggttggccagccgcttcctgcaccctgaagtgactgagacaatggagaagggcttctccaaatagaattctcggagcatggggaggtgcccaacgccaggctaccgctgcatgtcgcactaagtgtgttctcctgttgcagttgggctcatcatcgtcatagctggcatgtacctggctctggccaggtgctaggcactcctcacagcttgacctgggtttgcttccacaccctcagaagaggagagccggcacagcagaggcaccggcgatgaagtggcacagccccagtcggaatccagcggcttctgaaagtgccttggtgtgagaaggaggaaggggccgcttggagagctgggctctcgcatgtcatgtttagcccactgagaatataccctcaggtgactccctcccgatcctgaaagggaaagcagctgtcacctgacttctggcgggtccaacatagccctcagcttacctctgcaggaggccgagtgacagccagccctggaaccccccgacccccgcagctgctgcagccagtgtgccagtgtgcgttcgacaaatggaaaagcagattggggccagggagtcagcaaggcaccccagctctgtgatgtgatcagcaaggcagtgtcagagctgggactgggcgtaggcctttgtcctcatccccagcactggcctccctgtggaagatgaacatatcccagccacctgtgtacaggggctcactttgtgtgctccttgttgcctgagaagaaaccttggggtgccagggtgggggcagaagcatgggctgggttccggttcatcctcctccaccctgccgtgtgtgtgggcacaagaggacatctaaccacctgctccttggaggaggcccccaggggtggtagaggctggaaggaagccacatcaggaggacgccactccggcccttcacccttgccaagtgagctgctcacagtgtggtcagggctgcgcgtgctggaggccctcctgcctgggccttgtggggcaaatattgggtccccaggctggaaagatggacagaggcccaatgggtgaaggctttgaagagcacacagaagcccctggccccccacgagagctggagagccatgtatatggcttcaaagccacctacggcagggacacactcgtgagcatgtgtggcctgcagttcaggtgatacatttaccagtgttcttgtttgtgtggtgccaggaaattgattttggaaaaagtgaaataacattaaaggtgaatgtgaggcttctacttttatccaaaaggagctatattagctaggctgtttctgatatccaatcattggtttaacaataaaggcaatttgtttaatcagttaacggaaatttcttggcttatgaaagtgaaaagtccagtggtattggcattggcagcaggtgagcaatttcacccagtgtcttctgcctccctctgcgttggtatctgctacatcccaggccaccacctccgaggatgaaaagatggctgcctgcagcttccacggaatccctccctcactgccagagcagcatcttctctgtgtaccacctctgctgtctcagatgcccccagcaaataaacactcttctcgttggtca

SEQ ID NO: 308565 - DNA, 2078 bp, Homo sapiens
tccagcgcgtgcccggggcggcggcgcgcggcggggggtggttggggtgcgcgccggcccgagtggacgccgtcgcgaccgccatgcagctgacggtgaaggcgctgcagggccgcgagtgcagcctgcaggtgccagaggacgagctggtgtccacgctgaagcagctggtctccgagaagctgaacgtcccagtgcgccagcagcggctgctgttcaagggcaaggccctggcagatgggaaacgactctcggattatagcatcgggcccaactccaagctcaacctagtggtcaaacccctggagaaggtgctactagaagaaggcgaggcccagaggctggccgactccccacccccgcaggtctggcagctgatctccaaagtcttggcccgccacttcagtgcggcagatgccagcagggtcctggaacagctacagagggattacgagaggtccctgagtcgcctgacgctggacgacatcgaacggttggccagccgcttcctgcaccctgaagtgactgagacaatggagaagggcttctccaaatagaattctcggagcatggggaggtgcccaacgccaggctaccgctgcatgtcgcactaagtgtgttctcctgttgcagttgggctcatcatcgtcatagctggcatgtacctggctctggccaggtgctaggcactcctcacagcttgacctgggtttgcttccacaccctcagaagaggagagccggcacagcagaggcaccggcgatgaagtggcacagccccagtcggaatccagcggcttctgaaagtgccttggtgtgagaaggaggaaggggccgcttggagagctgggctctcgcatgtcatgtttagcccactgagaatataccctcaggtgactccctcccgatcctgaaagggaaagcagctgtcacctgacttctggcgggtccaacatagccctcagcttacctctgcaggaggccgagtgacagccagccctggaaccccccgacccccgcagctgctgcagccagtgtgccagtgtgcgttcgacaaatggaaaagcagattggggccagggagtcagcaaggcaccccagctctgtgatgtgactttgggcgagtctcagtgccacttggtccccagccatggactctatacagtgagggccactcaccgacctgagtcagtgtcctctgtctcacagggcccctctcccttctgttcagtaaacaaactgaagccaaaaatgaagccgtggccaagcgtgacccagagatggggtgtcctggcccttagtgacacagctcctctctggggcaccctatctgcttgtctcgtccaggaagcgttagggctgatgggtgactcagcaaggcagtgtcagagctgggactgggcgtaggcctttgtcctcatccccagcactggcctccctgtggaagatgaacatatcccagccacctgtgtacaggggctcactttgtgtgctccttgttgcctgagaagaaaccttggggtgccagggtggggacagaagcccctggccccccacgagagctggagagccatgtatatggcttcaaagccacctacggcagggacacactcgtgagcatgtgtggcctgcagttcaggtgatacatttaccagtgttcttgtttgtgtggtgccaggaaattgattttggaaaaagtgaaataacattaaaggtgaatgtgaggcttctacttttatccaaaaggagctatattagctaggctgtttctgatatccaatcattggtttaacaataaaggcaatttgtttaatcagttaacggaaatttcttggcttatgaaagtgaaaagtccagtggtattggcattggcagcaggtgagcaatttcacccagtgtcttctgcctccctctgcgttggtatctgctacatcccaggccaccacctccgaggatgaaaagatggctgcctgcagcttccacggaatccctccctcactgccagagcagcatcttctctgtgtaccacctctgctgtctcagatgcccccagcaaataaacactcttctcgttggtca

SEQ ID NO: 308566 - DNA, 2236 bp, Homo sapiens
tccagcgcgtgcccggggcggcggcgcgcggcggggggtggttggggtgcgcgccggcccgagtggacgccgtcgcgaccgccatgcagctgacggtgaaggcgctgcagggccgcgagtgcagcctgcaggtgccagaggacgagctggtgtccacgctgaagcagctggtctccgagaagctgaacgtcccagtgcgccagcagcggctgctgttcaagggcaaggccctggcagatgggaaacgactctcggattatagcatcgggcccaactccaagctcaacctagtggtcaaacccctggagaaggtgctactagaagaaggcgaggcccagaggctggccgactccccacccccgcaggtctggcagctgatctccaaagtcttggcccgccacttcagtgcggcagatgccagcagggtcctggaacagctacagagggattacgagaggtccctgagtcgcctgacgctggacgacatcgaacgttgggctcatcatcgtcatagctggcatgtacctggctctggccaggtgctaggcactcctcacagcttgacctgggtttgcttccacaccctcagaagaggagagccggcacagcagaggcaccggcgatgaagtggcacagccccagtcggaatccagcggcttctgaaagtgccttggtgtgagaaggaggaaggggccgcttggagagctgggctctcgcatgtcatgtttagcccactgagaatataccctcaggtgactccctcccgatcctgaaagggaaagcagctgtcacctgacttctggcgggtccaacatagccctcagcttacctctgcaggaggccgagtgacagccagccctggaaccccccgacccccgcagctgctgcagccagtgtgccagtgtgcgttcgacaaatggaaaagcagattggggccagggagtcagcaaggcaccccagctctgtgatgtgactttgggcgagtctcagtgccacttggtccccagccatggactctatacagtgagggccactcaccgacctgagtcagtgtcctctgtctcacagggcccctctcccttctgttcagtaaacaaactgaagccaaaaatgaagccgtggccaagcgtgacccagagatggggtgtcctggcccttagtgacacagctcctctctggggcaccctatctgcttgtctcgtccaggaagcgttagggctgatgggtgactcagcaaggcagtgtcagagctgggactgggcgtaggcctttgtcctcatccccagcactggcctccctgtggaagatgaacatatcccagccacctgtgtacaggggctcactttgtgtgctccttgttgcctgagaagaaaccttggggtgccagggtgggggcagaagcatgggctgggttccggttcatcctcctccaccctgccgtgtgtgtgggcacaagaggacatctaaccacctgctccttggaggaggcccccaggggtggtagaggctggaaggaagccacatcaggaggacgccactccggcccttcacccttgccaagtgagctgctcacagtgtggtcagggctgcgcgtgctggaggccctcctgcctgggccttgtggggcaaatattgggtccccaggctggaaagatggacagaggcccaatgggtgaaggctttgaagagcacacagaagcccctggccccccacgagagctggagagccatgtatatggcttcaaagccacctacggcagggacacactcgtgagcatgtgtggcctgcagttcaggtgatacatttaccagtgttcttgtttgtgtggtgccaggaaattgattttggaaaaagtgaaataacattaaaggtgaatgtgaggcttctacttttatccaaaaggagctatattagctaggctgtttctgatatccaatcattggtttaacaataaaggcaatttgtttaatcagttaacggaaatttcttggcttatgaaagtgaaaagtccagtggtattggcattggcagcaggtgagcaatttcacccagtgtcttctgcctccctctgcgttggtatctgctacatcccaggccaccacctccgaggatgaaaagatggctgcctgcagcttccacggaatccctccctcactgccagagcagcatcttctctgtgtaccacctctgctgtctcagatgcccccagcaaataaacactcttctcgttggtca

SEQ ID NO: 308567 - DNA, 482 bp, Homo sapiens
gccggatgccgcagcgctccgctcccgccgcccgaggcggcctcgcgccccgggccacccccacggcggtggaggaggaggaacccatcgatctgtctttggcagatgggaaacgactctcggattatagcatcgggcccaactccaagctcaacctagtggtcaaacccctggagaaggtgctactagaagaaggcgaggcccagaggctggccgactccccacccccgcaggtctggcagctgatctccaaagtcttggcccgccacttcagtgcggcagatgccagcagggtcctggaacagctacagagggtgagaagggtaaccctgggcatcctcttcaggcccagttgctcccagcccctacctctgttgcagtgtatgccccccccccactggcagcccctgaatcttcctgcccttctctccccaggattacgagaggtccctgagtcgcctgacgctggacgacatcgaacg

SEQ ID NO: 308568 - DNA, 1294 bp, Homo sapiens
aaaaaagtgtgatctaattttattgctctgaaccgaatctctgtacattttattttatttaaaactaagtcgagctctatagaggctacatagcctccctcccattctggtcccacaccagactttgcatgggctctttctactatcagctttaaatagagaacgttcttgttctgttcatgaaggtttcataaatgctggagtccagtcataactagaactttacatatccgttccatcactgtatttttccagatccctggtaactccatagcgcggctctgttggggcgcatgcaattccctactttctcacagggggcgctgcagagaagggcagagcagagcgcgcggtcccagagcgcgccgtccaggagggggcgcgtccgtggggctgtgtctctgcgagccctgcgcaacgttgggggcgggaacaaccctggccctgcgcccgagcgctgcggcgccttgtgattggaggaggcaacggtcacttggcagcgccgttgggattgggggaagaggaccccggctggaggtgacgctgaggcggcgagggtgagtcggcgccggccgctaccgcacttcgggcgctcgtccctcatttctctgtggtgaatggcgacgggatggagcgcgaggggagcggcggcagcggcgggtcggccgggctcctgcagcagatcctgagcctgaaggttgtgccgcgggtgggcaacgggaccctgtgccccaactctacttccctctgctccttcccagagatgtggtatggtgtattcctgtgggcactggtgtcttctctcttctttcatgtccctgctggattactggccctcttcaccctcagacatcacaaatatggtaggttcatgtctgtaagcatcctgttgatgggcatcgtgggaccaattactgctggaatcttgacaagtatgttagacattaaaataccagtcaaaaatgtttaatatgactagtcaatttcaggacctattctagaaaacatatctgagtaggatgaaggaaagagtgccttttaactgcaagtccagacagggtctccctatgtcaccaaggccggagtgcagtggttgcaatattggctcactgcagcctccacctcttgggctcaagtaatcctcctccatcagcctcccaagaagcttggactacaggggtgtgccaccatgccccgctaattttttttgtattttttgtagagacagggtttcgtcatgttgcccgggtctcgaactcctgagctcaagcaatctgcccaccttggcctccca

SEQ ID NO: 308569 - DNA, 4614 bp, Homo sapiens
cggtacccgaggatcccgatgtccctcccgggattttcctggacgggattgtgaagtagcggagatgtggtatggtgtattcctgtgggcactggtgtcttctctcttctttcatgtccctgctggattactggccctcttcaccctcagacatcacaaatatggtgcagctattgctggagtttaccgagcagcagggaaggaaatgataccatttgaagccctcacactgggcactggacagacattttgcgtcttggtggtctcctttttacggattttagctactctatagcatacatccttatgctgagatgttgaacttaaactttatggaatcctccaaaagaatacattatggagtgtagtgttttcttagttcttcaaagggaagcaacttggatgaacaggaacatgaaggacaacacatctcagccttttcttcattttgaagctcctagaattgaagacttatgtggactcctattgttctcaaccaaaacaagtcttttggctttcttttttgtagatatttaatttaagcagttttcatgtgtacctttacccaagccaagtcaacagtgtctctggggtggcatcctttgcactgaaatttacagtattctgtgagatgtcgcatattttgaagaaaccgtggaagatactggtttatttcaaatgagcagagtatgttgtattaaaatcttatctaatcttgattaaaatttggcaaactcttttctttgctacatcttagtgacaataaatgccaaataggttttggttgagtatagttttgaaaacaaatttggtgaaataaagcaggaaaaaaaatttaagtataactcaagtagtggctttggttccactgtttataaataaaaagtagataacaatgaataatgtgacattttctggacaactgtcttgacttctgattaagatattttaagagatgtgaatttgttattttgtatgttttatcaaaataagctagctaatttagactttttagattttctgtaccacctttccctatcacttttaattctcttaattttatttcatttaattggaaacatacataccctattaaatggcttgagttggaaattttaagccagatttgtttggacattgaggcacacataagatactttaggcattctgtcatagtttttcttagtgactttggtatactaatgacccttgagaaactatagaagtgcatctgaaactagagttagtggttattgattttttagcttaatgtgtttacctagtggtaactcttcagcccacttttacagtattgggtatcaactcccagaaagtgcctaaagtttaatgttcagatatgtacccactctcccctttacatttttattcaaaagaatttatatctttaaagagatttaaatatcaagagtttttttaaaacttaattttagctatttaaatttttattctactgcctaactttctttttcattaaaaggcctgaaaactgtgactctttgagagggaaagaatcgcagaaattaagtatttaatgtgatcctttccacctaaactgttttgtatggaatacaatcagtgtggtggtagtggtggtggttatctgcaaaatagtttctggtgattaaatctgactttttttttttttttcttttaaatgagacggagcctcactgtgttgcccaggctggagtgcagtggtgcaatctcagctcactccaacctctgccacccgggttcaagcgattctcctgcctcagtttcctgagtagctgggattacaggcacctgccaccgtgcccggctaatttttgtatttttagtggagataggtttcaccatcttgcccaggctggtcttgaactcctgaccttgtgatccacccgcctcggcctcccaaagtgctgggattacaggcgtgagccaccgcgcctggccataaatctgacatctttaaaggaaagttttcattgtgagattaaggcttaacagcccatgaggtcatatacacatgaacgtatctattccatttaaagcaatacacactctggcttctgattaaaaatagccaggaggagagtctctgaatctactgtgattctggagtctgcccaatttggaaaaaaaaaaaaaagaaaaaagtcaggaggaccaatttgccagggaaactcatagaaaagaattacaaagagatcacaaaaactggacatattcttttgactaattagaccacttatggctgggcgcagtggctcacgcctgtaatcccagcactttgggaggtcgatgtgggaggattgcttgagcccaagagttcaagactggcctgggcaacatggtgagaccttgtctctgctacaagataaaaaaaaattagctgggcgtggcctcagctacccaagaggctaaagtgggaggatcacttgtgcctgggaggttcaggctgctgtgagccgagaccacgccactgaactccagcttaggccacagggcaagaccctgtcttaaaataatattactaattttggtaattaacttatcaaaactatagtgacatatacacgggcagaaacttataagtagagttgtaatgcagccaaatattcttacaaattccctaacaagaagctcaaatctttctcacaggcaaattgtaaaaattctagttttttgtttaaagagctgtgattttcaaaagtatcccttcagtttaagaaatctggggaattggtaacttttcttatgggaaatgattgccatcatctctactgaaggatgcctcttactgaaaaatgtcttttgaaggagttcttgcctaaagcattctttggatgtaatttcatacactaaacatatagaccagtagttagtgggcccctcctcttaaacagtaacttttgaagtactgatacatgattaaaatgttagatatttttcactggagctaagacttaaaattagggcattttgaaaggtgtatttgtttctgtttcttgtttgatatattttggttatctactcttttaaaaaactaaacgtataaaaggtatcttcaaattactgagtgtttcatccatcccagtaggtgaagtattctccagtgaataaatctatatatatatatagattttaaatagcttgagcggtgtagcttgaaatgttttcagggaaagactatttgaatcataaggaatagctttgattttcttttttatgtctcaaatatagaattatttgggggtggtcactcagatggaagaatattggcaattgtgttgaacattctaccttatatagttttgagaatttttgccaaaaactgatttcttagaaatatcctcccccagctgtgctttggttttttggtttttttgttttgagacggagtcttgctctgtcgcccaggctggagtgcagtggcatgatctcggctcactgcaagctctgcctcccgggttcacgccattctcctgcctcagcctcccgagtagctgggactacggacgtccaccaccatgcccagctaattttttgtatttttagtagagacggggtttcaccgtgttagccaggatggtctcaatctcctgacccgcctccacctcccaaagtgctgggattacaggcatgagccaccacacccggcctctgctttgttttttaaaaaaaaagaaatgcaagagagggagggaggcagcctcctgaccataaaagctgatttcttgatttttttttcttttttttttgaaatggagtcttgctctgtctccaaggctggagtgcagtggcatggtctcagctcactgcagcctccgtttcctgggttcaagtgattgtcctgccttggccgctgagtagctaggattactggcacccgccacaaggcccagctaatttttgtatttttagtagagacagggtttgattatgttggacaggctggtctcaaactcctgacttcaagtgatccacccgcctcggcctcccaacgtgatgggactatagacatgagccatcgtgcttggccttcttgattcttgaatacggggttttgaggtgaaagcatttcatgaaaacttaagttcatacacaagagcatcatgaatattctaaaagaggtatctgtgctttttttgtgaccacaaaatattacttcttatgaaatgtttacactaggtgaggaaaagttcattaattacctttaaaccgttccttattttttttaagattttaaattgtattttggcttttgcctccagtatcctttctggttgctctggtttgaattaagttcctattatgctgcagcacatatcaaccttccctaagtaaccatttcctggaatgtgaagcatcggtgccattagcagaccatatgcagaaatgtcgtgtacttgcatttcttttttgtgcactctataaggctggttgtgactcagatcagcttaactttttatattatgttatttcactaactgctacagtcaaaatgatcaaatctttgtacaatagaaaattatttaaattttatttttctactgacatttctaattctagtgtaaatgtttatcaataaaaaattactttcaattctga

SEQ ID NO: 308570 - DNA, 5550 bp, Homo sapiens
aaaaaagtgtgatctaattttattgctctgaaccgaatctctgtacattttattttatttaaaactaagtcgagctctatagaggctacatagcctccctcccattctggtcccacaccagactttgcatgggctctttctactatcagctttaaatagagaacgttcttgttctgttcatgaaggtttcataaatgctggagtccagtcataactagaactttacatatccgttccatcactgtatttttccagatccctggtaactccatagcgcggctctgttggggcgcatgcaattccctactttctcacagggggcgctgcagagaagggcagagcagagcgcgcggtcccagagcgcgccgtccaggagggggcgcgtccgtggggctgtgtctctgcgagccctgcgcaacgttgggggcgggaacaaccctggccctgcgcccgagcgctgcggcgccttgtgattggaggaggcaacggtcacttggcagcgccgttgggattgggggaagaggaccccggctggaggtgacgctgaggcggcgagggtgagtcggcgccggccgctaccgcacttcgggcgctcgtccctcatttctctgtggtgaatggcgacgggatggagcgcgaggggagcggcggcagcggcgggtcggccgggctcctgcagcagatcctgagcctgaaggttgtgccgcgggtgggcaacgggaccctgtgccccaactctacttccctctgctccttcccaggtacggcccgccccgcgcctgcgcactgcgcgccccgccgtcgccgctgccgtgctgtgggcgccccgagtctgggcggggtcccgggtgcgcagcctgctggcggcgtgggacgctgtcctccgggaggggggccgtgctgctcgcccggagcccctttccccatcacttcttcggcggtccctgaggcggagccccggagtcccgctgggcgtgagatgcagagagcggccgcagagatgtggtatggtgtattcctgtgggcactggtgtcttctctcttctttcatgtccctgctggattactggccctcttcaccctcagacatcacaaatatggtgcagctattgctggagtttaccgagcagcagggaaggaaatgataccatttgaagccctcacactgggcactggacagacattttgcgtcttggtggtctcctttttacggattttagctactctatagcatacatccttatgctgagatgttgaacttaaactttatggaatcctccaaaagaatacattatggagtgtagtgttttcttagttcttcaaagggaagcaacttggatgaacaggaacatgaaggacaacacatctcagccttttcttcattttgaagctcctagaattgaagacttatgtggactcctattgttctcaaccaaaacaagtcttttggctttcttttttgtagatatttaatttaagcagttttcatgtgtacctttacccaagccaagtcaacagtgtctctggggtggcatcctttgcactgaaatttacagtattctgtgagatgtcgcatattttgaagaaaccgtggaagatactggtttatttcaaatgagcagagtatgttgtattaaaatcttatctaatcttgattaaaatttggcaaactcttttctttgctacatcttagtgacaataaatgccaaataggttttggttgagtatagttttgaaaacaaatttggtgaaataaagcaggaaaaaaaatttaagtataactcaagtagtggctttggttccactgtttataaataaaaagtagataacaatgaataatgtgacattttctggacaactgtcttgacttctgattaagatattttaagagatgtgaatttgttattttgtatgttttatcaaaataagctagctaatttagactttttagattttctgtaccacctttccctatcacttttaattctcttaattttatttcatttaattggaaacatacataccctattaaatggcttgagttggaaattttaagccagatttgtttggacattgaggcacacataagatactttaggcattctgtcatagtttttcttagtgactttggtatactaatgacccttgagaaactatagaagtgcatctgaaactagagttagtggttattgattttttagcttaatgtgtttacctagtggtaactcttcagcccacttttacagtattgggtatcaactcccagaaagtgcctaaagtttaatgttcagatatgtacccactctcccctttacatttttattcaaaagaatttatatctttaaagagatttaaatatcaagagtttttttaaaacttaattttagctatttaaatttttattctactgcctaactttctttttcattaaaaggcctgaaaactgtgactctttgagagggaaagaatcgcagaaattaagtatttaatgtgatcctttccacctaaactgttttgtatggaatacaatcagtgtggtggtagtggtggtggttatctgcaaaatagtttctggtgattaaatctgactttttttttttttttcttttaaatgagacggagcctcactgtgttgcccaggctggagtgcagtggtgcaatctcagctcactccaacctctgccacccgggttcaagcgattctcctgcctcagtttcctgagtagctgggattacaggcacctgccaccgtgcccggctaatttttgtatttttagtggagataggtttcaccatcttgcccaggctggtcttgaactcctgaccttgtgatccacccgcctcggcctcccaaagtgctgggattacaggcgtgagccaccgcgcctggccataaatctgacatctttaaaggaaagttttcattgtgagattaaggcttaacagcccatgaggtcatatacacatgaacgtatctattccatttaaagcaatacacactctggcttctgattaaaaatagccaggaggagagtctctgaatctactgtgattctggagtctgcccaatttggaaaaaaaaaaaaaagaaaaaagtcaggaggaccaatttgccagggaaactcatagaaaagaattacaaagagatcacaaaaactggacatattcttttgactaattagaccacttatggctgggcgcagtggctcacgcctgtaatcccagcactttgggaggtcgatgtgggaggattgcttgagcccaagagttcaagactggcctgggcaacatggtgagaccttgtctctgctacaagataaaaaaaaattagctgggcgtggcctcagctacccaagaggctaaagtgggaggatcacttgtgcctgggaggttcaggctgctgtgagccgagaccacgccactgaactccagcttaggccacagggcaagaccctgtcttaaaataatattactaattttggtaattaacttatcaaaactatagtgacatatacacgggcagaaacttataagtagagttgtaatgcagccaaatattcttacaaattccctaacaagaagctcaaatctttctcacaggcaaattgtaaaaattctagttttttgtttaaagagctgtgattttcaaaagtatcccttcagtttaagaaatctggggaattggtaacttttcttatgggaaatgattgccatcatctctactgaaggatgcctcttactgaaaaatgtcttttgaaggagttcttgcctaaagcattctttggatgtaatttcatacactaaacatatagaccagtagttagtgggcccctcctcttaaacagtaacttttgaagtactgatacatgattaaaatgttagatatttttcactggagctaagacttaaaattagggcattttgaaaggtgtatttgtttctgtttcttgtttgatatattttggttatctactcttttaaaaaactaaacgtataaaaggtatcttcaaattactgagtgtttcatccatcccagtaggtgaagtattctccagtgaataaatctatatatatatatagattttaaatagcttgagcggtgtagcttgaaatgttttcagggaaagactatttgaatcataaggaatagctttgattttcttttttatgtctcaaatatagaattatttgggggtggtcactcagatggaagaatattggcaattgtgttgaacattctaccttatatagttttgagaatttttgccaaaaactgatttcttagaaatatcctcccccagctgtgctttggttttttggtttttttgttttgagacggagtcttgctctgtcgcccaggctggagtgcagtggcatgatctcggctcactgcaagctctgcctcccgggttcacgccattctcctgcctcagcctcccgagtagctgggactacggacgtccaccaccatgcccagctaattttttgtatttttagtagagacggggtttcaccgtgttagccaggatggtctcaatctcctgacccgcctccacctcccaaagtgctgggattacaggcatgagccaccacacccggcctctgctttgttttttaaaaaaaaagaaatgcaagagagggagggaggcagcctcctgaccataaaagctgatttcttgatttttttttcttttttttttgaaatggagtcttgctctgtctccaaggctggagtgcagtggcatggtctcagctcactgcagcctccgtttcctgggttcaagtgattgtcctgccttggccgctgagtagctaggattactggcacccgccacaaggcccagctaatttttgtatttttagtagagacagggtttgattatgttggacaggctggtctcaaactcctgacttcaagtgatccacccgcctcggcctcccaacgtgatgggactatagacatgagccatcgtgcttggccttcttgattcttgaatacggggttttgaggtgaaagcatttcatgaaaacttaagttcatacacaagagcatcatgaatattctaaaagaggtatctgtgctttttttgtgaccacaaaatattacttcttatgaaatgtttacactaggtgaggaaaagttcattaattacctttaaaccgttccttattttttttaagattttaaattgtattttggcttttgcctccagtatcctttctggttgctctggtttgaattaagttcctattatgctgcagcacatatcaaccttccctaagtaaccatttcctggaatgtgaagcatcggtgccattagcagaccatatgcagaaatgtcgtgtacttgcatttcttttttgtgcactctataaggctggttgtgactcagatcagcttaactttttatattatgttatttcactaactgctacagtcaaaatgatcaaatctttgtacaatagaaaattatttaaattttatttttctactgacatttctaattctagtgtaaatgtttatcaataaaaaattactttcaattctga

SEQ ID NO: 308571 - DNA, 4481 bp, Homo sapiens
cggtacccgaggatcccgatgtccctcccgggattttcctggacgggattgtgaagtagcggagatgtggtatggtgtattcctgtgggcactggtgtcttctctcttctttcatgtccctgctggattactggccctcttcaccctcagacatcacaaatatggtgcagctattgctggagtttaccgagcagcagggaaggaaatgataccatttgaagccctcacactgggcactggacagacattttgcgtcttggtggtctcctttttacggattttagctactctatagcatacatccttatgctgagatgttgaacttaaactttatggaatcctccaaaagaatacattatggagtgtagtgttttcttagttcttcaaagggaagcaacttggatgaacaggaacatgaaggacaacacatctcagccttttcttcattttgaagctcctagaattgaagacttatgtggactcctattgttctcaaccaaaacaagtcttttggctttcttttttgtagatatttaatttaagcagttttcatgtgtacctttacccaagccaagtcaacagtgtctctggggtggcatcctttgcactgaaatttacagtattctgtgagatgtcgcatattttgaagaaaccgtggaagatactggtttatttcaaatgagcagagtatgttgtattaaaatcttatctaatcttgattaaaatttggcaaactcttttctttgctacatcttagtgacaataaatgccaaataggttttggttgagtatagttttgaaaacaaatttggtgaaataaagcaggaaaaaaaatttaagtataactcaagtagtggctttggttccactgtttataaataaaaagtagataacaatgaataatgtgacattttctggacaactgtcttgacttctgattaagatattttaagagatgtgaatttgttattttgtatgttttatcaaaataagctagctaatttagactttttagattttctgtaccacctttccctatcacttttaattctcttaattttatttcatttaattggaaacatacataccctattaaatggcttgagttggaaattttaagccagatttgtttggacattgaggcacacataagatactttaggcattctgtcatagtttttcttagtgactttggtatactaatgacccttgagaaactatagaagtgcatctgaaactagagttagtggttattgattttttagcttaatgtgtttacctagtggtaactcttcagcccacttttacagtattgggtatcaactcccagaaagtgcctaaagtttaatgttcagatatgtacccactctcccctttacatttttattcaaaagaatttatatctttaaagagatttaaatatcaagagtttttttaaaacttaattttagctatttaaatttttattctactgcctaactttctttttcattaaaaggcctgaaaactgtgactctttgagagggaaagaatcgcagaaattaagtatttaatgtgatcctttccacctaaactgttttgtatggaatacaatcagtgtggtggtagtggtggtggttatctgcaaaatagtttctggtgattaaatctgactttttttttttttttcttttaaatgagacggagcctcactgtgttgcccaggctggagtgcagtggtgcaatctcagctcactccaacctctgccacccgggttcaagcgattctcctgcctcagtttccaaagtgctgggattacaggcgtgagccaccgcgcctggccataaatctgacatctttaaaggaaagttttcattgtgagattaaggcttaacagcccatgaggtcatatacacatgaacgtatctattccatttaaagcaatacacactctggcttctgattaaaaatagccaggaggagagtctctgaatctactgtgattctggagtctgcccaatttggaaaaaaaaaaaaaagaaaaaagtcaggaggaccaatttgccagggaaactcatagaaaagaattacaaagagatcacaaaaactggacatattcttttgactaattagaccacttatggctgggcgcagtggctcacgcctgtaatcccagcactttgggaggtcgatgtgggaggattgcttgagcccaagagttcaagactggcctgggcaacatggtgagaccttgtctctgctacaagataaaaaaaaattagctgggcgtggcctcagctacccaagaggctaaagtgggaggatcacttgtgcctgggaggttcaggctgctgtgagccgagaccacgccactgaactccagcttaggccacagggcaagaccctgtcttaaaataatattactaattttggtaattaacttatcaaaactatagtgacatatacacgggcagaaacttataagtagagttgtaatgcagccaaatattcttacaaattccctaacaagaagctcaaatctttctcacaggcaaattgtaaaaattctagttttttgtttaaagagctgtgattttcaaaagtatcccttcagtttaagaaatctggggaattggtaacttttcttatgggaaatgattgccatcatctctactgaaggatgcctcttactgaaaaatgtcttttgaaggagttcttgcctaaagcattctttggatgtaatttcatacactaaacatatagaccagtagttagtgggcccctcctcttaaacagtaacttttgaagtactgatacatgattaaaatgttagatatttttcactggagctaagacttaaaattagggcattttgaaaggtgtatttgtttctgtttcttgtttgatatattttggttatctactcttttaaaaaactaaacgtataaaaggtatcttcaaattactgagtgtttcatccatcccagtaggtgaagtattctccagtgaataaatctatatatatatatagattttaaatagcttgagcggtgtagcttgaaatgttttcagggaaagactatttgaatcataaggaatagctttgattttcttttttatgtctcaaatatagaattatttgggggtggtcactcagatggaagaatattggcaattgtgttgaacattctaccttatatagttttgagaatttttgccaaaaactgatttcttagaaatatcctcccccagctgtgctttggttttttggtttttttgttttgagacggagtcttgctctgtcgcccaggctggagtgcagtggcatgatctcggctcactgcaagctctgcctcccgggttcacgccattctcctgcctcagcctcccgagtagctgggactacggacgtccaccaccatgcccagctaattttttgtatttttagtagagacggggtttcaccgtgttagccaggatggtctcaatctcctgacccgcctccacctcccaaagtgctgggattacaggcatgagccaccacacccggcctctgctttgttttttaaaaaaaaagaaatgcaagagagggagggaggcagcctcctgaccataaaagctgatttcttgatttttttttcttttttttttgaaatggagtcttgctctgtctccaaggctggagtgcagtggcatggtctcagctcactgcagcctccgtttcctgggttcaagtgattgtcctgccttggccgctgagtagctaggattactggcacccgccacaaggcccagctaatttttgtatttttagtagagacagggtttgattatgttggacaggctggtctcaaactcctgacttcaagtgatccacccgcctcggcctcccaacgtgatgggactatagacatgagccatcgtgcttggccttcttgattcttgaatacggggttttgaggtgaaagcatttcatgaaaacttaagttcatacacaagagcatcatgaatattctaaaagaggtatctgtgctttttttgtgaccacaaaatattacttcttatgaaatgtttacactaggtgaggaaaagttcattaattacctttaaaccgttccttattttttttaagattttaaattgtattttggcttttgcctccagtatcctttctggttgctctggtttgaattaagttcctattatgctgcagcacatatcaaccttccctaagtaaccatttcctggaatgtgaagcatcggtgccattagcagaccatatgcagaaatgtcgtgtacttgcatttcttttttgtgcactctataaggctggttgtgactcagatcagcttaactttttatattatgttatttcactaactgctacagtcaaaatgatcaaatctttgtacaatagaaaattatttaaattttatttttctactgacatttctaattctagtgtaaatgtttatcaataaaaaattactttcaattctga

SEQ ID NO: 308572 - DNA, 5619 bp, Homo sapiens
aaaaaagtgtgatctaattttattgctctgaaccgaatctctgtacattttattttatttaaaactaagtcgagctctatagaggctacatagcctccctcccattctggtcccacaccagactttgcatgggctctttctactatcagctttaaatagagaacgttcttgttctgttcatgaaggtttcataaatgctggagtccagtcataactagaactttacatatccgttccatcactgtatttttccagatccctggtaactccatagcgcggctctgttggggcgcatgcaattccctactttctcacagggggcgctgcagagaagggcagagcagagcgcgcggtcccagagcgcgccgtccaggagggggcgcgtccgtggggctgtgtctctgcgagccctgcgcaacgttgggggcgggaacaaccctggccctgcgcccgagcgctgcggcgccttgtgattggaggaggcaacggtcacttggcagcgccgttgggattgggggaagaggaccccggctggaggtgacgctgaggcggcgagggtgagtcggcgccggccgctaccgcacttcgggcgctcgtccctcatttctctgtggtgaatggcgacgggatggagcgcgaggggagcggcggcagcggcgggtcggccgggctcctgcagcagatcctgagcctgaaggttgtgccgcgggtgggcaacgggaccctgtgccccaactctacttccctctgctccttcccaggtacggcccgccccgcgcctgcgcactgcgcgccccgccgtcgccgctgccgtgctgtgggcgccccgagtctgggcggggtcccgggtgcgcagcctgctggcggcgtgggacgctgtcctccgggaggggggccgtgctgctcgcccggagcccctttccccatcacttcttcggcggtccctgaggcggagccccggagtcccgctgggcgtgagatgcagagagcggccgcagagatgtggtatggtgtattcctgtgggcactggtgtcttctctcttctttcatgtccctgctggattactggccctcttcaccctcagacatcacaaatatggtaggttcatgtctgtaagcatcctgttgatgggcatcgtgggaccaattactgctggaatcttgacaagtgcagctattgctggagtttaccgagcagcagggaaggaaatgataccatttgaagccctcacactgggcactggacagacattttgcgtcttggtggtctcctttttacggattttagctactctatagcatacatccttatgctgagatgttgaacttaaactttatggaatcctccaaaagaatacattatggagtgtagtgttttcttagttcttcaaagggaagcaacttggatgaacaggaacatgaaggacaacacatctcagccttttcttcattttgaagctcctagaattgaagacttatgtggactcctattgttctcaaccaaaacaagtcttttggctttcttttttgtagatatttaatttaagcagttttcatgtgtacctttacccaagccaagtcaacagtgtctctggggtggcatcctttgcactgaaatttacagtattctgtgagatgtcgcatattttgaagaaaccgtggaagatactggtttatttcaaatgagcagagtatgttgtattaaaatcttatctaatcttgattaaaatttggcaaactcttttctttgctacatcttagtgacaataaatgccaaataggttttggttgagtatagttttgaaaacaaatttggtgaaataaagcaggaaaaaaaatttaagtataactcaagtagtggctttggttccactgtttataaataaaaagtagataacaatgaataatgtgacattttctggacaactgtcttgacttctgattaagatattttaagagatgtgaatttgttattttgtatgttttatcaaaataagctagctaatttagactttttagattttctgtaccacctttccctatcacttttaattctcttaattttatttcatttaattggaaacatacataccctattaaatggcttgagttggaaattttaagccagatttgtttggacattgaggcacacataagatactttaggcattctgtcatagtttttcttagtgactttggtatactaatgacccttgagaaactatagaagtgcatctgaaactagagttagtggttattgattttttagcttaatgtgtttacctagtggtaactcttcagcccacttttacagtattgggtatcaactcccagaaagtgcctaaagtttaatgttcagatatgtacccactctcccctttacatttttattcaaaagaatttatatctttaaagagatttaaatatcaagagtttttttaaaacttaattttagctatttaaatttttattctactgcctaactttctttttcattaaaaggcctgaaaactgtgactctttgagagggaaagaatcgcagaaattaagtatttaatgtgatcctttccacctaaactgttttgtatggaatacaatcagtgtggtggtagtggtggtggttatctgcaaaatagtttctggtgattaaatctgactttttttttttttttcttttaaatgagacggagcctcactgtgttgcccaggctggagtgcagtggtgcaatctcagctcactccaacctctgccacccgggttcaagcgattctcctgcctcagtttcctgagtagctgggattacaggcacctgccaccgtgcccggctaatttttgtatttttagtggagataggtttcaccatcttgcccaggctggtcttgaactcctgaccttgtgatccacccgcctcggcctcccaaagtgctgggattacaggcgtgagccaccgcgcctggccataaatctgacatctttaaaggaaagttttcattgtgagattaaggcttaacagcccatgaggtcatatacacatgaacgtatctattccatttaaagcaatacacactctggcttctgattaaaaatagccaggaggagagtctctgaatctactgtgattctggagtctgcccaatttggaaaaaaaaaaaaaagaaaaaagtcaggaggaccaatttgccagggaaactcatagaaaagaattacaaagagatcacaaaaactggacatattcttttgactaattagaccacttatggctgggcgcagtggctcacgcctgtaatcccagcactttgggaggtcgatgtgggaggattgcttgagcccaagagttcaagactggcctgggcaacatggtgagaccttgtctctgctacaagataaaaaaaaattagctgggcgtggcctcagctacccaagaggctaaagtgggaggatcacttgtgcctgggaggttcaggctgctgtgagccgagaccacgccactgaactccagcttaggccacagggcaagaccctgtcttaaaataatattactaattttggtaattaacttatcaaaactatagtgacatatacacgggcagaaacttataagtagagttgtaatgcagccaaatattcttacaaattccctaacaagaagctcaaatctttctcacaggcaaattgtaaaaattctagttttttgtttaaagagctgtgattttcaaaagtatcccttcagtttaagaaatctggggaattggtaacttttcttatgggaaatgattgccatcatctctactgaaggatgcctcttactgaaaaatgtcttttgaaggagttcttgcctaaagcattctttggatgtaatttcatacactaaacatatagaccagtagttagtgggcccctcctcttaaacagtaacttttgaagtactgatacatgattaaaatgttagatatttttcactggagctaagacttaaaattagggcattttgaaaggtgtatttgtttctgtttcttgtttgatatattttggttatctactcttttaaaaaactaaacgtataaaaggtatcttcaaattactgagtgtttcatccatcccagtaggtgaagtattctccagtgaataaatctatatatatatatagattttaaatagcttgagcggtgtagcttgaaatgttttcagggaaagactatttgaatcataaggaatagctttgattttcttttttatgtctcaaatatagaattatttgggggtggtcactcagatggaagaatattggcaattgtgttgaacattctaccttatatagttttgagaatttttgccaaaaactgatttcttagaaatatcctcccccagctgtgctttggttttttggtttttttgttttgagacggagtcttgctctgtcgcccaggctggagtgcagtggcatgatctcggctcactgcaagctctgcctcccgggttcacgccattctcctgcctcagcctcccgagtagctgggactacggacgtccaccaccatgcccagctaattttttgtatttttagtagagacggggtttcaccgtgttagccaggatggtctcaatctcctgacccgcctccacctcccaaagtgctgggattacaggcatgagccaccacacccggcctctgctttgttttttaaaaaaaaagaaatgcaagagagggagggaggcagcctcctgaccataaaagctgatttcttgatttttttttcttttttttttgaaatggagtcttgctctgtctccaaggctggagtgcagtggcatggtctcagctcactgcagcctccgtttcctgggttcaagtgattgtcctgccttggccgctgagtagctaggattactggcacccgccacaaggcccagctaatttttgtatttttagtagagacagggtttgattatgttggacaggctggtctcaaactcctgacttcaagtgatccacccgcctcggcctcccaacgtgatgggactatagacatgagccatcgtgcttggccttcttgattcttgaatacggggttttgaggtgaaagcatttcatgaaaacttaagttcatacacaagagcatcatgaatattctaaaagaggtatctgtgctttttttgtgaccacaaaatattacttcttatgaaatgtttacactaggtgaggaaaagttcattaattacctttaaaccgttccttattttttttaagattttaaattgtattttggcttttgcctccagtatcctttctggttgctctggtttgaattaagttcctattatgctgcagcacatatcaaccttccctaagtaaccatttcctggaatgtgaagcatcggtgccattagcagaccatatgcagaaatgtcgtgtacttgcatttcttttttgtgcactctataaggctggttgtgactcagatcagcttaactttttatattatgttatttcactaactgctacagtcaaaatgatcaaatctttgtacaatagaaaattatttaaattttatttttctactgacatttctaattctagtgtaaatgtttatcaataaaaaattactttcaattctga

SEQ ID NO: 308573 - DNA, 4719 bp, Homo sapiens
gctctctaattaccaccgctacaggctttctgaagggaggaggccaagttgggcggattgtttgagccgaggcattcaagaccagcctgggcaacacgagatgtggtatggtgtattcctgtgggcactggtgtcttctctcttctttcatgtccctgctggattactggccctcttcaccctcagacatcacaaatatggtaggttcatgtctgtaagcatcctgttgatgggcatcgtgggaccaattactgctggaatcttgacaagtgcagctattgctggagtttaccgagcagcagggaaggaaatgataccatttgaagccctcacactgggcactggacagacattttgcgtcttggtggtctcctttttacggattttagctactctatagcatacatccttatgctgagatgttgaacttaaactttatggaatcctccaaaagaatacattatggagtgtagtgttttcttagttcttcaaagggaagcaacttggatgaacaggaacatgaaggacaacacatctcagccttttcttcattttgaagctcctagaattgaagacttatgtggactcctattgttctcaaccaaaacaagtcttttggctttcttttttgtagatatttaatttaagcagttttcatgtgtacctttacccaagccaagtcaacagtgtctctggggtggcatcctttgcactgaaatttacagtattctgtgagatgtcgcatattttgaagaaaccgtggaagatactggtttatttcaaatgagcagagtatgttgtattaaaatcttatctaatcttgattaaaatttggcaaactcttttctttgctacatcttagtgacaataaatgccaaataggttttggttgagtatagttttgaaaacaaatttggtgaaataaagcaggaaaaaaaatttaagtataactcaagtagtggctttggttccactgtttataaataaaaagtagataacaatgaataatgtgacattttctggacaactgtcttgacttctgattaagatattttaagagatgtgaatttgttattttgtatgttttatcaaaataagctagctaatttagactttttagattttctgtaccacctttccctatcacttttaattctcttaattttatttcatttaattggaaacatacataccctattaaatggcttgagttggaaattttaagccagatttgtttggacattgaggcacacataagatactttaggcattctgtcatagtttttcttagtgactttggtatactaatgacccttgagaaactatagaagtgcatctgaaactagagttagtggttattgattttttagcttaatgtgtttacctagtggtaactcttcagcccacttttacagtattgggtatcaactcccagaaagtgcctaaagtttaatgttcagatatgtacccactctcccctttacatttttattcaaaagaatttatatctttaaagagatttaaatatcaagagtttttttaaaacttaattttagctatttaaatttttattctactgcctaactttctttttcattaaaaggcctgaaaactgtgactctttgagagggaaagaatcgcagaaattaagtatttaatgtgatcctttccacctaaactgttttgtatggaatacaatcagtgtggtggtagtggtggtggttatctgcaaaatagtttctggtgattaaatctgactttttttttttttttcttttaaatgagacggagcctcactgtgttgcccaggctggagtgcagtggtgcaatctcagctcactccaacctctgccacccgggttcaagcgattctcctgcctcagtttcctgagtagctgggattacaggcacctgccaccgtgcccggctaatttttgtatttttagtggagataggtttcaccatcttgcccaggctggtcttgaactcctgaccttgtgatccacccgcctcggcctcccaaagtgctgggattacaggcgtgagccaccgcgcctggccataaatctgacatctttaaaggaaagttttcattgtgagattaaggcttaacagcccatgaggtcatatacacatgaacgtatctattccatttaaagcaatacacactctggcttctgattaaaaatagccaggaggagagtctctgaatctactgtgattctggagtctgcccaatttggaaaaaaaaaaaaaagaaaaaagtcaggaggaccaatttgccagggaaactcatagaaaagaattacaaagagatcacaaaaactggacatattcttttgactaattagaccacttatggctgggcgcagtggctcacgcctgtaatcccagcactttgggaggtcgatgtgggaggattgcttgagcccaagagttcaagactggcctgggcaacatggtgagaccttgtctctgctacaagataaaaaaaaattagctgggcgtggcctcagctacccaagaggctaaagtgggaggatcacttgtgcctgggaggttcaggctgctgtgagccgagaccacgccactgaactccagcttaggccacagggcaagaccctgtcttaaaataatattactaattttggtaattaacttatcaaaactatagtgacatatacacgggcagaaacttataagtagagttgtaatgcagccaaatattcttacaaattccctaacaagaagctcaaatctttctcacaggcaaattgtaaaaattctagttttttgtttaaagagctgtgattttcaaaagtatcccttcagtttaagaaatctggggaattggtaacttttcttatgggaaatgattgccatcatctctactgaaggatgcctcttactgaaaaatgtcttttgaaggagttcttgcctaaagcattctttggatgtaatttcatacactaaacatatagaccagtagttagtgggcccctcctcttaaacagtaacttttgaagtactgatacatgattaaaatgttagatatttttcactggagctaagacttaaaattagggcattttgaaaggtgtatttgtttctgtttcttgtttgatatattttggttatctactcttttaaaaaactaaacgtataaaaggtatcttcaaattactgagtgtttcatccatcccagtaggtgaagtattctccagtgaataaatctatatatatatatagattttaaatagcttgagcggtgtagcttgaaatgttttcagggaaagactatttgaatcataaggaatagctttgattttcttttttatgtctcaaatatagaattatttgggggtggtcactcagatggaagaatattggcaattgtgttgaacattctaccttatatagttttgagaatttttgccaaaaactgatttcttagaaatatcctcccccagctgtgctttggttttttggtttttttgttttgagacggagtcttgctctgtcgcccaggctggagtgcagtggcatgatctcggctcactgcaagctctgcctcccgggttcacgccattctcctgcctcagcctcccgagtagctgggactacggacgtccaccaccatgcccagctaattttttgtatttttagtagagacggggtttcaccgtgttagccaggatggtctcaatctcctgacccgcctccacctcccaaagtgctgggattacaggcatgagccaccacacccggcctctgctttgttttttaaaaaaaaagaaatgcaagagagggagggaggcagcctcctgaccataaaagctgatttcttgatttttttttcttttttttttgaaatggagtcttgctctgtctccaaggctggagtgcagtggcatggtctcagctcactgcagcctccgtttcctgggttcaagtgattgtcctgccttggccgctgagtagctaggattactggcacccgccacaaggcccagctaatttttgtatttttagtagagacagggtttgattatgttggacaggctggtctcaaactcctgacttcaagtgatccacccgcctcggcctcccaacgtgatgggactatagacatgagccatcgtgcttggccttcttgattcttgaatacggggttttgaggtgaaagcatttcatgaaaacttaagttcatacacaagagcatcatgaatattctaaaagaggtatctgtgctttttttgtgaccacaaaatattacttcttatgaaatgtttacactaggtgaggaaaagttcattaattacctttaaaccgttccttattttttttaagattttaaattgtattttggcttttgcctccagtatcctttctggttgctctggtttgaattaagttcctattatgctgcagcacatatcaaccttccctaagtaaccatttcctggaatgtgaagcatcggtgccattagcagaccatatgcagaaatgtcgtgtacttgcatttcttttttgtgcactctataaggctggttgtgactcagatcagcttaactttttatattatgttatttcactaactgctacagtcaaaatgatcaaatctttgtacaatagaaaattatttaaattttatttttctactgacatttctaattctagtgtaaatgtttatcaataaaaaattactttcaattctga

SEQ ID NO: 308574 - DNA, 5382 bp, Homo sapiens
aaaaaagtgtgatctaattttattgctctgaaccgaatctctgtacattttattttatttaaaactaagtcgagctctatagaggctacatagcctccctcccattctggtcccacaccagactttgcatgggctctttctactatcagctttaaatagagaacgttcttgttctgttcatgaaggtttcataaatgctggagtccagtcataactagaactttacatatccgttccatcactgtatttttccagatccctggtaactccatagcgcggctctgttggggcgcatgcaattccctactttctcacagggggcgctgcagagaagggcagagcagagcgcgcggtcccagagcgcgccgtccaggagggggcgcgtccgtggggctgtgtctctgcgagccctgcgcaacgttgggggcgggaacaaccctggccctgcgcccgagcgctgcggcgccttgtgattggaggaggcaacggtcacttggcagcgccgttgggattgggggaagaggaccccggctggaggtgacgctgaggcggcgagggtgagtcggcgccggccgctaccgcacttcgggcgctcgtccctcatttctctgtggtgaatggcgacgggatggagcgcgaggggagcggcggcagcggcgggtcggccgggctcctgcagcagatcctgagcctgaaggttgtgccgcgggtgggcaacgggaccctgtgccccaactctacttccctctgctccttcccagagatgtggtatggtgtattcctgtgggcactggtgtcttctctcttctttcatgtccctgctggattactggccctcttcaccctcagacatcacaaatatggtaggttcatgtctgtaagcatcctgttgatgggcatcgtgggaccaattactgctggaatcttgacaagtgcagctattgctggagtttaccgagcagcagggaaggaaatgataccatttgaagccctcacactgggcactggacagacattttgcgtcttggtggtctcctttttacggattttagctactctatagcatacatccttatgctgagatgttgaacttaaactttatggaatcctccaaaagaatacattatggagtgtagtgttttcttagttcttcaaagggaagcaacttggatgaacaggaacatgaaggacaacacatctcagccttttcttcattttgaagctcctagaattgaagacttatgtggactcctattgttctcaaccaaaacaagtcttttggctttcttttttgtagatatttaatttaagcagttttcatgtgtacctttacccaagccaagtcaacagtgtctctggggtggcatcctttgcactgaaatttacagtattctgtgagatgtcgcatattttgaagaaaccgtggaagatactggtttatttcaaatgagcagagtatgttgtattaaaatcttatctaatcttgattaaaatttggcaaactcttttctttgctacatcttagtgacaataaatgccaaataggttttggttgagtatagttttgaaaacaaatttggtgaaataaagcaggaaaaaaaatttaagtataactcaagtagtggctttggttccactgtttataaataaaaagtagataacaatgaataatgtgacattttctggacaactgtcttgacttctgattaagatattttaagagatgtgaatttgttattttgtatgttttatcaaaataagctagctaatttagactttttagattttctgtaccacctttccctatcacttttaattctcttaattttatttcatttaattggaaacatacataccctattaaatggcttgagttggaaattttaagccagatttgtttggacattgaggcacacataagatactttaggcattctgtcatagtttttcttagtgactttggtatactaatgacccttgagaaactatagaagtgcatctgaaactagagttagtggttattgattttttagcttaatgtgtttacctagtggtaactcttcagcccacttttacagtattgggtatcaactcccagaaagtgcctaaagtttaatgttcagatatgtacccactctcccctttacatttttattcaaaagaatttatatctttaaagagatttaaatatcaagagtttttttaaaacttaattttagctatttaaatttttattctactgcctaactttctttttcattaaaaggcctgaaaactgtgactctttgagagggaaagaatcgcagaaattaagtatttaatgtgatcctttccacctaaactgttttgtatggaatacaatcagtgtggtggtagtggtggtggttatctgcaaaatagtttctggtgattaaatctgactttttttttttttttcttttaaatgagacggagcctcactgtgttgcccaggctggagtgcagtggtgcaatctcagctcactccaacctctgccacccgggttcaagcgattctcctgcctcagtttcctgagtagctgggattacaggcacctgccaccgtgcccggctaatttttgtatttttagtggagataggtttcaccatcttgcccaggctggtcttgaactcctgaccttgtgatccacccgcctcggcctcccaaagtgctgggattacaggcgtgagccaccgcgcctggccataaatctgacatctttaaaggaaagttttcattgtgagattaaggcttaacagcccatgaggtcatatacacatgaacgtatctattccatttaaagcaatacacactctggcttctgattaaaaatagccaggaggagagtctctgaatctactgtgattctggagtctgcccaatttggaaaaaaaaaaaaaagaaaaaagtcaggaggaccaatttgccagggaaactcatagaaaagaattacaaagagatcacaaaaactggacatattcttttgactaattagaccacttatggctgggcgcagtggctcacgcctgtaatcccagcactttgggaggtcgatgtgggaggattgcttgagcccaagagttcaagactggcctgggcaacatggtgagaccttgtctctgctacaagataaaaaaaaattagctgggcgtggcctcagctacccaagaggctaaagtgggaggatcacttgtgcctgggaggttcaggctgctgtgagccgagaccacgccactgaactccagcttaggccacagggcaagaccctgtcttaaaataatattactaattttggtaattaacttatcaaaactatagtgacatatacacgggcagaaacttataagtagagttgtaatgcagccaaatattcttacaaattccctaacaagaagctcaaatctttctcacaggcaaattgtaaaaattctagttttttgtttaaagagctgtgattttcaaaagtatcccttcagtttaagaaatctggggaattggtaacttttcttatgggaaatgattgccatcatctctactgaaggatgcctcttactgaaaaatgtcttttgaaggagttcttgcctaaagcattctttggatgtaatttcatacactaaacatatagaccagtagttagtgggcccctcctcttaaacagtaacttttgaagtactgatacatgattaaaatgttagatatttttcactggagctaagacttaaaattagggcattttgaaaggtgtatttgtttctgtttcttgtttgatatattttggttatctactcttttaaaaaactaaacgtataaaaggtatcttcaaattactgagtgtttcatccatcccagtaggtgaagtattctccagtgaataaatctatatatatatatagattttaaatagcttgagcggtgtagcttgaaatgttttcagggaaagactatttgaatcataaggaatagctttgattttcttttttatgtctcaaatatagaattatttgggggtggtcactcagatggaagaatattggcaattgtgttgaacattctaccttatatagttttgagaatttttgccaaaaactgatttcttagaaatatcctcccccagctgtgctttggttttttggtttttttgttttgagacggagtcttgctctgtcgcccaggctggagtgcagtggcatgatctcggctcactgcaagctctgcctcccgggttcacgccattctcctgcctcagcctcccgagtagctgggactacggacgtccaccaccatgcccagctaattttttgtatttttagtagagacggggtttcaccgtgttagccaggatggtctcaatctcctgacccgcctccacctcccaaagtgctgggattacaggcatgagccaccacacccggcctctgctttgttttttaaaaaaaaagaaatgcaagagagggagggaggcagcctcctgaccataaaagctgatttcttgatttttttttcttttttttttgaaatggagtcttgctctgtctccaaggctggagtgcagtggcatggtctcagctcactgcagcctccgtttcctgggttcaagtgattgtcctgccttggccgctgagtagctaggattactggcacccgccacaaggcccagctaatttttgtatttttagtagagacagggtttgattatgttggacaggctggtctcaaactcctgacttcaagtgatccacccgcctcggcctcccaacgtgatgggactatagacatgagccatcgtgcttggccttcttgattcttgaatacggggttttgaggtgaaagcatttcatgaaaacttaagttcatacacaagagcatcatgaatattctaaaagaggtatctgtgctttttttgtgaccacaaaatattacttcttatgaaatgtttacactaggtgaggaaaagttcattaattacctttaaaccgttccttattttttttaagattttaaattgtattttggcttttgcctccagtatcctttctggttgctctggtttgaattaagttcctattatgctgcagcacatatcaaccttccctaagtaaccatttcctggaatgtgaagcatcggtgccattagcagaccatatgcagaaatgtcgtgtacttgcatttcttttttgtgcactctataaggctggttgtgactcagatcagcttaactttttatattatgttatttcactaactgctacagtcaaaatgatcaaatctttgtacaatagaaaattatttaaattttatttttctactgacatttctaattctagtgtaaatgtttatcaataaaaaattactttcaattctga

SEQ ID NO: 308575 - DNA, 5327 bp, Homo sapiens
aaaaaagtgtgatctaattttattgctctgaaccgaatctctgtacattttattttatttaaaactaagtcgagctctatagaggctacatagcctccctcccattctggtcccacaccagactttgcatgggctctttctactatcagctttaaatagagaacgttcttgttctgttcatgaaggtttcataaatgctggagtccagtcataactagaactttacatatccgttccatcactgtatttttccagatccctggtaactccatagcgcggctctgttggggcgcatgcaattccctactttctcacagggggcgctgcagagaagggcagagcagagcgcgcggtcccagagcgcgccgtccaggagggggcgcgtccgtggggctgtgtctctgcgagccctgcgcaacgttgggggcgggaacaaccctggccctgcgcccgagcgctgcggcgccttgtgattggaggaggcaacggtcacttggcagcgccgttgggattgggggaagaggaccccggctggaggtgacgctgaggcggcgagggtgagtcggcgccggccgctaccgcacttcgggcgctcgtccctcatttctctgtggtgaatggcagcagatcctgagcctgaaggttgtgccgcgggtgggcaacgggaccctgtgccccaactctacttccctctgctccttcccagagatgtggtatggtgtattcctgtgggcactggtgtcttctctcttctttcatgtccctgctggattactggccctcttcaccctcagacatcacaaatatggtaggttcatgtctgtaagcatcctgttgatgggcatcgtgggaccaattactgctggaatcttgacaagtgcagctattgctggagtttaccgagcagcagggaaggaaatgataccatttgaagccctcacactgggcactggacagacattttgcgtcttggtggtctcctttttacggattttagctactctatagcatacatccttatgctgagatgttgaacttaaactttatggaatcctccaaaagaatacattatggagtgtagtgttttcttagttcttcaaagggaagcaacttggatgaacaggaacatgaaggacaacacatctcagccttttcttcattttgaagctcctagaattgaagacttatgtggactcctattgttctcaaccaaaacaagtcttttggctttcttttttgtagatatttaatttaagcagttttcatgtgtacctttacccaagccaagtcaacagtgtctctggggtggcatcctttgcactgaaatttacagtattctgtgagatgtcgcatattttgaagaaaccgtggaagatactggtttatttcaaatgagcagagtatgttgtattaaaatcttatctaatcttgattaaaatttggcaaactcttttctttgctacatcttagtgacaataaatgccaaataggttttggttgagtatagttttgaaaacaaatttggtgaaataaagcaggaaaaaaaatttaagtataactcaagtagtggctttggttccactgtttataaataaaaagtagataacaatgaataatgtgacattttctggacaactgtcttgacttctgattaagatattttaagagatgtgaatttgttattttgtatgttttatcaaaataagctagctaatttagactttttagattttctgtaccacctttccctatcacttttaattctcttaattttatttcatttaattggaaacatacataccctattaaatggcttgagttggaaattttaagccagatttgtttggacattgaggcacacataagatactttaggcattctgtcatagtttttcttagtgactttggtatactaatgacccttgagaaactatagaagtgcatctgaaactagagttagtggttattgattttttagcttaatgtgtttacctagtggtaactcttcagcccacttttacagtattgggtatcaactcccagaaagtgcctaaagtttaatgttcagatatgtacccactctcccctttacatttttattcaaaagaatttatatctttaaagagatttaaatatcaagagtttttttaaaacttaattttagctatttaaatttttattctactgcctaactttctttttcattaaaaggcctgaaaactgtgactctttgagagggaaagaatcgcagaaattaagtatttaatgtgatcctttccacctaaactgttttgtatggaatacaatcagtgtggtggtagtggtggtggttatctgcaaaatagtttctggtgattaaatctgactttttttttttttttcttttaaatgagacggagcctcactgtgttgcccaggctggagtgcagtggtgcaatctcagctcactccaacctctgccacccgggttcaagcgattctcctgcctcagtttcctgagtagctgggattacaggcacctgccaccgtgcccggctaatttttgtatttttagtggagataggtttcaccatcttgcccaggctggtcttgaactcctgaccttgtgatccacccgcctcggcctcccaaagtgctgggattacaggcgtgagccaccgcgcctggccataaatctgacatctttaaaggaaagttttcattgtgagattaaggcttaacagcccatgaggtcatatacacatgaacgtatctattccatttaaagcaatacacactctggcttctgattaaaaatagccaggaggagagtctctgaatctactgtgattctggagtctgcccaatttggaaaaaaaaaaaaaagaaaaaagtcaggaggaccaatttgccagggaaactcatagaaaagaattacaaagagatcacaaaaactggacatattcttttgactaattagaccacttatggctgggcgcagtggctcacgcctgtaatcccagcactttgggaggtcgatgtgggaggattgcttgagcccaagagttcaagactggcctgggcaacatggtgagaccttgtctctgctacaagataaaaaaaaattagctgggcgtggcctcagctacccaagaggctaaagtgggaggatcacttgtgcctgggaggttcaggctgctgtgagccgagaccacgccactgaactccagcttaggccacagggcaagaccctgtcttaaaataatattactaattttggtaattaacttatcaaaactatagtgacatatacacgggcagaaacttataagtagagttgtaatgcagccaaatattcttacaaattccctaacaagaagctcaaatctttctcacaggcaaattgtaaaaattctagttttttgtttaaagagctgtgattttcaaaagtatcccttcagtttaagaaatctggggaattggtaacttttcttatgggaaatgattgccatcatctctactgaaggatgcctcttactgaaaaatgtcttttgaaggagttcttgcctaaagcattctttggatgtaatttcatacactaaacatatagaccagtagttagtgggcccctcctcttaaacagtaacttttgaagtactgatacatgattaaaatgttagatatttttcactggagctaagacttaaaattagggcattttgaaaggtgtatttgtttctgtttcttgtttgatatattttggttatctactcttttaaaaaactaaacgtataaaaggtatcttcaaattactgagtgtttcatccatcccagtaggtgaagtattctccagtgaataaatctatatatatatatagattttaaatagcttgagcggtgtagcttgaaatgttttcagggaaagactatttgaatcataaggaatagctttgattttcttttttatgtctcaaatatagaattatttgggggtggtcactcagatggaagaatattggcaattgtgttgaacattctaccttatatagttttgagaatttttgccaaaaactgatttcttagaaatatcctcccccagctgtgctttggttttttggtttttttgttttgagacggagtcttgctctgtcgcccaggctggagtgcagtggcatgatctcggctcactgcaagctctgcctcccgggttcacgccattctcctgcctcagcctcccgagtagctgggactacggacgtccaccaccatgcccagctaattttttgtatttttagtagagacggggtttcaccgtgttagccaggatggtctcaatctcctgacccgcctccacctcccaaagtgctgggattacaggcatgagccaccacacccggcctctgctttgttttttaaaaaaaaagaaatgcaagagagggagggaggcagcctcctgaccataaaagctgatttcttgatttttttttcttttttttttgaaatggagtcttgctctgtctccaaggctggagtgcagtggcatggtctcagctcactgcagcctccgtttcctgggttcaagtgattgtcctgccttggccgctgagtagctaggattactggcacccgccacaaggcccagctaatttttgtatttttagtagagacagggtttgattatgttggacaggctggtctcaaactcctgacttcaagtgatccacccgcctcggcctcccaacgtgatgggactatagacatgagccatcgtgcttggccttcttgattcttgaatacggggttttgaggtgaaagcatttcatgaaaacttaagttcatacacaagagcatcatgaatattctaaaagaggtatctgtgctttttttgtgaccacaaaatattacttcttatgaaatgtttacactaggtgaggaaaagttcattaattacctttaaaccgttccttattttttttaagattttaaattgtattttggcttttgcctccagtatcctttctggttgctctggtttgaattaagttcctattatgctgcagcacatatcaaccttccctaagtaaccatttcctggaatgtgaagcatcggtgccattagcagaccatatgcagaaatgtcgtgtacttgcatttcttttttgtgcactctataaggctggttgtgactcagatcagcttaactttttatattatgttatttcactaactgctacagtcaaaatgatcaaatctttgtacaatagaaaattatttaaattttatttttctactgacatttctaattctagtgtaaatgtttatcaataaaaaattactttcaattctga

SEQ ID NO: 308576 - DNA, 4797 bp, Homo sapiens
cggtacccgaggatcccgatgtccctcccgggattttcctggacgggattgtgaagtagcggagatgtggtatggtgtattcctgtgggcactggtgtcttctctcttctttcatgtccctgctggattactggccctcttcaccctcagacatcacaaatatggtgcagctattgctggagtttaccgagcagcagggaaggaaatgataccatttgaagccctcacactgggcactggacagacattttgcgtcttggtggtctcctttttacggattttagctactctatagcatacatccttatgctgagatgttgaacttaaactttatggaatcctccaaaagaatacattatggagtgtagtgttttcttagttcttcaaagggaagcaacttggatgaacaggaacatgaaggacaacacatctcagccttttcttcattttgaagctcctagaattgaagacttatgtggactcctattgttctcaaccaaaacaagtcttttggctttcttttttgtagatatttaatttaagcagttttcatgtgtacctttacccaagccaagtcaacagtgtctctggggtggcatcctttgcactgaaatttacagtattctgtgagatgtcgcatattttgaagaaaccgtggaagatactggtttatttcaaatgagcagagtatgttgtattaaaatcttatctaatcttgattaaaatttggcaaactcttttctttgctacatcttagtgacaataaatgccaaataggttttggttgagtatagttttgaaaacaaatttggtgaaataaagcaggaaaaaaaatttaagtataactcaagtagtggctttggttccactgtttataaataaaaagtagataacaatgaataatgtgacattttctggacaactgtcttgacttctgattaagatattttaagagatgtgaatttgttattttgtatgttttatcaaaataagctagctaatttagactttttagattttctgtaccacctttccctatcacttttaattctcttaattttatttcatttaattggaaacatacataccctattaaatggcttgagttggaaattttaagccagatttgtttggacattgaggcacacataagatactttaggcattctgtcatagtttttcttagtgactttggtatactaatgacccttgagaaactatagaagtgcatctgaaactagagttagtggttattgattttttagcttaatgtgtttacctagtggtaactcttcagcccacttttacagtattgggtatcaactcccagaaagtgcctaaagtttaatgttcagatatgtacccactctcccctttacatttttattcaaaagaatttatatctttaaagagatttaaatatcaagagtttttttaaaacttaattttagctatttaaatttttattctactgcctaactttctttttcattaaaaggcctgaaaactgtgactctttgagagggaaagaatcgcagaaattaagtatttaatgtgatcctttccacctaaactgttttgtatggaatacaatcagtgtggtggtagtggtggtggttatctgcaaaatagtttctggtgattaaatctgactttttttttttttttcttttaaatgagacggagcctcactgtgttgcccaggctggagtgcagtggtgcaatctcagctcactccaacctctgccacccgggttcaagcgattctcctgcctcagtttcctgagtagctgggattacaggcacctgccaccgtgcccggctaatttttgtatttttagtggagataggtttcaccatcttgcccaggctggtcttgaactcctgaccttgtgatccacccgcctcggcctcccaaagtgctgggattacaggcgtgagccaccgcgcctggccataaatctgacatctttaaaggaaagttttcattgtgagattaaggcttaacagcccatgaggtcatatacacatgaacgtatctattccatttaaagcaatacacactctggcttctgattaaaaatagccaggaggagagtctctgaatctactgtgattctggagtctgcccaatttggaaaaaaaaaaaaaagaaaaaagtcaggaggaccaatttgccagggaaactcatagaaaagaattacaaagagatcacaaaaactggacatattcttttgactaattagaccacttatggctgggcgcagtggctcacgcctgtaatcccagcactttgggaggtcgatgtgggaggattgcttgagcccaagagttcaagactggcctgggcaacatggtgagaccttgtctctgctacaagataaaaaaaaattagctgggcgtggcctcagctacccaagaggctaaagtgggaggatcacttgtgcctgggaggttcaggctgctgtgagccgagaccacgccactgaactccagcttaggccacagggcaagaccctgtcttaaaataatattactaattttggtaattaacttatcaaaactatagtgacatatacacgggcagaaacttataagtagagttgtaatgcagccaaatattcttacaaattccctaacaagaagctcaaatctttctcacaggcaaattgtaaaaattctagttttttgtttaaagagctgtgattttcaaaagtatcccttcagtttaagaaatctggggaattggtaacttttcttatgggaaatgattgccatcatctctactgaaggatgcctcttactgaaaaatgtcttttgaaggagttcttgcctaaagcattctttggatgtaatttcatacactaaacatatagaccagtagttagtgggcccctcctcttaaacagtaacttttgaagtactgatacatgattaaaatgttagatatttttcactggagctaagacttaaaattagggcattttgaaaggtgtatttgtttctgtttcttgtttgatatattttggttatctactcttttaaaaaactaaacgtataaaaggtatcttcaaattactgagtgtttcatccatcccagtaggtgaagtattctccagtgaataaatctatatatatatatagattttaaatagcttgagcggtgtagcttgaaatgttttcagggaaagactatttgaatcataaggaatagctttgattttcttttttatgtctcaaatatagaattatttgggggtggtcactcagatggaagaatattggcaattgtgttgaacattctaccttatatagttttgagaatttttgccaaaaactgatttcttagaaatatcctcccccagctgtgctttggttttttggtttttttgttttgagacggagtcttgctctgtcgcccaggctggagtgcagtggcatgatctcggctcactgcaagctctgcctcccgggttcacgccattctcctgcctcagcctcccgagtagctgggactacggacgtccaccaccatgcccagctaattttttgtatttttagtagagacggggtttcaccgtgttagccaggatggtctcaatctcctgacccgcctccacctcccaaagtgctgggattacaggcatgagccaccacacccggcctctgctttgttttttaaaaaaaaagaaatgcaagagagggagggaggcagcctcctgaccataaaagctgatttcttgatttttttttcttttttttttgaaatggagtcttgctctgtctccaaggctggagtgcagtggcatggtctcagctcactgcagcctccgtttcctgggttcaagtgattgtcctgccttggccgctgagtagctaggattactggcacccgccacaaggcccagctaatttttgtatttttagtagagacagggtttgattatgttggacaggctggtctcaaactcctgacttcaagtgatccacccgcctcggcctcccaacgtgatgggactatagacatgagccatcgtgcttggccttcttgattcttgaatacggggttttgaggtgaaagcatttcatgaaaacttaagttcatacacaagagcatcatgaatattctaaaagaggtatctgtgctttttttgtgaccacaaaatattacttcttatgaaatgtttacactaggtgaggaaaagttcattaattacctttaaaccgttccttattttttttaagattttaaattgtattttggcttttgcctccagtatcctttctggttgctctggtttgaattaagttcctattatgctgcagcacatatcaaccttccctaagtaaccatttcctggaatgtgaagcatcggtgccattagcagaccatatgcagaaatgtcgtgtacttgcatttcttttttgtgcactctataaggctggttgtgactcagatcagcttaactttttatattatgttatttcactaactgctacagtcaaaatgatcaaatctttgtacaatagaaaattatttaaattttatttttctactgacatttctaattctagtgtaaatgtttatcaataaaaaattactttcaattctgagttggaattatatttctttttggtggctaatgagtttaatcttttgtaataaaattgacttcagttttcattttttaaataacttaatatctagcatgtgtaactttttttatgttctacttcttactaatttatgataaaattcttgttcaaagttgtgattaaaccgtacttaacatgtga

SEQ ID NO: 308577 - DNA, 5086 bp, Homo sapiens
taataaaaacaatcaatgacttgggagacaaaggaatccctgagtatctctcctctcatgccctgtgaatgaataacaactttatggcttagagtcctcctgtcttcccttttcacccctctagtccctcctccgtccatttcttgaagggaactatgagtgtgatagaaggtggagtggggattccctgtggcctgaaacatttcttgcttagtctaactcaaaagatcctttttcatttgttaccaaaaatgtattaggtccctgttgaaggctaggcatggggtaactggtaggggaatacagatatttttgagttcataatctggtcatgtgggaattgctatctttgtgattttgattatttcttccagattattttattcaataaatctaggagactctgggttttaaggagtcagcatctaaaagtgatcttgcaagccatgcaacgaatactcaaagtgtagagtagtccacagaaagaatagggaaaacctaacatttctgtaagatttaaatttcagtataaaatctggaacattctactcgcagtagtattttaaatgttgtattttcgtgagtttgttaaccttcgttttttgttttgtttaacattcttgcattttaaatcaggtgcagctattgctggagtttaccgagcagcagggaaggaaatgataccatttgaagccctcacactgggcactggacagacattttgcgtcttggtggtctcctttttacggattttagctactctatagcatacatccttatgctgagatgttgaacttaaactttatggaatcctccaaaagaatacattatggagtgtagtgttttcttagttcttcaaagggaagcaacttggatgaacaggaacatgaaggacaacacatctcagccttttcttcattttgaagctcctagaattgaagacttatgtggactcctattgttctcaaccaaaacaagtcttttggctttcttttttgtagatatttaatttaagcagttttcatgtgtacctttacccaagccaagtcaacagtgtctctggggtggcatcctttgcactgaaatttacagtattctgtgagatgtcgcatattttgaagaaaccgtggaagatactggtttatttcaaatgagcagagtatgttgtattaaaatcttatctaatcttgattaaaatttggcaaactcttttctttgctacatcttagtgacaataaatgccaaataggttttggttgagtatagttttgaaaacaaatttggtgaaataaagcaggaaaaaaaatttaagtataactcaagtagtggctttggttccactgtttataaataaaaagtagataacaatgaataatgtgacattttctggacaactgtcttgacttctgattaagatattttaagagatgtgaatttgttattttgtatgttttatcaaaataagctagctaatttagactttttagattttctgtaccacctttccctatcacttttaattctcttaattttatttcatttaattggaaacatacataccctattaaatggcttgagttggaaattttaagccagatttgtttggacattgaggcacacataagatactttaggcattctgtcatagtttttcttagtgactttggtatactaatgacccttgagaaactatagaagtgcatctgaaactagagttagtggttattgattttttagcttaatgtgtttacctagtggtaactcttcagcccacttttacagtattgggtatcaactcccagaaagtgcctaaagtttaatgttcagatatgtacccactctcccctttacatttttattcaaaagaatttatatctttaaagagatttaaatatcaagagtttttttaaaacttaattttagctatttaaatttttattctactgcctaactttctttttcattaaaaggcctgaaaactgtgactctttgagagggaaagaatcgcagaaattaagtatttaatgtgatcctttccacctaaactgttttgtatggaatacaatcagtgtggtggtagtggtggtggttatctgcaaaatagtttctggtgattaaatctgactttttttttttttttcttttaaatgagacggagcctcactgtgttgcccaggctggagtgcagtggtgcaatctcagctcactccaacctctgccacccgggttcaagcgattctcctgcctcagtttcctgagtagctgggattacaggcacctgccaccgtgcccggctaatttttgtatttttagtggagataggtttcaccatcttgcccaggctggtcttgaactcctgaccttgtgatccacccgcctcggcctcccaaagtgctgggattacaggcgtgagccaccgcgcctggccataaatctgacatctttaaaggaaagttttcattgtgagattaaggcttaacagcccatgaggtcatatacacatgaacgtatctattccatttaaagcaatacacactctggcttctgattaaaaatagccaggaggagagtctctgaatctactgtgattctggagtctgcccaatttggaaaaaaaaaaaaaagaaaaaagtcaggaggaccaatttgccagggaaactcatagaaaagaattacaaagagatcacaaaaactggacatattcttttgactaattagaccacttatggctgggcgcagtggctcacgcctgtaatcccagcactttgggaggtcgatgtgggaggattgcttgagcccaagagttcaagactggcctgggcaacatggtgagaccttgtctctgctacaagataaaaaaaaattagctgggcgtggcctcagctacccaagaggctaaagtgggaggatcacttgtgcctgggaggttcaggctgctgtgagccgagaccacgccactgaactccagcttaggccacagggcaagaccctgtcttaaaataatattactaattttggtaattaacttatcaaaactatagtgacatatacacgggcagaaacttataagtagagttgtaatgcagccaaatattcttacaaattccctaacaagaagctcaaatctttctcacaggcaaattgtaaaaattctagttttttgtttaaagagctgtgattttcaaaagtatcccttcagtttaagaaatctggggaattggtaacttttcttatgggaaatgattgccatcatctctactgaaggatgcctcttactgaaaaatgtcttttgaaggagttcttgcctaaagcattctttggatgtaatttcatacactaaacatatagaccagtagttagtgggcccctcctcttaaacagtaacttttgaagtactgatacatgattaaaatgttagatatttttcactggagctaagacttaaaattagggcattttgaaaggtgtatttgtttctgtttcttgtttgatatattttggttatctactcttttaaaaaactaaacgtataaaaggtatcttcaaattactgagtgtttcatccatcccagtaggtgaagtattctccagtgaataaatctatatatatatatagattttaaatagcttgagcggtgtagcttgaaatgttttcagggaaagactatttgaatcataaggaatagctttgattttcttttttatgtctcaaatatagaattatttgggggtggtcactcagatggaagaatattggcaattgtgttgaacattctaccttatatagttttgagaatttttgccaaaaactgatttcttagaaatatcctcccccagctgtgctttggttttttggtttttttgttttgagacggagtcttgctctgtcgcccaggctggagtgcagtggcatgatctcggctcactgcaagctctgcctcccgggttcacgccattctcctgcctcagcctcccgagtagctgggactacggacgtccaccaccatgcccagctaattttttgtatttttagtagagacggggtttcaccgtgttagccaggatggtctcaatctcctgacccgcctccacctcccaaagtgctgggattacaggcatgagccaccacacccggcctctgctttgttttttaaaaaaaaagaaatgcaagagagggagggaggcagcctcctgaccataaaagctgatttcttgatttttttttcttttttttttgaaatggagtcttgctctgtctccaaggctggagtgcagtggcatggtctcagctcactgcagcctccgtttcctgggttcaagtgattgtcctgccttggccgctgagtagctaggattactggcacccgccacaaggcccagctaatttttgtatttttagtagagacagggtttgattatgttggacaggctggtctcaaactcctgacttcaagtgatccacccgcctcggcctcccaacgtgatgggactatagacatgagccatcgtgcttggccttcttgattcttgaatacggggttttgaggtgaaagcatttcatgaaaacttaagttcatacacaagagcatcatgaatattctaaaagaggtatctgtgctttttttgtgaccacaaaatattacttcttatgaaatgtttacactaggtgaggaaaagttcattaattacctttaaaccgttccttattttttttaagattttaaattgtattttggcttttgcctccagtatcctttctggttgctctggtttgaattaagttcctattatgctgcagcacatatcaaccttccctaagtaaccatttcctggaatgtgaagcatcggtgccattagcagaccatatgcagaaatgtcgtgtacttgcatttcttttttgtgcactctataaggctggttgtgactcagatcagcttaactttttatattatgttatttcactaactgctacagtcaaaatgatcaaatctttgtacaatagaaaattatttaaattttatttttctactgacatttctaattctagtgtaaatgtttatcaataaaaaattactttcaattctga

SEQ ID NO: 308578 - DNA, 2827 bp, Homo sapiens
  misc_feature (39)..(39): n is a, c, g, or t
ggccgcgtcgacatctactgtgattctggagtctgcccnatttggaaaaaaaaaaaaaagaaaaaagtcaggaggaccaatttgccagggaaactcacagaaaagaattacaaagagatcacaaaaactggacatattcttttgactaattagaccaccgcgcctggccataaatctgacatctttaaaggaaagttttcattgtgagattaaggcttaacagcccatgaggtcatatacacatgaacgtatctattccatttaaagcaatacacactctggcttctgattaaaaatagccaggaggagagtctctgaatctactgtgattctggagtctgcccaatttggaaaaaaaaaaaaaagaaaaaagtcaggaggaccaatttgccagggaaactcatagaaaagaattacaaagagatcacaaaaactggacatattcttttgactaattagaccacttatggctgggcgcagtggctcacgcctgtaatcccagcactttgggaggtcgatgtgggaggattgcttgagcccaagagttcaagactggcctgggcaacatggtgagaccttgtctctgctacaagataaaaaaaaattagctgggcgtggcctcagctacccaagaggctaaagtgggaggatcacttgtgcctgggaggttcaggctgctgtgagccgagaccacgccactgaactccagcttaggccacagggcaagaccctgtcttaaaataatattactaattttggtaattaacttatcaaaactatagtgacatatacacgggcagaaacttataagtagagttgtaatgcagccaaatattcttacaaattccctaacaagaagctcaaatctttctcacaggcaaattgtaaaaattctagttttttgtttaaagagctgtgattttcaaaagtatcccttcagtttaagaaatctggggaattggtaacttttcttatgggaaatgattgccatcatctctactgaaggatgcctcttactgaaaaatgtcttttgaaggagttcttgcctaaagcattctttggatgtaatttcatacactaaacatatagaccagtagttagtgggcccctcctcttaaacagtaacttttgaagtactgatacatgattaaaatgttagatatttttcactggagctaagacttaaaattagggcattttgaaaggtgtatttgtttctgtttcttgtttgatatattttggttatctactcttttaaaaaactaaacgtataaaaggtatcttcaaattactgagtgtttcatccatcccagtaggtgaagtattctccagtgaataaatctatatatatatatagattttaaatagcttgagcggtgtagcttgaaatgttttcagggaaagactatttgaatcataaggaatagctttgattttcttttttatgtctcaaatatagaattatttgggggtggtcactcagatggaagaatattggcaattgtgttgaacattctaccttatatagttttgagaatttttgccaaaaactgatttcttagaaatatcctcccccagctgtgctttggttttttggtttttttgttttgagacggagtcttgctctgtcgcccaggctggagtgcagtggcatgatctcggctcactgcaagctctgcctcccgggttcacgccattctcctgcctcagcctcccgagtagctgggactacggacgtccaccaccatgcccagctaattttttgtatttttagtagagacggggtttcaccgtgttagccaggatggtctcaatctcctgacccgcctccacctcccaaagtgctgggattacaggcatgagccaccacacccggcctctgctttgttttttaaaaaaaaagaaatgcaagagagggagggaggcagcctcctgaccataaaagctgatttcttgatttttttttcttttttttttgaaatggagtcttgctctgtctccaaggctggagtgcagtggcatggtctcagctcactgcagcctccgtttcctgggttcaagtgattgtcctgccttggccgctgagtagctaggattactggcacccgccacaaggcccagctaatttttgtatttttagtagagacagggtttgattatgttggacaggctggtctcaaactcctgacttcaagtgatccacccgcctcggcctcccaacgtgatgggactatagacatgagccatcgtgcttggccttcttgattcttgaatacggggttttgaggtgaaagcatttcatgaaaacttaagttcatacacaagagcatcatgaatattctaaaagaggtatctgtgctttttttgtgaccacaaaatattacttcttatgaaatgtttacactaggtgaggaaaagttcattaattacctttaaaccgttccttattttttttaagattttaaattgtattttggcttttgcctccagtatcctttctggttgctctggtttgaattaagttcctattatgctgcagcacatatcaaccttccctaagtaaccatttcctggaatgtgaagcatcggtgccattagcagaccatatgcagaaatgtcgtgtacttgcatttcttttttgtgcactctataaggctggttgtgactcagatcagcttaactttttatattatgttatttcactaactgctacagtcaaaatgatcaaatctttgtacaatagaaaattatttaaattttatttttctactgacatttctaattctagtgtaaatgtttatcaataaaaaattactttcaattctga

SEQ ID NO: 308579 - DNA, 5197 bp, Homo sapiens
  misc_feature (130)..(130): n is a, c, g, or t
  misc_feature (151)..(151): n is a, c, g, or t
  misc_feature (154)..(154): n is a, c, g, or t
  misc_feature (217)..(217): n is a, c, g, or t
  misc_feature (219)..(219): n is a, c, g, or t
  misc_feature (241)..(241): n is a, c, g, or t
  misc_feature (382)..(382): n is a, c, g, or t
cgagcgcggcgcccttgagctgcaccgcggcgcaggtttgcgagccgacttgtcagccggccaagaaaaggaagctccgtcccttcccgctcacccggcttccccaccccttgtactctaaactctgcanagggcgagcggcgcggccacngangcgccgaggaggagcgagccgccgccgggcagcggcgtgccctcgggggagagggcgccgganangaggcggcggcgcggcggcganggcgcggcgcgcgatggcagctgcttagcccggcgggcgcggagcagccccgagctgtggctggccaggcggtgcggctgggcgggggacgccgccgccgttgctgcccggcccggagagatgagcacggaggcggacganggcatcactttctctgtgccacccttcgccccctcgggcttctgcaccatccccgagggcggcatctgcaggaggggaggagcggcggcggtgggcgagggcgaggagcaccagctgccaccgccgccgccgggcagcttctggaacgtggagagcgccgctgcccctggcatcggttgtccggcggccacctcctcgagcagtgccacccgaggccggggcagctctgttggcgggggcagccgacggaccacggtggcatatgtgatcaacgaagcgagccaagggcaactggtggtggccgagagcgaggccctgcagagcttgcgggaggcgtgcgagacagtgggcgccaccctggaaaccctgcattttgggaaactcgactttggagaaaccaccgtgctggaccgcttttacaatgcagatattgcggtggtggagatgagcgatgccttccggcagccgtccttgttttaccaccttggggtgagagaaagtttcagcatggccaacaacatcatcctctactgtgatactaactcggactctctgcagtcactgaaggaaataatttgccagaagaatactatgtgcactgggaactacacctttgttccttacatgataactccacataacaaagtctactgctgtgacagcagcttcatgaaggggttgacagagctcatgcaaccgaacttcgagctgcttcttggacccatctgcttacctcttgtggatcgttttattcaacttttgaaggtggcacaagcaagttctagccagtacttccgggaatctatactcaatgacatcaggaaagctcgtaatttatacactggtaaagaattggcagctgagttggcaagaattcggcagcgagtagataatatcgaagtcttgacagcagatattgtcataaatctgttactttcctacagagatatccaggactatgattctattgtgaagctggtagagactttagaaaaactgccaacctttgatttggcctcccatcaccatgtgaagtttcattatgcatttgcactgaataggagaaatctccctggtgacagagcaaaagctcttgatattatgattcccatggtgcaaagcgaaggacaagttgcttcagatatgtattgcctagttggtcgaatctacaaagatatgtttttggactctaatttcacggacactgaaagcagagaccatggagcttcttggttcaaaaaggcatttgaatctgagccaacactacagtcaggaattaattatgcggtcctcctcctggcagctggacaccagtttgaatcttcctttgagctccggaaagttggggtgaagctaagtagtcttcttggtaaaaagggaaacttggaaaaactccagagctactgggaagttggattttttctgggggccagcgtcctagccaatgaccacatgagagtcattcaagcatctgaaaagctttttaaactgaagacaccagcatggtacctcaagtctattgtagagacaattttaatatataagcattttgtgaaactgaccacagaacagcctgtggccaagcaagaacttgtggacttttggatggatttcctggtcgaggccacaaagacagatgttactgtggttaggtttccagtattaatattagaaccaaccaaaatctatcaaccttcttatttgtctatcaacaatgaagttgaggaaaagacaatctctatttggcacgtgcttcctgatgacaagaaaggtatacatgagtggaattttagtgcctcttctgtcaggggagtgagtatttctaaatttgaagaaagatgctgctttctttatgtgcttcacaattctgatgatttccaaatctatttctgtacagaacttcattgtaaaaagttttttgagatggtgaacaccattaccgaagagaaggggagaagcacagaggaaggagactgtgaaagtgacttgctggagtatgactatgaatatgatgaaaatggtgacagagtcgttttaggaaaaggcacttatgggatagtctacgcaggtcgggacttgagcaaccaagtcagaattgctattaaggaaatcccagagagagacagcagatactctcagcccctgcatgaagaaatagcattgcataaacacctgaagcacaaaaatattgtccagtatctgggctctttcagtgagaatggtttcattaaaatcttcatggagcaggtccctggaggaagtctttctgctctccttcgttccaaatggggtccattaaaagacaatgagcaaacaattggcttttatacaaagcaaatactggaaggattaaaatatctccatgacaatcagatagttcaccgggacataaagggtgacaatgtgttgattaatacctacagtggtgttctcaagatctctgacttcggaacatcaaagaggcttgctggcataaacccctgtactgaaacttttactggtaccctccagtatatggcaccagaaataatagataaaggaccaagaggctacggaaaagcagcagacatctggtctctgggctgtacaatcattgaaatggccacaggaaaacccccattttatgaactgggagaaccacaagcagctatgttcaaggtgggaatgtttaaagtccaccctgagatcccagagtccatgtctgcagaggccaaggcattcatactgaaatgttttgaaccagatcctgacaagagagcctgtgctaacgacttgcttgttgatgagtttttaaaagtttcaagcaaaaagaaaaagacacaacctaagctttcagctctttcagctggatcaaatgaatatctcaggagtatatccttgccggtacctgtgctggtggaggacaccagcagcagcagtgagtacggctcagtttcacccgacacggagttgaaagtggaccccttctctttcaaaacaagagccaagtcctgcggagaaagagatgtcaagggaattcggacactctttttgggcattccagatgagaattttgaagatcacagtgctcctccttcccctgaagaaaaagattctggattcttcatgctgaggaaggacagtgagaggcgagctacccttcacaggatcctgacggaagaccaagacaaaattgtgagaaacctaatggaatctttagctcagggggctgaagaaccgaaactaaaatgggaacacatcacaaccctcattgcaagcctcagagaatttgtgagatccactgaccgaaaaatcatagccaccacactgtcaaagctgaaactggagctggacttcgacagccatggcattagccaagtccaggtggtactctttggttttcaagatgctgtcaataaagttcttcggaatcataacatcaagccgcactggatgtttgccttagacagtatcattcggaaggcggtacagacagccattaccatcctggttccagaactaaggccacatttcagccttgcatctgagagtgatactgctgatcaagaagacttggatgtagaagatgaccatgaggaacagccttcaaatcaaactgtccgaagacctcaggctgtcattgaagatgctgtggctacctcaggcgtgagcacgctcagttctactgtgtctcatgattcccagagtgctcaccggtcactgaatgtacagcttggaaggatgaaaatagaaaccaatagattactggaagaattggttcggaaagagaaagaattacaagcactccttcatcgagctattgaagaaaaagaccaagaaattaaacacctgaagcttaagtcccaacccatagaaattcctgaattgcctgtatttcatctaaattcttctggcacaaatactgaagattctgaacttaccgactggctgagagtgaatggagctgatgaagacactataagccggtttttggctgaagattatacactattggatgttctctactatgttacacgtgatgacttaaaatgcttgagactaaggggagggatgctgtgcacactgtggaaggctatcattgactttcgaaacaaacagacttgactgttgctcaatctaatcttcgatggaaattctaaaaattaatacagagctgatcttcttgggggtgggaaaatcgaagggagaggagaaaggcgctgcactttaaatccagtatttgtttactcatgttaaaaaaaaaaaaaacagacaaaacacactgaaatttcctaactacatctatttctataatttttaaggactcttcataaggactcttaaaataatcctgaacattagaaccctaatgttcaggaagattttaatctaagcatttttatggaaatatttttaatgcagcagctattgcacttcagccaaatgtttatttcacacaaaacggatgtaacatttcatgtgatcgtgcaccactggaacaaaaccaaaatgtgaccataactgtttaggcttctgtgtgtttgtaatatgctctaataatctgagtagaaatgcgtaatttcaattactgtataaagtttatgtttttttaagtgtgcagaatctgagagcaatggtttttacttctctgtgttaattgtaatattgactctattttgtaacttaagtttctgacctgtcgtacatttgtttgagtcgtttatgtactactgaactgtaccagttgcacatgcttgaactgtagtaatgttagcttgttctaaagctatccattgtgtcatatttactctaaaaattaaagagactctcaacata

SEQ ID NO: 308580 - DNA, 5143 bp, Homo sapiens
  misc_feature (130)..(130): n is a, c, g, or t
  misc_feature (151)..(151): n is a, c, g, or t
  misc_feature (154)..(154): n is a, c, g, or t
  misc_feature (217)..(217): n is a, c, g, or t
  misc_feature (219)..(219): n is a, c, g, or t
  misc_feature (241)..(241): n is a, c, g, or t
  misc_feature (382)..(382): n is a, c, g, or t
cgagcgcggcgcccttgagctgcaccgcggcgcaggtttgcgagccgacttgtcagccggccaagaaaaggaagctccgtcccttcccgctcacccggcttccccaccccttgtactctaaactctgcanagggcgagcggcgcggccacngangcgccgaggaggagcgagccgccgccgggcagcggcgtgccctcgggggagagggcgccgganangaggcggcggcgcggcggcganggcgcggcgcgcgatggcagctgcttagcccggcgggcgcggagcagccccgagctgtggctggccaggcggtgcggctgggcgggggacgccgccgccgttgctgcccggcccggagagatgagcacggaggcggacganggcatcactttctctgtgccacccttcgccccctcgggcttctgcaccatccccgagggcggcatctgcaggaggggaggagcggcggcggtgggcgagggcgaggagcaccagctgccaccgccgccgccgggcagcttctggaacgtggagagcgccgctgcccctggcatcggttgtccggcggccacctcctcgagcagtgccacccgaggccggggcagctctgttggcgggggcagccgacggaccacggtggcatatgtgatcaacgaagcgagccaagggcaactggtggtggccgagagcgaggccctgcagagcttgcgggaggcgtgcgagacagtgggcgccaccctggaaaccctgcattttgggaaactcgactttggagaaaccaccgtgctggaccgcttttacaatgcagatattgcggtggtggagatgagcgatgccttccggcagccgtccttgttttaccaccttggggtgagagaaagtttcagcatggccaacaacatcatcctctactgtgatactaactcggactctctgcagtcactgaaggaaataatttgccagaagaatactatgtgcactgggaactacacctttgttccttacatgataactccacataacaaagtctactgctgtgacagcagcttcatgaaggggttgacagagctcatgcaaccgaacttcgagctgcttcttggacccatctgcttacctcttgtggatcgttttattcaacttttgaaggtggcacaagcaagttctagccagtacttccgggaatctatactcaatgacatcaggaaagctcgtaatttatacactggtaaagaattggcagctgagttggcaagaattcggcagcgagtagataatatcgaagtcttgacagcagatattgtcataaatctgttactttcctacagagatatccaggactatgattctattgtgaagctggtagagactttagaaaaactgccaacctttgatttggcctcccatcaccatgtgaagtttcattatgcatttgcactgaataggagaaatctccctggtgacagagcaaaagctcttgatattatgattcccatggtgcaaagcgaaggacaagttgcttcagatatgtattgcctagttggtcgaatctacaaagatatgtttttggactctaatttcacggacactgaaagcagagaccatggagcttcttggttcaaaaaggcatttgaatctgagccaacactacagtcaggaattaattatgcggtcctcctcctggcagctggacaccagtttgaatcttcctttgagctccggaaagttggggtgaagctaagtagtcttcttggtaaaaagggaaacttggaaaaactccagagctactgggaagttggattttttctgggggccagcgtcctagccaatgaccacatgagagtcattcaagcatctgaaaagctttttaaactgaagacaccagcatggtacctcaagtctattgtagagacaattttaatatataagcattttgtgaaactgaccacagaacagcctgtggccaagcaagaacttgtggacttttggatggatttcctggtcgaggccacaaagacagatgttactgtggttaggtttccagtattaatattagaaccaaccaaaatctatcaaccttcttatttgtctatcaacaatgaagttgaggaaaagacaatctctatttggcacgtgcttcctgatgacaagaaaggtatacatgagtggaattttagtgcctcttctgtcaggggagtgagtatttctaaatttgaagaaagatgctgctttctttatgtgcttcacaattctgatgatttccaaatctatttctgtacagaacttcattgtaaaaagttttttgagatggtgaacaccattaccgaagagaaggggagaagcacagaggaaggagactgtgaaagtgacttgctggagtatgactatgaatatgatgaaaatggtgacagagtcgttttaggaaaaggcacttatgggatagtctacgcaggtcgggacttgagcaaccaagtcagaattgctattaaggaaatcccagagagagacagcagatactctcagcccctgcatgaagaaatagcattgcataaacacctgaagcacaaaaatattgtccagtatctgggctctttcagtgagaatggtttcattaaaatcttcatggagcaggtccctggaggaagtctttctgctctccttcgttccaaatggggtccattaaaagacaatgagcaaacaattggcttttatacaaagcaaatactggaaggattaaaatatctccatgacaatcagatagttcaccgggacataaagggtgacaatgtgttgattaatacctacagtggtgttctcaagatctctgacttcggaacatcaaagaggcttgctggcataaacccctgtactgaaacttttactggtaccctccagtatatggcaccagaaataatagataaaggaccaagaggctacggaaaagcagcagacatctggtctctgggctgtacaatcattgaaatggccacaggaaaacccccattttatgaactgggagaaccacaagcagctatgttcaaggtgggaatgtttaaagtccaccctgagatcccagagtccatgtctgcagaggccaaggcattcatactgaaatgttttgaaccagatcctgacaagagagcctgtgctaacgacttgcttgttgatgagtttttaaaagtttcaagcaaaaagaaaaagacacaacctaagctttcagctctttcagctggatcaaatgaatatctcaggagtatatccttgccggtacctgtgctggtggaggacaccagcagcagcagtgagtacggctcagtttcacccgacacggagttgaaagtggaccccttctctttcaaaacaagagccaagtcctgcggagaaagagatgtcaagggaattcggacactctttttgggcattccagatgagaattttgaagatcacagtgctcctccttcccctgaagaaaaagattctggattcttcatgctgaggaaggacagtgagaggcgagctacccttcacaggatcctgacggaagaccaagacataaaatgggaacacatcacaaccctcattgcaagcctcagagaatttgtgagatccactgaccgaaaaatcatagccaccacactgtcaaagctgaaactggagctggacttcgacagccatggcattagccaagtccaggtggtactctttggttttcaagatgctgtcaataaagttcttcggaatcataacatcaagccgcactggatgtttgccttagacagtatcattcggaaggcggtacagacagccattaccatcctggttccagaactaaggccacatttcagccttgcatctgagagtgatactgctgatcaagaagacttggatgtagaagatgaccatgaggaacagccttcaaatcaaactgtccgaagacctcaggctgtcattgaagatgctgtggctacctcaggcgtgagcacgctcagttctactgtgtctcatgattcccagagtgctcaccggtcactgaatgtacagcttggaaggatgaaaatagaaaccaatagattactggaagaattggttcggaaagagaaagaattacaagcactccttcatcgagctattgaagaaaaagaccaagaaattaaacacctgaagcttaagtcccaacccatagaaattcctgaattgcctgtatttcatctaaattcttctggcacaaatactgaagattctgaacttaccgactggctgagagtgaatggagctgatgaagacactataagccggtttttggctgaagattatacactattggatgttctctactatgttacacgtgatgacttaaaatgcttgagactaaggggagggatgctgtgcacactgtggaaggctatcattgactttcgaaacaaacagacttgactgttgctcaatctaatcttcgatggaaattctaaaaattaatacagagctgatcttcttgggggtgggaaaatcgaagggagaggagaaaggcgctgcactttaaatccagtatttgtttactcatgttaaaaaaaaaaaaaacagacaaaacacactgaaatttcctaactacatctatttctataatttttaaggactcttcataaggactcttaaaataatcctgaacattagaaccctaatgttcaggaagattttaatctaagcatttttatggaaatatttttaatgcagcagctattgcacttcagccaaatgtttatttcacacaaaacggatgtaacatttcatgtgatcgtgcaccactggaacaaaaccaaaatgtgaccataactgtttaggcttctgtgtgtttgtaatatgctctaataatctgagtagaaatgcgtaatttcaattactgtataaagtttatgtttttttaagtgtgcagaatctgagagcaatggtttttacttctctgtgttaattgtaatattgactctattttgtaacttaagtttctgacctgtcgtacatttgtttgagtcgtttatgtactactgaactgtaccagttgcacatgcttgaactgtagtaatgttagcttgttctaaagctatccattgtgtcatatttactctaaaaattaaagagactctcaacata

SEQ ID NO: 308581 - DNA, 5135 bp, Homo sapiens
  misc_feature (130)..(130): n is a, c, g, or t
  misc_feature (151)..(151): n is a, c, g, or t
  misc_feature (154)..(154): n is a, c, g, or t
  misc_feature (217)..(217): n is a, c, g, or t
  misc_feature (219)..(219): n is a, c, g, or t
  misc_feature (241)..(241): n is a, c, g, or t
  misc_feature (382)..(382): n is a, c, g, or t
cgagcgcggcgcccttgagctgcaccgcggcgcaggtttgcgagccgacttgtcagccggccaagaaaaggaagctccgtcccttcccgctcacccggcttccccaccccttgtactctaaactctgcanagggcgagcggcgcggccacngangcgccgaggaggagcgagccgccgccgggcagcggcgtgccctcgggggagagggcgccgganangaggcggcggcgcggcggcganggcgcggcgcgcgatggcagctgcttagcccggcgggcgcggagcagccccgagctgtggctggccaggcggtgcggctgggcgggggacgccgccgccgttgctgcccggcccggagagatgagcacggaggcggacganggcatcactttctctgtgccacccttcgccccctcgggcttctgcaccatccccgagggcggcatctgcaggaggggaggagcggcggcggtgggcgagggcgaggagcaccagctgccaccgccgccgccgggcagcttctggaacgtggagagcgccgctgcccctggcatcggttgtccggcggccacctcctcgagcagtgccacccgaggccggggcagctctgttggcgggggcagccgacggaccacggtggcatatgtgatcaacgaagcgagccaagggcaactggtggtggccgagagcgaggccctgcagagcttgcgggaggcgtgcgagacagtgggcgccaccctggaaaccctgcattttgggaaactcgactttggagaaaccaccgtgctggaccgcttttacaatgcagatattgcggtggtggagatgagcgatgccttccggcagccgtccttgttttaccaccttggggtgagagaaagtttcagcatggccaacaacatcatcctctactgtgatactaactcggactctctgcagtcactgaaggaaataatttgccagaagaatactatgtgcactgggaactacacctttgttccttacatgataactccacataacaaagtctactgctgtgacagcagcttcatgaaggggttgacagagctcatgcaaccgaacttcgagctgcttcttggacccatctgcttacctcttgtggatcgttttattcaacttttgaaggtggcacaagcaagttctagccagtacttccgggaatctatactcaatgacatcaggaaagctcgtaatttatacactggtaaagaattggcagctgagttggcaagaattcggcagcgagtagataatatcgaagtcttgacagcagatattgtcataaatctgttactttcctacagagatatccaggactatgattctattgtgaagctggtagagactttagaaaaactgccaacctttgatttggcctcccatcaccatgtgaagtttcattatgcatttgcactgaataggagaaatctccctggtgacagagcaaaagctcttgatattatgattcccatggtgcaaagcgaaggacaagttgcttcagatatgtattgcctagttggtcgaatctacaaagatatgtttttggactctaatttcacggacactgaaagcagagaccatggagcttcttggttcaaaaaggcatttgaatctgagccaacactacagtcaggaattaattatgcggtcctcctcctggcagctggacaccagtttgaatcttcctttgagctccggaaagttggggtgaagctaagtagtcttcttggtaaaaagggaaacttggaaaaactccagagctactgggaagttggattttttctgggggccagcgtcctagccaatgaccacatgagagtcattcaagcatctgaaaagctttttaaactgaagacaccagcatggtacctcaagtctattgtagagacaattttaatatataagcattttgtgaaactgaccacagaacagcctgtggccaagcaagaacttgtggacttttggatggatttcctggtcgaggccacaaagacagatgttactgtggttaggtttccagtattaatattagaaccaaccaaaatctatcaaccttcttatttgtctatcaacaatgaagttgaggaaaagacaatctctatttggcacgtgcttcctgatgacaagaaaggtatacatgagtggaattttagtgcctcttctgtcaggggagtgagtatttctaaatttgaagaaagatgctgctttctttatgtgcttcacaattctgatgatttccaaatctatttctgtacagaacttcattgtaaaaagttttttgagatggtgaacaccattaccgaagagaaggggagaagcacagaggaaggagactgtgaaagtgacttgctggagtatgactatgaatatgatgaaaatggtgacagagtcgttttaggaaaaggcacttatgggatagtctacgcaggtcgggacttgagcaaccaagtcagaattgctattaaggaaatcccagagagagacagcagatactctcagcccctgcatgaagaaatagcattgcataaacacctgaagcacaaaaatattgtccagtatctgggctctttcagtgagaatggtttcattaaaatcttcatggagcaggtccctggaggaagtctttctgctctccttcgttccaaatggggtccattaaaagacaatgagcaaacaattggcttttatacaaagcaaatactggaaggattaaaatatctccatgacaatcagatagttcaccgggacataaagggtgacaatgtgttgattaatacctacagtggtgttctcaagatctctgacttcggaacatcaaagaggcttgctggcataaacccctgtactgaaacttttactggtaccctccagtatatggcaccagaaataatagataaaggaccaagaggctacggaaaagcagcagacatctggtctctgggctgtacaatcattgaaatggccacaggaaaacccccattttatgaactgggagaaccacaagcagctatgttcaaggtgggaatgtttaaagtccaccctgagatcccagagtccatgtctgcagaggccaaggcattcatactgaaatgttttgaaccagatcctgacaagagagcctgtgctaacgacttgcttgttgatgagtttttaaaagtttcaagcaaaaagaaaaagacacaacctaagctttcagctctttcagctggatcaaatgaatatctcaggagtatatccttgccggtacctgtgctggtggaggacaccagcagcagcagtgagtacggctcagtttcacccgacacggagttgaaagtggaccccttctctttccattccagatgagaattttgaagatcacagtgctcctccttcccctgaagaaaaagattctggattcttcatgctgaggaaggacagtgagaggcgagctacccttcacaggatcctgacggaagaccaagacaaaattgtgagaaacctaatggaatctttagctcagggggctgaagaaccgaaactaaaatgggaacacatcacaaccctcattgcaagcctcagagaatttgtgagatccactgaccgaaaaatcatagccaccacactgtcaaagctgaaactggagctggacttcgacagccatggcattagccaagtccaggtggtactctttggttttcaagatgctgtcaataaagttcttcggaatcataacatcaagccgcactggatgtttgccttagacagtatcattcggaaggcggtacagacagccattaccatcctggttccagaactaaggccacatttcagccttgcatctgagagtgatactgctgatcaagaagacttggatgtagaagatgaccatgaggaacagccttcaaatcaaactgtccgaagacctcaggctgtcattgaagatgctgtggctacctcaggcgtgagcacgctcagttctactgtgtctcatgattcccagagtgctcaccggtcactgaatgtacagcttggaaggatgaaaatagaaaccaatagattactggaagaattggttcggaaagagaaagaattacaagcactccttcatcgagctattgaagaaaaagaccaagaaattaaacacctgaagcttaagtcccaacccatagaaattcctgaattgcctgtatttcatctaaattcttctggcacaaatactgaagattctgaacttaccgactggctgagagtgaatggagctgatgaagacactataagccggtttttggctgaagattatacactattggatgttctctactatgttacacgtgatgacttaaaatgcttgagactaaggggagggatgctgtgcacactgtggaaggctatcattgactttcgaaacaaacagacttgactgttgctcaatctaatcttcgatggaaattctaaaaattaatacagagctgatcttcttgggggtgggaaaatcgaagggagaggagaaaggcgctgcactttaaatccagtatttgtttactcatgttaaaaaaaaaaaaaacagacaaaacacactgaaatttcctaactacatctatttctataatttttaaggactcttcataaggactcttaaaataatcctgaacattagaaccctaatgttcaggaagattttaatctaagcatttttatggaaatatttttaatgcagcagctattgcacttcagccaaatgtttatttcacacaaaacggatgtaacatttcatgtgatcgtgcaccactggaacaaaaccaaaatgtgaccataactgtttaggcttctgtgtgtttgtaatatgctctaataatctgagtagaaatgcgtaatttcaattactgtataaagtttatgtttttttaagtgtgcagaatctgagagcaatggtttttacttctctgtgttaattgtaatattgactctattttgtaacttaagtttctgacctgtcgtacatttgtttgagtcgtttatgtactactgaactgtaccagttgcacatgcttgaactgtagtaatgttagcttgttctaaagctatccattgtgtcatatttactctaaaaattaaagagactctcaacata

SEQ ID NO: 308582 - DNA, 2170 bp, Homo sapiens
cagcccctcttggttgcaaggaactgacacaccgttaggacaactgaagtaccaaggacatgttataggtagacacgcatagcaataagggaagtagactcttaaggaattccaatcatagtgcctagccgagtctcacagacactgaaaacagaatatgagcctgaggaacttcaagtccccggagtttgcacatcttttctctggcttggttgctgttgacctgcttggtgtgcatttctgttcttgtccacttctcctctccctccctgatatggtttggctgtgtccccactcaaatctcatcttgaattgtaactcccacaattcccatgtgtcgtgggaggaacctggtgggaggtgattgaattatgggggcaggtctttcctgtgctgttcttgtgataatgaatgagtctcacaagatttgatgctttcaaaaaatgggagtttgcctgcacaagctctctctttttgcctgctgccatccaagtaagatgtgacttgctcctccttgccttctgccgtgattgtgaggcttccccagccacgtggaactggggctgaagaaccgaaactaaaatgggaacacatcacaaccctcattgcaagcctcagagaatttgtgagatccactgaccgaaaaatcatagccaccacactgtcaaagctgaaactggagctggacttcgacagccatggcattagccaagtccaggtggtactctttggttttcaagatgctgtcaataaagttcttcggaatcataacatcaagccgcactggatgtttgccttagacagtatcattcggaaggcggtacagacagccattaccatcctggttccagaactaaggccacatttcagccttgcatctgagagtgatactgctgatcaagaagacttggatgtagaagatgaccatgaggaacagccttcaaatcaaactgtccgaagacctcaggctgtcattgaagatgctgtggctacctcaggcgtgagcacgctcagttctactgtgtctcatgattcccagagtgctcaccggtcactgaatgtacagcttggaaggatgaaaatagaaaccaatagattactggaagaattggttcggaaagagaaagaattacaagcactccttcatcgagctattgaagaaaaagaccaagaaattaaacacctgaagcttaagtcccaacccatagaaattcctgaattgcctgtatttcatctaaattcttctggcacaaatactgaagattctgaacttaccgactggctgagagtgaatggagctgatgaagacactataagccggtttttggctgaagattatacactattggatgttctctactatgttacacgtgatgacttaaaatgcttgagactaaggggagggatgctgtgcacactgtggaaggctatcattgactttcgaaacaaacagacttgactgttgctcaatctaatcttcgatggaaattctaaaaattaatacagagctgatcttcttgggggtgggaaaatcgaagggagaggagaaaggcgctgcactttaaatccagtatttgtttactcatgttaaaaaaaaaaaaaacagacaaaacacactgaaatttcctaactacatctatttctataatttttaaggactcttcataaggactcttaaaataatcctgaacattagaaccctaatgttcaggaagattttaatctaagcatttttatggaaatatttttaatgcagcagctattgcacttcagccaaatgtttatttcacacaaaacggatgtaacatttcatgtgatcgtgcaccactggaacaaaaccaaaatgtgaccataactgtttaggcttctgtgtgtttgtaatatgctctaataatctgagtagaaatgcgtaatttcaattactgtataaagtttatgtttttttaagtgtgcagaatctgagagcaatggtttttacttctctgtgttaattgtaatattgactctattttgtaacttaagtttctgacctgtcgtacatttgtttgagtcgtttatgtactactgaactgtaccagttgcacatgcttgaactgtagtaatgttagcttgttctaaagctatccattgtgtcatatttactctaaaaattaaagagactctcaacata

SEQ ID NO: 308583 - DNA, 3972 bp, Homo sapiens
  misc_feature (130)..(130): n is a, c, g, or t
  misc_feature (151)..(151): n is a, c, g, or t
  misc_feature (154)..(154): n is a, c, g, or t
  misc_feature (217)..(217): n is a, c, g, or t
  misc_feature (219)..(219): n is a, c, g, or t
  misc_feature (241)..(241): n is a, c, g, or t
  misc_feature (382)..(382): n is a, c, g, or t
cgagcgcggcgcccttgagctgcaccgcggcgcaggtttgcgagccgacttgtcagccggccaagaaaaggaagctccgtcccttcccgctcacccggcttccccaccccttgtactctaaactctgcanagggcgagcggcgcggccacngangcgccgaggaggagcgagccgccgccgggcagcggcgtgccctcgggggagagggcgccgganangaggcggcggcgcggcggcganggcgcggcgcgcgatggcagctgcttagcccggcgggcgcggagcagccccgagctgtggctggccaggcggtgcggctgggcgggggacgccgccgccgttgctgcccggcccggagagatgagcacggaggcggacganggcatcactttctctgtgccacccttcgccccctcgggcttctgcaccatccccgagggcggcatctgcaggaggggaggagcggcggcggtgggcgagggcgaggagcaccagctgccaccgccgccgccgggcagcttctggaacgtggagagcgccgctgcccctggcatcggttgtccggcggccacctcctcgagcagtgccacccgaggccggggcagctctgttggcgggggcagccgacggaccacggtggcatatgtgatcaacgaagcgagccaagggcaactggtggtggccgagagcgaggccctgcagagcttgcgggaggcgtgcgagacagtgggcgccaccctggaaaccctgcattttgggaaactcgactttggagaaaccaccgtgctggaccgcttttacaatgcagatattgcggtggtggagatgagcgatgccttccggcagccgtccttgttttaccaccttggggtgagagaaagtttcagcatggccaacaacatcatcctctactgtgatactaactcggactctctgcagtcactgaaggaaataatttgccagaagaatactatgtgcactgggaactacacctttgttccttacatgataactccacataacaaagtctactgctgtgacagcagcttcatgaaggggttgacagagctcatgcaaccgaacttcgagctgcttcttggacccatctgcttacctcttgtggatcgttttattcaacttttgaaggtggcacaagcaagttctagccagtacttccgggaatctatactcaatgacatcaggaaagctcgtaatttatacactggtaaagaattggcagctgagttggcaagaattcggcagcgagtagataatatcgaagtcttgacagcagatattgtcataaatctgttactttcctacagagatatccaggactatgattctattgtgaagctggtagagactttagaaaaactgccaacctttgatttggcctcccatcaccatgtgaagtttcattatgcatttgcactgaataggagaaatctccctggtgacagagcaaaagctcttgatattatgattcccatggtgcaaagcgaaggacaagttgcttcagatatgtattgcctagttggtcgaatctacaaagatatgtttttggactctaatttcacggacactgaaagcagagaccatggagcttcttggttcaaaaaggcatttgaatctgagccaacactacagtcaggaattaattatgcggtcctcctcctggcagctggacaccagtttgaatcttcctttgagctccggaaagttggggtgaagctaagtagtcttcttggtaaaaagggaaacttggaaaaactccagagctactgggaagttggattttttctgggggccagcgtcctagccaatgaccacatgagagtcattcaagcatctgaaaagctttttaaactgaagacaccagcatggtacctcaagtctattgtagagacaattttaatatataagcattttgtgaaactgaccacagaacagcctgtggccaagcaagaacttgtggacttttggatggatttcctggtcgaggccacaaagacagatgttactgtggttaggtttccagtattaatattagaaccaaccaaaatctatcaaccttcttatttgtctatcaacaatgaagttgaggaaaagacaatctctatttggcacgtgcttcctgatgacaagaaaggtatacatgagtggaattttagtgcctcttctgtcaggggagtgagtatttctaaatttgaagaaagatgctgctttctttatgtgcttcacaattctgatgatttccaaatctatttctgtacagaacttcattgtaaaaagttttttgagatggtgaacaccattaccgaagagaaggggagaagcacagaggaaggagactgtgaaagtgacttgctggagtatgactatgaatatgatgaaaatggtgacagagtcgttttaggaaaaggcacttatgggatagtctacgcaggtcgggacttgagcaaccaagtcagaattgctattaaggaaatcccagagagagacagcagatactctcagcccctgcatgaagaaatagcattgcataaacacctgaagcacaaaaatattgtccagtatctgggctctttcagtgagaatggtttcattaaaatcttcatggagcaggtccctggaggaagtctttctgctctccttcgttccaaatggggtccattaaaagacaatgagcaaacaattggcttttatacaaagcaaatactggaaggattaaaatatctccatgacaatcagatagttcaccgggacataaaggtaccctccagtatatggcaccagaaataatagataaaggaccaagaggctacggaaaagcagcagacatctggtctctgggctgtacaatcattgaaatggccacaggaaaacccccattattactggaagaattggttcggaaagagaaagaattacaagcactccttcatcgagctattgaagaaaaagaccaagaaattaaacacctgaagcttaagtcccaacccatagaaattcctgaattgcctgtatttcatctaaattcttctggcacaaatactgaagattctgaacttaccgactggctgagagtgaatggagctgatgaagacactataagccggtttttggctgaagattatacactattggatgttctctactatgttacacgtgatgacttaaaatgcttgagactaaggggagggatgctgtgcacactgtggaaggctatcattgactttcgaaacaaacagacttgactgttgctcaatctaatcttcgatggaaattctaaaaattaatacagagctgatcttcttgggggtgggaaaatcgaagggagaggagaaaggcgctgcactttaaatccagtatttgtttactcatgttaaaaaaaaaaaaaacagacaaaacacactgaaatttcctaactacatctatttctataatttttaaggactcttcataaggactcttaaaataatcctgaacattagaaccctaatgttcaggaagattttaatctaagcatttttatggaaatatttttaatgcagcagctattgcacttcagccaaatgtttatttcacacaaaacggatgtaacatttcatgtgatcgtgcaccactggaacaaaaccaaaatgtgaccataactgtttaggcttctgtgtgtttgtaatatgctctaataatctgagtagaaatgcgtaatttcaattactgtataaagtttatgtttttttaagtgtgcagaatctgagagcaatggtttttacttctctgtgttaattgtaatattgactctattttgtaacttaagtttctgacctgtcgtacatttgtttgagtcgtttatgtactactgaactgtaccagttgcacatgcttgaactgtagtaatgttagcttgttctaaagctatccattgtgtcatatttactctaaaaattaaagagactctcaacata

SEQ ID NO: 308584 - DNA, 1328 bp, Homo sapiens
tggagtctcactctgtcacccaggctggagtgcagtggcgtgatctcagctcactgcaagctccgcctcccaggttcacgccgttctcctgcctcagcctcccaagtagctgggactataggcgcccaccaccacgcccagctaatttttttgtatttttagtagagacggggtttcactgtgttagccaggatggtctcgatctcctgaccacgtgatctgcctgcctcggccttctaaagtgctgggattacaggcatgcgccaccgcgcccagcccaagcataaaactattatacccaccattataaagacaaatttcaaaaatgctgaaactctaaaatgatgttttgggacatagcagtttgtgggagtgaaaagggaaggaatggagggaagatgagaaaaaatatacaaaaagaatacataataactgatcagactttgggatcttcttctgaccagagcagatgaaagctaagaagtcacttttctatttcaagggcaatgtttcaaatgaaatgttcgtttcaccatgttcttgtgtctttaaacaggggagggatgctgtgcacactgtggaaggctatcattgactttcgaaacaaacagacttgactgttgctcaatctaatcttcgatggaaattctaaaaattaatacagagctgatcttcttgggggtgggaaaatcgaagggagaggagaaaggcgctgcactttaaatccagtatttgtttactcatgttaaaaaaaaaaaaaacagacaaaacacactgaaatttcctaactacatctatttctataatttttaaggactcttcataaggactcttaaaataatcctgaacattagaaccctaatgttcaggaagattttaatctaagcatttttatggaaatatttttaatgcagcagctattgcacttcagccaaatgtttatttcacacaaaacggatgtaacatttcatgtgatcgtgcaccactggaacaaaaccaaaatgtgaccataactgtttaggcttctgtgtgtttgtaatatgctctaataatctgagtagaaatgcgtaatttcaattactgtataaagtttatgtttttttaagtgtgcagaatctgagagcaatggtttttacttctctgtgttaattgtaatattgactctattttgtaacttaagtttctgacctgtcgtacatttgtttgagtcgtttatgtactactgaactgtaccagttgcacatgcttgaactgtagtaatgttagcttgttctaaagctatccattgtgtcatatttactctaaaaattaaagagactctcaacata

SEQ ID NO: 308585 - DNA, 1848 bp, Homo sapiens
  misc_feature (130)..(130): n is a, c, g, or t
  misc_feature (151)..(151): n is a, c, g, or t
  misc_feature (154)..(154): n is a, c, g, or t
  misc_feature (217)..(217): n is a, c, g, or t
  misc_feature (219)..(219): n is a, c, g, or t
  misc_feature (241)..(241): n is a, c, g, or t
  misc_feature (382)..(382): n is a, c, g, or t
cgagcgcggcgcccttgagctgcaccgcggcgcaggtttgcgagccgacttgtcagccggccaagaaaaggaagctccgtcccttcccgctcacccggcttccccaccccttgtactctaaactctgcanagggcgagcggcgcggccacngangcgccgaggaggagcgagccgccgccgggcagcggcgtgccctcgggggagagggcgccgganangaggcggcggcgcggcggcganggcgcggcgcgcgatggcagctgcttagcccggcgggcgcggagcagccccgagctgtggctggccaggcggtgcggctgggcgggggacgccgccgccgttgctgcccggcccggagagatgagcacggaggcggacganggcatcactttctctgtgccacccttcgccccctcgggcttctgcaccatccccgagggcggcatctgcaggaggggaggagcggcggcggtgggcgagggcgaggagcaccagctgccaccgccgccgccgggcagcttctggaacgtggagagcgccgctgcccctggcatcggttgtccggcggccacctcctcgagcagtgccacccgaggccggggcagctctgttggcgggggcagccgacggaccacggtggcatatgtgatcaacgaagcgagccaagggcaactggtggtggccgagagcgaggccctgcagagcttgcgggaggcgtgcgagacagtgggcgccaccctggaaaccctgcattttgggaaactcgactttggagaaaccaccgtgctggaccgcttttacaatgcagatattgcggtggtggagatgagcgatgccttccggcagccgtccttgttttaccaccttggggtgagagaaagtttcagcatggccaacaacatcatcctctactgtgatactaactcggactctctgcagtcactgaaggaaataatttgccagaagaatactatgtgcactgggaactacacctttgttccttacatgataactccacataacaaagtctactgctgtgacagcagcttcatgaaggggttgacagagctcatgcaaccgaacttcgagctgcttcttggacccatctgcttacctcttgtggatcgttttattcaacttttgaaggtggcacaagcaagttctagccagtacttccgggaatctatactcaatgacatcaggaaagctcgtaatttatacactggtaaagaattggcagctgagttggcaagaattcggcagcgagtagataatatcgaagtcttgacagcagatattgtcataaatctgttactttcctacagagatatccaggactatgattctattgtgaagctggtagagactttagaaaaactgccaacctttgatttggcctcccatcaccatgtgaagtttcattatgcatttgcactgaataggagaaatctccctggtgacagagcaaaagctcttgatattatgattcccatggtgcaaagcgaaggacaagttgcttcagatatgtattgcctagttggtcgaatctacaaagatatgtttttggactctaatttcacggacactgaaagcagagaccatggagcttcttggttcaaaaaggcatttgaatctgagccaacactacagtcaggaattaattatgcggtcctcctcctggcagctggacaccagtttgaatcttcctttgagctccggaaagttggtaattacaacttgatattttacatggaaatcaagaaactggacccaacttggtgcaaagaaaaagaatcatgaatagataaatcttttgctttctgtcttttcatacttcccaaagagaa

SEQ ID NO: 308586 - DNA, 1785 bp, Homo sapiens
  misc_feature (130)..(130): n is a, c, g, or t
  misc_feature (151)..(151): n is a, c, g, or t
  misc_feature (154)..(154): n is a, c, g, or t
  misc_feature (217)..(217): n is a, c, g, or t
  misc_feature (219)..(219): n is a, c, g, or t
  misc_feature (241)..(241): n is a, c, g, or t
  misc_feature (382)..(382): n is a, c, g, or t
cgagcgcggcgcccttgagctgcaccgcggcgcaggtttgcgagccgacttgtcagccggccaagaaaaggaagctccgtcccttcccgctcacccggcttccccaccccttgtactctaaactctgcanagggcgagcggcgcggccacngangcgccgaggaggagcgagccgccgccgggcagcggcgtgccctcgggggagagggcgccgganangaggcggcggcgcggcggcganggcgcggcgcgcgatggcagctgcttagcccggcgggcgcggagcagccccgagctgtggctggccaggcggtgcggctgggcgggggacgccgccgccgttgctgcccggcccggagagatgagcacggaggcggacganggcatcactttctctgtgccacccttcgccccctcgggcttctgcaccatccccgagggcggcatctgcaggaggggaggagcggcggcggtgggcgagggcgaggagcaccagctgccaccgccgccgccgggcagcttctggaacgtggagagcgccgctgcccctggcatcggttgtccggcggccacctcctcgagcagtgccacccgaggccggggcagctctgttggcgggggcagccgacggaccacggtggcatatgtgatcaacgaagcgagccaagggcaactggtggtggccgagagcgaggccctgcagagcttgcgggaggcgtgcgagacagtgggcgccaccctggaaaccctgcattttgggaaactcgactttggagaaaccaccgtgctggaccgcttttacaatgcagatattgcggtggtggagatgagcgatgccttccggcagccgtccttgttttaccaccttggggtgagagaaagtttcagcatggccaacaacatcatcctctactgtgatactaactcggactctctgcagtcactgaaggaaataatttgccagaagaatactatgtgcactgggaactacacctttgttccttacatgataactccacataacaaagtctactgctgtgacagcagcttcatgaaggggttgacagagctcatgcaaccgaacttcgagctgcttcttggacccatctgcttacctcttgtggatcgttttattcaacttttgaaggtggcacaagcaagttctagccagtacttccgggaatctatactcaatgacatcaggaaagctcgtaatttatacactggtaaagaattggcagctgagttggcaagaattcggcagcgagtagataatatcgaagtcttgacagcagatattgtcataaatctgttactttcctacagagatatccaggactatgattctattgtgaagctggtagagactttagaaaaactgccaacctttgatttggcctcccatcaccatgtgaagtttcattatgcatttgcactgaataggagaaatctccctggtgacagagcaaaagctcttgatattatgattcccatggtgcaaagcgaaggacaagttgcttcagatatgtattgcctagttggtcgaatctacaaagatatgtttttggactctaatttcacggacactgaaagcagagaccatggagcttcttgatattgcggtggtggagatgaacgatgccttccggcagccgtccttgttttaccaccttggggtgagagaaagtttcagcatggccaacaacatcatcctctactgtgatactaactcggactctctgcagtcactgaagattgtaactttttagccggtaaggatcgcta

SEQ ID NO: 308587 - DNA, 627 bp, Homo sapiens
ttttaattatagtcaaggtttacattatgaatagagtttgtgctttattaaagttatataaaacatcttttgtgcatattctactttctctacagtttttggctgaagattatacactattggatgttctctactatgttacacgtgatgacttaaaatgcttgagactaaggtaccacttttctttctgttgtcactatggaaagagcaccaggcaaatatcaaaaagtctgagtatcttcccaggctgggtctctaattagctttgtagttctggacagagctctctagctcttagctgctctgagtaaactgagttagttggacaatgatatttttgagggctctaataaccaatatttctatattagtaagtgaaaatcaactggaagaatttttttgaataagatgcagactaagtccatgcagatattctgaagctgccttaaacaaatgctttaattgagttcatgatggtgttatactcaataaatatttggaggaggtgctgacttgccctccaaaaacctggtataatctgatataatttcttgttaattaaggccaagcatataactttttttttttttttcgggatggagtctcactctgtcacccaggctggag

SEQ ID NO: 308588 - DNA, 2836 bp, Homo sapiens
cacttcctcctctgccgtctcccagatcagtacacaaaggctgctgctgccgccagaggaaggactgctctgcacgcacctatgtggaaactaaagcccagagagaaagtctgacttgccccacagccagtgagtgactgcagcagcaccagaatctggtctgtttcctgtttggctcttctaccactacggcttgggatctcgggcatggtggctttgccaatggtccttgttttgctgctggtcctgagcagaggtgagagtgaattggacgccaagatcccatccacaggggatgccacagaatggcggaatcctcacctgtccatgctggggtcctgccagccagccccctcctgccagaagtgcatcctctcacaccccagctgtgcatggtgcaagcaactgaacttcaccgcgtcgggagaggcggaggcgcggcgctgcgcccgacgagaggagctgctggctcgaggctgcccgctggaggagctggaggagccccgcggccagcaggaggtgctgcaggaccagccgctcagccagggcgcccgcggagagggtgccacccagctggcgccgcagcgggtccgggtcacgctgcggcctggggagccccagcagctccaggtccgcttccttcgtgctgagggatacccggtggacctgtactaccttatggacctgagctactccatgaaggacgacctggaacgcgtgcgccagctcgggcacgctctgctggtccggctgcaggaagtcacccattctgtgcgcattggttttggttcctttgtggacaaaacggtgctgccctttgtgagcacagtaccctccaaactgcgccacccctgccccacccggctggagcgctgccagtcaccattcagctttcaccatgtgctgtccctgacgggggacgcacaagccttcgagcgggaggtggggcgccagagtgtgtccggcaatctggactcgcctgaaggtggcttcgatgccattctgcaggctgcactctgccaggagcagattggctggagaaatgtgtcccggctgctggtgttcacttcagacgacacattccatacagctggggacgggaagttgggcggcattttcatgcccagtgatgggcactgccacttggacagcaatggcctctacagtcgcagcacagagtttgactacccttctgtgggtcaggtagcccaggccctctctgcagcaaatatccagcccatctttgctgtcaccagtgccgcactgcctgtctaccaggagctgagtaaactgattcctaagtctgcagttggggagctgagtgaggactccagcaacgtggtacagctcatcatggatgcttataatagcctgtcttccaccgtgacccttgaacactcttcactccctcctggggtccacatttcttacgaatcccagtgtgagggtcctgagaagagggagggtaaggctgaggatcgaggacagtgcaaccacgtccgaatcaaccagacggtgactttctgggtttctctccaagccacccactgcctcccagagccccatctcctgaggctccgggcccttggcttctcagaggagctgattgtggagttgcacacgctgtgtgactgtaattgcagtgacacccagccccaggctccccactgcagtgatggccagggacacctacaatgtggtgtatgcagctgtgcccctggccgcctaggtcggctctgtgagtgctctgtggcagagctgtcctccccagacctggaatctgggtgccgggctcccaatggcacagggcccctgtgcagtggaaagggtcactgtcaatgtggacgctgcagctgcagtggacagagctctgggcatctgtgcgagtgtgacgatgccagctgtgagcgacatgagggcatcctctgcggaggctttggtcgctgccaatgtggagtatgtcactgtcatgccaaccgcacgggcagagcatgcgaatgcagtggggacatggacagttgcatcagtcccgagggagggctctgcagtgggcatggacgctgcaaatgcaaccgctgccagtgcttggacggctactatggtgctctatgcgaccaatgcccaggctgcaagacaccatgcgagagacaccgggactgtgcagagtgtggggccttcaggactggcccactggccaccaactgcagtacagcttgtgcccataccaatgtgaccctggccttggcccctatcttggatgatggctggtgcaaagagcggaccctggacaaccagctgttcttcttcttggtggaggatgacgccagaggcacggtcgtgctcagagtgagaccccaagaaaagggagcagaccacacgcaggccattgtgctgggctgcgtagggggcatcgtggcagtggggctggggctggtcctggcttaccggctctcggtggaaatctatgaccgccgggaatacagtcgctttgagaaggagcagcaacaactcaactggaagcaggacagtaatcctctctacaaaagtgccatcacgaccaccatcaatcctcgctttcaagaggcagacagtcccactctctgaaggagggagggacacttacccaaggctcttctccttggaggacagtgggaactggagggtgagaggaagggtgggtctgtaagaccttggtaggggactaattcactggcgaggtgcggccaccaccctacttcattttcagagtgacacccaagagggctgcttcccatgcctgcaaccttgcatccatctgggctaccccacccaagtatacaataaagtcttacctcag

SEQ ID NO: 308589 - DNA, 585 bp, Homo sapiens
agtttttttcaaatttcccaagataaactctgtaatgaatctgccctttagacctggcatgcacccaggttatgtgtcctgatgtggggcttcacaaacatggtctctgtacatttacagcacctggccagcctgtgaccctcagtggcccttgctggcagctgcactgaaatgctgtattagaggcctctggatcctgtatgttctatgcaaggttctcacgggtcctccctccagaaatgcctcgactgggcagaatggaaggagccccaggtggcagagggcagggtgctggcagaattgggaacacctggagaggacataaggtggggttggagtccttttctgccttcacgtggttatccactcgctctcttcccatagagcctgtcttccaccgtgacccttgaacactcttcactccctcctggggtccacatttcttacgaatcccagtgtgagggtcctgagaagagggagggtaaggctgaggatcgaggacagtgcaaccacgtccgaatcaaccagacggtgagagccagcaagcacaggcagaaggcgggcagggggaggtgggagtgggaa

SEQ ID NO: 308590 - DNA, 2812 bp, Homo sapiens
aatggcaggctggtccggcccgagatttaggattgaaggactgctctgcacgcacctatgtggaaactaaagcccagagagaaagtctgacttgccccacagccagtgagtgactgcagcagcaccagaatctggtctgtttcctgtttggctcttctaccactacggcttgggatctcgggcatggtggctttgccaatggtccttgttttgctgctggtcctgagcagaggtgagagtgaattggacgccaagatcccatccacaggggatgccacagaatggcggaatcctcacctgtccatgctggggtcctgccagccagccccctcctgccagaagtgcatcctctcacaccccagctgtgcatggtgcaagcaactgaacttcaccgcgtcgggagaggcggaggcgcggcgctgcgcccgacgagaggagctgctggctcgaggctgcccgctggaggagctggaggagccccgcggccagcaggaggtgctgcaggaccagccgctcagccagggcgcccgcggagagggtgccacccagctggcgccgcagcgggtccgggtcacgctgcggcctggggagccccagcagctccaggtccgcttccttcgtgctgagggatacccggtggacctgtactaccttatggacctgagctactccatgaaggacgacctggaacgcgtgcgccagctcgggcacgctctgctggtccggctgcaggaagtcacccattctgtgcgcattggttttggttcctttgtggacaaaacggtgctgccctttgtgagcacagtaccctccaaactgcgccacccctgccccacccggctggagcgctgccagtcaccattcagctttcaccatgtgctgtccctgacgggggacgcacaagccttcgagcgggaggtggggcgccagagtgtgtccggcaatctggactcgcctgaaggtggcttcgatgccattctgcaggctgcactctgccaggagcagattggctggagaaatgtgtcccggctgctggtgttcacttcagacgacacattccatacagctggggacgggaagttgggcggcattttcatgcccagtgatgggcactgccacttggacagcaatggcctctacagtcgcagcacagagtttgactacccttctgtgggtcaggtagcccaggccctctctgcagcaaatatccagcccatctttgctgtcaccagtgccgcactgcctgtctaccaggagctgagtaaactgattcctaagtctgcagttggggagctgagtgaggactccagcaacgtggtacagctcatcatggatgcttataatagcctgtcttccaccgtgacccttgaacactcttcactccctcctggggtccacatttcttacgaatcccagtgtgagggtcctgagaagagggagggtaaggctgaggatcgaggacagtgcaaccacgtccgaatcaaccagacggtgactttctgggtttctctccaagccacccactgcctcccagagccccatctcctgaggctccgggcccttggcttctcagaggagctgattgtggagttgcacacgctgtgtgactgtaattgcagtgacacccagccccaggctccccactgcagtgatggccagggacacctacaatgtggtgtatgcagctgtgcccctggccgcctaggtcggctctgtgagtgctctgtggcagagctgtcctccccagacctggaatctgggtgccgggctcccaatggcacagggcccctgtgcagtggaaagggtcactgtcaatgtggacgctgcagctgcagtggacagagctctgggcatctgtgcgagtgtgacgatgccagctgtgagcgacatgagggcatcctctgcggaggctttggtcgctgccaatgtggagtatgtcactgtcatgccaaccgcacgggcagagcatgcgaatgcagtggggacatggacagttgcatcagtcccgagggagggctctgcagtgggcatggacgctgcaaatgcaaccgctgccagtgcttggacggctactatggtgctctatgcgaccaatgcccaggctgcaagacaccatgcgagagacaccgggactgtgcagagtgtggggccttcaggactggcccactggccaccaactgcagtacagcttgtgcccataccaatgtgaccctggccttggcccctatcttggatgatggctggtgcaaagagcggaccctggacaaccagctgttcttcttcttggtggaggatgacgccagaggcacggtcgtgctcagagtgagaccccaagaaaagggagcagaccacacgcaggccattgtgctgggctgcgtagggggcatcgtggcagtggggctggggctggtcctggcttaccggctctcggtggaaatctatgaccgccgggaatacagtcgctttgagaaggagcagcaacaactcaactggaagcaggacagtaatcctctctacaaaagtgccatcacgaccaccatcaatcctcgctttcaagaggcagacagtcccactctctgaaggagggagggacacttacccaaggctcttctccttggaggacagtgggaactggagggtgagaggaagggtgggtctgtaagaccttggtaggggactaattcactggcgaggtgcggccaccaccctacttcattttcagagtgacacccaagagggctgcttcccatgcctgcaaccttgcatccatctgggctaccccacccaagtatacaataaagtcttacctcag

SEQ ID NO: 308591 - DNA, 2766 bp, Homo sapiens
aatggcaggctggtccggcccgagatttaggattgaaggactgctctgcacgcacctatgtggaaactaaagcccagagagaaagtctgacttgccccacagccagtgagtgactgcagcagcaccagaatctgggcatggtggctttgccaatggtccttgttttgctgctggtcctgagcagaggtgagagtgaattggacgccaagatcccatccacaggggatgccacagaatggcggaatcctcacctgtccatgctggggtcctgccagccagccccctcctgccagaagtgcatcctctcacaccccagctgtgcatggtgcaagcaactgaacttcaccgcgtcgggagaggcggaggcgcggcgctgcgcccgacgagaggagctgctggctcgaggctgcccgctggaggagctggaggagccccgcggccagcaggaggtgctgcaggaccagccgctcagccagggcgcccgcggagagggtgccacccagctggcgccgcagcgggtccgggtcacgctgcggcctggggagccccagcagctccaggtccgcttccttcgtgctgagggatacccggtggacctgtactaccttatggacctgagctactccatgaaggacgacctggaacgcgtgcgccagctcgggcacgctctgctggtccggctgcaggaagtcacccattctgtgcgcattggttttggttcctttgtggacaaaacggtgctgccctttgtgagcacagtaccctccaaactgcgccacccctgccccacccggctggagcgctgccagtcaccattcagctttcaccatgtgctgtccctgacgggggacgcacaagccttcgagcgggaggtggggcgccagagtgtgtccggcaatctggactcgcctgaaggtggcttcgatgccattctgcaggctgcactctgccaggagcagattggctggagaaatgtgtcccggctgctggtgttcacttcagacgacacattccatacagctggggacgggaagttgggcggcattttcatgcccagtgatgggcactgccacttggacagcaatggcctctacagtcgcagcacagagtttgactacccttctgtgggtcaggtagcccaggccctctctgcagcaaatatccagcccatctttgctgtcaccagtgccgcactgcctgtctaccaggagctgagtaaactgattcctaagtctgcagttggggagctgagtgaggactccagcaacgtggtacagctcatcatggatgcttataatagcctgtcttccaccgtgacccttgaacactcttcactccctcctggggtccacatttcttacgaatcccagtgtgagggtcctgagaagagggagggtaaggctgaggatcgaggacagtgcaaccacgtccgaatcaaccagacggtgactttctgggtttctctccaagccacccactgcctcccagagccccatctcctgaggctccgggcccttggcttctcagaggagctgattgtggagttgcacacgctgtgtgactgtaattgcagtgacacccagccccaggctccccactgcagtgatggccagggacacctacaatgtggtgtatgcagctgtgcccctggccgcctaggtcggctctgtgagtgctctgtggcagagctgtcctccccagacctggaatctgggtgccgggctcccaatggcacagggcccctgtgcagtggaaagggtcactgtcaatgtggacgctgcagctgcagtggacagagctctgggcatctgtgcgagtgtgacgatgccagctgtgagcgacatgagggcatcctctgcggaggctttggtcgctgccaatgtggagtatgtcactgtcatgccaaccgcacgggcagagcatgcgaatgcagtggggacatggacagttgcatcagtcccgagggagggctctgcagtgggcatggacgctgcaaatgcaaccgctgccagtgcttggacggctactatggtgctctatgcgaccaatgcccaggctgcaagacaccatgcgagagacaccgggactgtgcagagtgtggggccttcaggactggcccactggccaccaactgcagtacagcttgtgcccataccaatgtgaccctggccttggcccctatcttggatgatggctggtgcaaagagcggaccctggacaaccagctgttcttcttcttggtggaggatgacgccagaggcacggtcgtgctcagagtgagaccccaagaaaagggagcagaccacacgcaggccattgtgctgggctgcgtagggggcatcgtggcagtggggctggggctggtcctggcttaccggctctcggtggaaatctatgaccgccgggaatacagtcgctttgagaaggagcagcaacaactcaactggaagcaggacagtaatcctctctacaaaagtgccatcacgaccaccatcaatcctcgctttcaagaggcagacagtcccactctctgaaggagggagggacacttacccaaggctcttctccttggaggacagtgggaactggagggtgagaggaagggtgggtctgtaagaccttggtaggggactaattcactggcgaggtgcggccaccaccctacttcattttcagagtgacacccaagagggctgcttcccatgcctgcaaccttgcatccatctgggctaccccacccaagtatacaataaagtcttacctcag

SEQ ID NO: 308592 - DNA, 3204 bp, Homo sapiens
cacttcctcctctgccgtctcccagatcagtacacaaaggctgctgctgccgccagaggaaggactgctctgcacgcacctatgtggaaactaaagcccagagagaaagtctgacttgccccacagccagtgagtgactgcagcagcaccagaatctggtctgtttcctgtttggctcttctaccactacggcttgggatctcgggcatggtggctttgccaatggtccttgttttgctgctggtcctgagcagaggtgagagtgaattggacgccaagatcccatccacaggggatgccacagaatggcggaatcctcacctgtccatgctggggtcctgccagccagccccctcctgccagaagtgcatcctctcacaccccagctgtgcatggtgcaagcaactgaacttcaccgcgtcgggagaggcggaggcgcggcgctgcgcccgacgagaggagctgctggctcgaggctgcccgctggaggagctggaggagccccgcggccagcaggaggtgctgcaggaccagccgctcagccagggcgcccgcggagagggtgccacccagctggcgccgcagcgggtccgggtcacgctgcggcctggggagccccagcagctccaggtccgcttccttcgtgctgagggatacccggtggacctgtactaccttatggacctgagctactccatgaaggacgacctggaacgcgtgcgccagctcgggcacgctctgctggtccggctgcaggaagtcacccattctgtgcgcattggttttggttcctttgtggacaaaacggtgctgccctttgtgagcacagtaccctccaaactgcgccacccctgccccacccggctggagcgctgccagtcaccattcagctttcaccatgtgctgtccctgacgggggacgcacaagccttcgagcgggaggtggggcgccagagtgtgtccggcaatctggactcgcctgaaggtggcttcgatgccattctgcaggctgcactctgccaggagcagattggctggagaaatgtgtcccggctgctggtgttcacttcagacgacacattccatacagctggggacgggaagttgggcggcattttcatgcccagtgatgggcactgccacttggacagcaatggcctctacagtcgcagcacagagtttgactacccttctgtgggtcaggtagcccaggccctctctgcagcaaatatccagcccatctttgctgtcaccagtgccgcactgcctgtctaccaggagctgagtaaactgattcctaagtctgcagttggggagctgagtgaggactccagcaacgtggtacagctcatcatggatgcttataatagcctgtcttccaccgtgacccttgaacactcttcactccctcctggggtccacatttcttacgaatcccagtgtgagggtcctgagaagagggagggtaaggctgaggatcgaggacagtgcaaccacgtccgaatcaaccagacggtgactttctgggtttctctccaagccacccactgcctcccagagccccatctcctgaggctccgggcccttggcttctcagaggagctgattgtggagttgcacacgctgtgtgactgtaattgcagtgacacccagccccaggctccccactgcagtgatggccagggacacctacaatgtggtgtatgcagctgtgcccctggccgcctaggtcggctctgtgagtgctctgtggcagagctgtcctccccagacctggaatctgggtgccgggctcccaatggcacagggcccctgtgcagtggaaagggtcactgtcaatgtggacgctgcagctgcagtggacagagctctgggcatctgtgcgagtgtgacgatgccagctgtgagcgacatgagggcatcctctgcggaggctttggtcgctgccaatgtggagtatgtcactgtcatgccaaccgcacgggcagagcatgcgaatgcagtggggacatggacagttgcatcagtcccgagggagggctctgcagtgggcatggacgctgcaaatgcaaccgctgccagtgcttggacggctactatggtgctctatgcgaccaatgcccaggctgcaagacaccatgcgagagacaccgggactgtgcagagtgtggggccttcaggactggcccactggccaccaactgcagtacagcttgtgcccataccaatgtgaccctggccttggcccctatcttggatgatggctggtgcaaagagcggaccctggacaaccagctgttcttcttcttggtggaggatgacgccagaggcacggtcgtgctcagagtgagaccccaagaaaagggagcagaccacacgcaggccattgtgctgggctgcgtagggggcatcgtggcagtggggctggggctggtcctggcttaccggctctcggtggaaatctatgaccgccgggaatacagtcgctttgagaaggagcagcaacaactcaactggaagcaggacagtaatcctctctacaaaagtgccatcacgaccaccatcaatcctcgctttcaagaggcagacagtcccactctctgaaggagggagggacacttacccaaggctcttctccttggaggacagtgggaactggagggtgagaggaagggtgggtctgtaagaccttggtaggggactaattcactggcgaggtgcggccaccaccctacttcattttcagagtgacacccaagagggctgcttcccatgcctgcaaccttgcatccatctgggctaccccacccaagtatacaataaagtcttacctcagaccacagctgtcactttgctttacctcatcaaggccaaagcagactgtttatagcctgggcctcgggaaagctcttgtccatcctcctcttgccacctgagggcagggagaggtgcccaagcgcgaatgtgcaggaaactcccggggtgcaccctgggacccaggaagccaggtctggaaagggcctatgaattctcaagtgctgcggatgcaggggggtcccaggtcagagacactgcatctgttggtgtctagcctccttccgtcctgctgcgtgtgctttttcgtcttgctcagaactgatgccctgtttttgctcctacttgcttgttcctctgtggagaaggggttttaaaatggcttatagg

SEQ ID NO: 308593 - DNA, 2220 bp, Homo sapiens
agtttttttcaaatttcccaagataaactctgtaatgaatctgccctttagacctggcatgcacccaggttatgtgtcctgatgtggggcttcacaaacatggtctctgtacatttacagcacctggccagcctgtgaccctcagtggcccttgctggcagctgcactgaaatgctgtattagaggcctctggatcctgtatgttctatgcaaggttctcacgggtcctccctccagaaatgcctcgactgggcagaatggaaggagccccaggtggcagagggcagggtgctggcagaattgggaacacctggagaggacataaggtggggttggagtccttttctgccttcacgtggttatccactcgctctcttcccatagagcctgtcttccaccgtgacccttgaacactcttcactccctcctggggtccacatttcttacgaatcccagtgtgagggtcctgagaagagggagggtaaggctgaggatcgaggacagtgcaaccacgtccgaatcaaccagacggtgactttctgggtttctctccaagccacccactgcctcccagagccccatctcctgaggctccgggcccttggcttctcagaggagctgattgtggagttgcacacgctgtgtgactgtaattgcagtgacacccagccccaggctccccactgcagtgatggccagggacacctacaatgtggtgtatgcagctgtgcccctggccgcctaggtcggctctgtgagtgctctgtggcagagctgtcctccccagacctggaatctgggtgccgggctcccaatggcacagggcccctgtgcagtggaaagggtcactgtcaatgtggacgctgcagctgcagtggacagagctctgggcatctgtgcgagtgtgacgatgccagctgtgagcgacatgagggcatcctctgcggaggctttggtcgctgccaatgtggagtatgtcactgtcatgccaaccgcacgggcagagcatgcgaatgcagtggggacatggacagttgcatcagtcccgagggagggctctgcagtgggcatggacgctgcaaatgcaaccgctgccagtgcttggacggctactatggtgctctatgcgaccaatgcccaggctgcaagacaccatgcgagagacaccgggactgtgcagagtgtggggccttcaggactggcccactggccaccaactgcagtacagcttgtgcccataccaatgtgaccctggccttggcccctatcttggatgatggctggtgcaaagagcggaccctggacaaccagctgttcttcttcttggtggaggatgacgccagaggcacggtcgtgctcagagtgagaccccaagaaaagggagcagaccacacgcaggccattgtgctgggctgcgtagggggcatcgtggcagtggggctggggctggtcctggcttaccggctctcggtggaaatctatgaccgccgggaatacagtcgctttgagaaggagcagcaacaactcaactggaagcaggacagtaatcctctctacaaaagtgccatcacgaccaccatcaatcctcgctttcaagaggcagacagtcccactctctgaaggagggagggacacttacccaaggctcttctccttggaggacagtgggaactggagggtgagaggaagggtgggtctgtaagaccttggtaggggactaattcactggcgaggtgcggccaccaccctacttcattttcagagtgacacccaagagggctgcttcccatgcctgcaaccttgcatccatctgggctaccccacccaagtatacaataaagtcttacctcagaccacagctgtcactttgctttacctcatcaaggccaaagcagactgtttatagcctgggcctcgggaaagctcttgtccatcctcctcttgccacctgagggcagggagaggtgcccaagcgcgaatgtgcaggaaactcccggggtgcaccctgggacccaggaagccaggtctggaaagggcctatgaattctcaagtgctgcggatgcaggggggtcccaggtcagagacactgcatctgttggtgtctagcctccttccgtcctgctgcgtgtgctttttcgtcttgctcagaactgatgccctgtttttgctcctacttgcttgttcctctgtggagaaggggttttaaaatggcttatagg

SEQ ID NO: 308594 - DNA, 2760 bp, Homo sapiens
cacttcctcctctgccgtctcccagatcagtacacaaaggctgctgctgccgccagaggaaggactgctctgcacgcacctatgtggaaactaaagcccagagagaaagtctgacttgccccacagccagtgagtgactgcagcagcaccagaatctggtctgtttcctgtttggctcttctaccactacggcttgggatctcgggcatggtggctttgccaatggtccttgttttgctgctggtcctgagcagaggtgagagtgaattggacgccaagatcccatccacaggggatgccacagaatggcggaatcctcacctgtccatgctggggtcctgccagccagccccctcctgccagaagtgcatcctctcacaccccagctgtgcatggtgcaagcaactgaacttcaccgcgtcgggagaggcggaggcgcggcgctgcgcccgacgagaggagctgctggctcgaggctgcccgctggaggagctggaggagccccgcggccagcaggaggtgctgcaggaccagccgctcagccagggcgcccgcggagagggtgccacccagctggcgccgcagcgggtccgggtcacgctgcggcctggggagccccagcagctccaggtccgcttccttcgtgctgagggatacccggtggacctgtactaccttatggacctgagctactccatgaaggacgacctggaacgcgtgcgccagctcgggcacgctctgctggtccggctgcaggaagtcacccattctgtgcgcattggttttggttcctttgtggacaaaacggtgctgccctttgtgagcacagtaccctccaaactgcgccacccctgccccacccggctggagcgctgccagtcaccattcagctttcaccatgtgctgtccctgacgggggacgcacaagccttcgagcgggaggtggggcgccagagtgtgtccggcaatctggactcgcctgaaggtggcttcgatgccattctgcaggctgcactctgccaggagcagattggctggagaaatgtgtcccggctgctggtgttcacttcagacgacacattccatacagctggggacgggaagttgggcggcattttcatgcccagtgatgggcactgccacttggacagcaatggcctctacagtcgcagcacagagtttgactacccttctgtgggtcaggtagcccaggccctctctgcagcaaatatccagcccatctttgctgtcaccagtgccgcactgcctgtctaccaggagctgagtaaactgattcctaagtctgcagttggggagctgagtgaggactccagcaacgtggtacagctcatcatggatgcttataatagcctgtcttccaccgtgacccttgaacactcttcactccctcctggggtccacatttcttacgaatcccagtgtgagggtcctgagaagagggagggtaaggctgaggatcgaggacagtgcaaccacgtccgaatcaaccagacggtgactttctgggtttctctccaagccacccactgcctcccagagccccatctcctgaggctccgggcccttggcttctcagaggagctgattgtggagttgcacacgctgtgtgactgtaattgcagtgacacccagccccaggctccccactgcagtgatggccagggacacctacaatgtggtgtatgcagggactgtgcagagtgtggggccttcaggactggcccactggccaccaactgcagtacagcttgtgcccataccaatgtgaccctggccttggcccctatcttggatgatggctggtgcaaagagcggaccctggacaaccagctgttcttcttcttggtggaggatgacgccagaggcacggtcgtgctcagagtgagaccccaagaaaagggagcagaccacacgcaggccattgtgctgggctgcgtagggggcatcgtggcagtggggctggggctggtcctggcttaccggctctcggtggaaatctatgaccgccgggaatacagtcgctttgagaaggagcagcaacaactcaactggaagcaggacagtaatcctctctacaaaagtgccatcacgaccaccatcaatcctcgctttcaagaggcagacagtcccactctctgaaggagggagggacacttacccaaggctcttctccttggaggacagtgggaactggagggtgagaggaagggtgggtctgtaagaccttggtaggggactaattcactggcgaggtgcggccaccaccctacttcattttcagagtgacacccaagagggctgcttcccatgcctgcaaccttgcatccatctgggctaccccacccaagtatacaataaagtcttacctcagaccacagctgtcactttgctttacctcatcaaggccaaagcagactgtttatagcctgggcctcgggaaagctcttgtccatcctcctcttgccacctgagggcagggagaggtgcccaagcgcgaatgtgcaggaaactcccggggtgcaccctgggacccaggaagccaggtctggaaagggcctatgaattctcaagtgctgcggatgcaggggggtcccaggtcagagacactgcatctgttggtgtctagcctccttccgtcctgctgcgtgtgctttttcgtcttgctcagaactgatgccctgtttttgctcctacttgcttgttcctctgtggagaaggggttttaaaatggcttatagg

SEQ ID NO: 308595 - DNA, 2084 bp, Homo sapiens
ctctacagtcgcagtgcccatcactgggcatgaaaatgcctctacagtcgcagcacagagttgactacccttctgtgggtcaggtagcccaggccctctctgcagcaaatatccagcccatctttgctgtcaccagtgccgcactgcctgtctaccaggagctgagtaaactgattcctaagtctgcagttggggagctgagtgaggactccagcaacgtggtacagctcatcatggatgcttataatagcctgtcttccaccgtgacccttgaacactcttcactccctcctggggtccacatttcttacgaatcccagtgtgagggtcctgagaagagggagggtaaggctgaggatcgaggacagtgcaaccacgtccgaatcaaccagacggtgactttctgggtttctctccaagccacccactgcctcccagagccccatctcctgaggctccgggcccttggcttctcagaggagctgattgtggagttgcacacgctgtgtgactgtaattgcagtgacacccagccccaggctccccactgcagtgatggccagggacacctacaatgtggtgtatgcagctgtgcccctggccgcctaggtcggctctgtgagtgctctgtggcagagctgtcctccccagacctggaatctgggtgccgggctcccaatggcacagggcccctgtgcagtggaaagggtcactgtcaatgtggacgctgcagctgcagtggacagagctctgggcatctgtgcgagtgtgacgatgccagctgtgagcgacatgagggcatcctctgcggaggctttggtcgctgccaatgtggagtatgtcactgtcatgccaaccgcacgggcagagcatgcgaatgcagtggggacatggacagttgcatcagtcccgagggagggctctgcagtgggcatggacgctgcaaatgcaaccgctgccagtgcttggacggctactatggtgctctatgcgaccaatgcccaggctgcaagacaccatgcgagagacaccgggactgtgcagagtgtggggccttcaggactggcccactggccaccaactgcagtacagcttgtgcccataccaatgtgaccctggccttggcccctatcttggatgatggctggtgcaaagagcggaccctggacaaccagctgttcttcttcttggtggaggatgacgccagaggcacggtcgtgctcagagtgagaccccaagaaaagggagcagaccacacgcaggccattgtgctgggctgcgtagggggcatcgtggcagtggggctggggctggtcctggcttaccggctctcggtggaaatctatgaccgccgggaatacagtcgctttgagaaggagcagcaacaactcaactggaagcaggacagtaatcctctctacaaaagtgccatcacgaccaccatcaatcctcgctttcaagaggcagacagtcccactctctgaaggagggagggacacttacccaaggctcttctccttggaggacagtgggaactggagggtgagaggaagggtgggtctgtaagaccttggtaggggactaattcactggcgaggtgcggccaccaccctacttcattttcagagtgacacccaagagggctgcttcccatgcctgcaaccttgcatccatctgggctaccccacccaagtatacaataaagtcttacctcagaccacagctgtcactttgctttacctcatcaaggccaaagcagactgtttatagcctgggcctcgggaaagctcttgtccatcctcctcttgccacctgagggcagggagaggtgcccaagcgcgaatgtgcaggaaactcccggggtgcaccctgggacccaggaagccaggtctggaaagggcctatgaattctcaagtgctgcggatgcaggggggtcccaggtcagagacactgcatctgttggtgtctagcctccttccgtcctgctgcgtgtgctttttcgtcttgctcagaactgatgccctgtttttgctcctacttgcttgttcctctgtggagaaggggttttaaaatggcttatagg

SEQ ID NO: 308596 - DNA, 832 bp, Homo sapiens
cacttcctcctctgccgtctcccagatcagtacacaaaggctgctgctgccgccagaggaaggactgctctgcacgcacctatgtggaaactaaagcccagagagaaagtctgacttgccccacagccagtgagtgactgcagcagcaccagaatctggtctgtttcctgtttggctcttctaccactacggcttgggatctcgggcatggtggctttgccaatggtccttgttttgctgctggtcctgagcagaggtgagagtgaattggacgccaagatcccatccacaggggatgccacagaatggcggaatcctcacctgtccatgctggggtcctgccagccagccccctcctgccagaagtgcatcctctcacaccccagctgtgcatggtgcaagcaactgaacttcaccgcgtcgggagaggcggaggcgcggcgctgcgcccgacgagaggagctgctggctcgaggctgcccgctggaggagctggaggagccccgcggccagcaggaggtgctgcaggaccagccgctcagccagggcgcccgcggagagggtgccacccagctggcgccgcagcgggtccgggtcacgctgcggcctggggagccccagcagctccaggtccgcttccttcgtgctgagggatacccggtggacctgtactaccttatggacctgagctactccatgaaggacgacctggaacgcgtgcgccagctcgggcacgctctgctggtccggctgcaggaagtcacccattctgtgcgcattggtgagccgagcgctgcctcccgccctgttagcccttgcctattcaaccact

SEQ ID NO: 308597 - DNA, 330 bp, Homo sapiens
agacaccatgcgagagacaccggtgaggcctcaggtcttgcatcttgggagcaggggcacagtggggcttgttgagctactcccatctgcctactctccgtcctgcttgtagttgggcaaggggcattgggtgacaactgcccagctggtaacctattggcatctactacacagggactgtgcagagtgtggggccttcaggactggcccactggccaccaactgcagtacagcttgtgcccataccaatgtgaccctggccttggcccctatcttggatgatggctggtgcaaagagcggaccctggacaaccagctgttcttcttctt

SEQ ID NO: 308598 - DNA, 1305 bp, Homo sapiens
cctgagtcccgggaggaaagtgctcgcccgttcctgacctgtgacacgctcactgcgaaggcaggttattagaagagtcccatgaaaggtggctccacggtcccagcgacatgcaggggctcctcttctccactcttctgcttgctggcctggcacagttctgctgcagggtacagggcactggaccattagatacaacacctgaaggaaggcctggagaagtgtcagatgcacctcagcgtaaacagttttgtcactggccctgcaaatgccctcagcagaagccccgttgccctcctggagtgagcctggtgagagatggctgtggatgctgtaaaatctgtgccaagcaaccaggggaaatctgcaatgaagctgacctctgtgacccacacaaagggctgtattgtgactactcagtagacaggcctaggtacgagactggagtgtgtgcataccttgtagctgttgggtgcgagttcaaccaggtacattatcataatggccaagtgtttcagcccaaccccttgttcagctgcctctgtgtgagtggggccattggatgcacacctctgttcataccaaagctggctggcagtcactgctctggagctaaaggtggaaagaagtctgatcagtcaaactgtagcctggaaccattactacagcagctttcaacaagctacaaaacaatgccagatgtgtgccaagcttctaatctgcttcctgcattgaggtctttaaactgttgtctaccttccagcttatagaaatctcccacttatttggaaaaaaaaatgtcttgtgcaagcaacaaaatggactccctgctccagaacatgtgggatgggaatatctaacagggtgaccaatgaaaacagcaactgtgaaatgagaaaagagaaaagactgtgttacattcagccttgcgacagcaatatattaaagacaataaagattcccaaaggaaaaacatgccaacctactttccaactctccaaagctgaaaaatttgtcttttctggatgctcaagtactcagagttacaaacccactttttgtggaatatgcttggataagagatgctgtatccctaataagtctaaaatgattactattcaatttgattgcccaaatgaggggtcatttaaatggaagatgctgtggattacatcttgtgtgtgtcagagaaactgcagagaacctggagatatattttctgagctcaagattctgtaaaaccaagcaaatgggggaaaagttagtcaatcctgtcatataataaaaaaattagtgagtataaaa

SEQ ID NO: 308599 - DNA, 1065 bp, Homo sapiens
atgaagatatctaggggcagagtgtgcttggagtcagagaacaaggacgctggtgtggctggtcgtaaacagttttgtcactggccctgcaaatgccctcagcagaagccccgttgccctcctggagtgagcctggtgagagatggctgtggatgctgtaaaatctgtgccaagcaaccaggggaaatctgcaatgaagctgacctctgtgacccacacaaagggctgtattgtgactactcagtagacaggcctaggtacgagactggagtgtgtgcataccttgtagctgttgggtgcgagttcaaccaggtacattatcataatggccaagtgtttcagcccaaccccttgttcagctgcctctgtgtgagtggggccattggatgcacacctctgttcataccaaagctggctggcagtcactgctctggagctaaaggtggaaagaagtctgatcagtcaaactgtagcctggaaccattactacagcagctttcaacaagctacaaaacaatgccagcttatagaaatctcccacttatttggaaaaaaaaatgtcttgtgcaagcaacaaaatggactccctgctccagaacatgtgggatgggaatatctaacagggtgaccaatgaaaacagcaactgtgaaatgagaaaagagaaaagactgtgttacattcagccttgcgacagcaatatattaaagacaataaagattcccaaaggaaaaacatgccaacctactttccaactctccaaagctgaaaaatttgtcttttctggatgctcaagtactcagagttacaaacccactttttgtggaatatgcttggataagagatgctgtatccctaataagtctaaaatgattactattcaatttgattgcccaaatgaggggtcatttaaatggaagatgctgtggattacatcttgtgtgtgtcagagaaactgcagagaacctggagatatattttctgagctcaagattctgtaaaaccaagcaaatgggggaaaagttagtcaatcctgtcatataataaaaaaattagtgagtataaaa

SEQ ID NO: 308600 - DNA, 624 bp, Homo sapiens
taaacaaaacagaaatttctatttattgtaaaattgagtcaagaatagatagcaaaaaacattgaggagtacgtgctataatatgatgaagaatagagaggacagacctctgataagaaggggatcttaagggtaaagagagtgctggaaatcactacatagcaacttttattaatgcctccaaatactcagatttgtactataaactattctacatgttttcaaaactattgtaataaaatttaaagaatgacttcattttatctatcttttcagattcccaaaggaaaaacatgccaacctactttccaactctccaaagctgaaaaatttgtcttttctggatgctcaagtactcagagttacaaacccactttttgtggaatatgcttggataagagatgctgtatccctaataagtctaaaatgattactattcaatttgattgcccaaatgaggggtcatttaaatggaagatgctgtggattacatcttgtgtgtgtcagagaaactgcagagaacctggagatatattttctgagctcaagattctgtaaaaccaagcaaatgggggaaaagttagtcaatcctgtcatataataaaaaaattagtgagtataaaa

SEQ ID NO: 308601 - DNA, 507 bp, Homo sapiens
agggtattaaaacggatccttaaaaatgaaagtgcaggctgaaagttggtagtgtgggaggtagagggtgtgtgttcttgtgcagaggagcgtggggtttgcagaggagacaggggagctttgtgtacccggagcaatgaacaagcggcgacttctctacccctcagggtggctccacggtcccagcgacatgcaggggctcctcttctccactcttctgcttgctggcctggcacaggtaatggcaccgaagcctcctttcgctatgtttgaacagcgccacgctttcctatatatttttatagcagagcctaaggcacagcctggcacagtgcgggaaacagtgtctctccatgccagctccaggcggaggctcaactttccattgctgtttgcaaaatgtgcaaagagcccctggaaaaacgaattttgacagcgactttttccagttaagtctgtccttctttgaaaggggcactttggaataaacatttacatttttaaaac

SEQ ID NO: 308602 - DNA, 400 bp, Homo sapiens
cctgagtcccgggaggaaagtgctcgcccgttcctgacctgtgacacgctcactgcgaagggtggctccacggtcccagcgacatgcaggggctcctcttctccactcttctgcttgctggcctggcacaggtaatggcaccgaagcctcctttcgctatgtttgaacagcgccacgctttcctatatatttttatagcagagcctaaggcacagcctggcacagtgcgggaaacagtgtctctccatgccagctccaggcggaggctcaactttccattgctgtttgcaaaatgtgcaaagagcccctggaaaaacgaattttgacagcgactttttccagttaagtctgtccttctttgaaaggggcactttggaataaacatttacatttttaaaac

SEQ ID NO: 308603 - DNA, 1321 bp, Homo sapiens
agggtattaaaacggatccttaaaaatgaaagtgcaggctgaaagttggtagtgtgggaggtagagggtgtgtgttcttgtgcagaggagcgtggggtttgcagaggagacaggggagctttgtgtacccggagcaatgaacaagcggcgacttctctacccctcagggtggctccacggtcccagcgacatgcaggggctcctcttctccactcttctgcttgctggcctggcacagttctgctgcagggtacagggcactggaccattagatacaacacctgaaggaaggcctggagaagtgtcagatgcacctcagcgtaaacagttttgtcactggccctgcaaatgccctcagcagaagccccgttgccctcctggagtgagcctggtgagagatggctgtggatgctgtaaaatctgtgccaagcaaccaggggaaatctgcaatgaagctgacctctgtgacccacacaaagggctgtattgtgactactcagtagacaggcctaggtacgagactggagtgtgtgcataccttgtagctgttgggtgcgagttcaaccaggtacattatcataatggccaagtgtttcagcccaaccccttgttcagctgcctctgtgtgagtggggccattggatgcacacctctgttcataccaaagctggctggcagtcactgctctggagctaaaggtggaaagaagtctgatcagtcaaactgtagcctggaaccattactacagcagctttcaacaagctacaaaacaatgccagcttatagaaatctcccacttatttggaaaaaaaaatgtcttgtgcaagcaacaaaatggactccctgctccagaacatgtgggatgggaatatctaacagggtgaccaatgaaaacagcaactgtgaaatgagaaaagagaaaagactgtgttacattcagccttgcgacagcaatatattaaagacaataaagattcccaaaggaaaaacatgccaacctactttccaactctccaaagctgaaaaatttgtcttttctggatgctcaagtactcagagttacaaacccactttttgtggaatatgcttggataagagatgctgtatccctaataagtctaaaatgattactattcaatttgattgcccaaatgaggggtcatttaaatggaagatgctgtggattacatcttgtgtgtgtcagagaaactgcagagaacctggagatatattttctgagctcaagattctgtaaaaccaagcaaatgggggaaaagttagtcaatcctgtcatataataaaaaaattagtgagtataaaa

SEQ ID NO: 308604 - DNA, 1241 bp, Homo sapiens
cctgagtcccgggaggaaagtgctcgcccgttcctgacctgtgacacgctcactgcgaaggcaggttattagaagagtcccatgaaaggtggctccacggtcccagcgacatgcaggggctcctcttctccactcttctgcttgctggcctggcacagttctgctgcagggtacagggcactggaccattagatacaacacctgaaggaaggcctggagaagtgtcagatgcacctcagcgtaaacagttttgtcactggccctgcaaatgccctcagcagaagccccgttgccctcctggagtgagcctggtgagagatggctgtggatgctgtaaaatctgtgccaagcaaccaggggaaatctgcaatgaagctgacctctgtgacccacacaaagggctgtattgtgactactcagtagacaggcctaggtacgagactggagtgtgtgcataccttgtagctgttgggtgcgagttcaaccaggtacattatcataatggccaagtgtttcagcccaaccccttgttcagctgcctctgtgtgagtggggccattggatgcacacctctgttcataccaaagctggctggcagtcactgctctggagctaaaggtggaaagaagtctgatcagtcaaactgtagcctggaaccattactacagcagctttcaacaagctacaaaacaatgccagcttatagaaatctcccacttatttggaaaaaaaaatgtcttgtgcaagcaacaaaatggactccctgctccagaacatgtgggatgggaatatctaacagggtgaccaatgaaaacagcaactgtgaaatgagaaaagagaaaagactgtgttacattcagccttgcgacagcaatatattaaagacaataaagattcccaaaggaaaaacatgccaacctactttccaactctccaaagctgaaaaatttgtcttttctggatgctcaagtactcagagttacaaacccactttttgtggaatatgcttggataagagatgctgtatccctaataagtctaaaatgattactattcaatttgattgcccaaatgaggggtcatttaaatggaagatgctgtggattacatcttgtgtgtgtcagagaaactgcagagaacctggagatatattttctgagctcaagattctgtaaaaccaagcaaatgggggaaaagttagtcaatcctgtcatataataaaaaaattagtgagtataaaa

SEQ ID NO: 308605 - DNA, 481 bp, Homo sapiens
tctggatgctcaagtactcagagttacaaacccactttttgtggaatatgcttggataagagatgctgtatccctaataagtctaaaatgattactattcaatttgattgcccaaatgaggggtcatttaaatggaagatgctgtggattacatcttgtgtgtgtcagagaaactgcagagaacctggagatatattttctgagctcaagattctgtaaaaccaagcaaatgggggaaaagttagtcaatcctgtcatataataaaaaaattagtgagtataaaatggtggcaaatctactttgtttaaaacagtatgaatgcctattctcagatcactacatttaaggcattagaaacttttaaaaagttatcttaaaaatatacataaaatttgaacaacttaaaaattgaactaatttctaaaatatatcctataattatataatacacagacatttgttaccatctaagcattttgt

SEQ ID NO: 308606 - DNA, 1888 bp, Homo sapiens
gacaagggctcttcttgatggcttactgtatccactttgtccccaagaccatagggaaatgactagaggtgactgtactagctagattttaaatgaaaccgaaatgaaagttcacttcctcattttgagtacctcatgtgacaagttccaatttcttttcaagtcaattgaactgaaatctccttgttgctttgaaatcttagaagagagcccactaattcaaggactcttactgtgggagcaactgctggttctatcacaatgaaacggctggtttgtgtgctcttggtgtgctcctctgcagtggcacagttgcataaagatcctaccctggatcaccactggcatctctggaagaaaacctatggcaaacaatacaaggaaaagaatgaagaagcagtacgacgtctcatctgggaaaagaatctaaagtttgtgatgcttcacaacctggagcattcaatgggaatgcactcatacgatctgggcatgaaccacctgggagacatgaccagtgaagaagtgatgtctttgatgagttccctgagagttcccagccagtggcagagaaatatcacatataagtcaaaccctaatcggatattgcctgattctgtggactggagagagaaagggtgtgttactgaagtgaaatatcaaggttcttgtggtgcttgctgggctttcagtgctgtgggggccctggaagcacagctgaagctgaaaacaggaaagctggtgtctctcagtgcccagaacctggtggattgctcaactgaaaaatatggaaacaaaggctgcaatggtggcttcatgacaacggctttccagtacatcattgataacaagggcatcgactcagacgcttcctatccctacaaagccatggatcagaaatgtcaatatgactcaaaatatcgtgctgccacatgttcaaagtacactgaacttccttatggcagagaagatgtcctgaaagaagctgtggccaataaaggcccagtgtctgttggtgtagatgcgcgtcatccttctttcttcctctacagaagtggtgtctactatgaaccatcctgtactcagaatgtgaatcatggtgtacttgtggttggctatggtgatcttaatgggaaagaatactggcttgtgaaaaacagctggggccacaactttggtgaagaaggatatattcggatggcaagaaataaaggaaatcattgtgggattgctagctttccctcttacccagaaatctagaggatctctcctttttataacaaatcaagaaatatgaagcactttctcttaacttaatttttcctgctgtatccagaagaaataattgtgtcatgattaatgtgtatttactgtactaattagaaaatatagtttgaggccgggcacggtggctcacgcctgtaatcccagtacttgggaggccaaggcaggcatatcaacttgaggccaggagttaaagagcagcctggctaacatggtgaaaccccatctctactaaaaatacaaaaaattagccgagcacggtggtgcatgcctgtaatcccagctacttgggaggctgaggcacgagattccttgaacccaagaggttgaggctatgttgagctgagatcacaccactgtactccagcctggatgacagagtggagactctgtttcaaaaaaacagaaaagaaaatatagtttgattcttcatttttttaaatttgcaaatctcaggataaagtttgctaagtaaattagtaatgtactatagatataactgtacaaaaattgttcaacctaaaacaatctgtaattgcttattgttttattgtcccgaattcagttggtttaatatattgtcctctgtaatttcgatccttcttaa

SEQ ID NO: 308607 - DNA, 615 bp, Homo sapiens
cttaacttctcatagctgatgaatatgaattttcagataggaagggcgcactgagaacccagccatagtgaataaaaacagatctatggccgggcacggtggctcacgcctgtaatcccagtacttgggaggccaaggcaggcatatcaacttgaggccaggagttaaagagcagcctggctaacatggtgaaaccccatctctactaaaaatacaaaaaattagccgagcacggtggtgcatgcctgtaatcccagctacttgggaggctgaggcacgagattccttgaacccaagaggttgaggctatgttgagctgagatcacaccactgtactccagcctggatgacagagtggagactctgtttcaaaaaaacagaaaagaaaatatagtttgattcttcatttttttaaatttgcaaatctcaggataaagtttgctaagtaaattagtaatgtactatagatataactgtacaaaaattgttcaacctaaaacaatctgtaattgcttattgttttattgtatactctttgtctttttaagacccctaatagccttttgtaacttgatggcttaaaaatacttaataaatctgccatttcaaatttct

SEQ ID NO: 308608 - DNA, 521 bp, Homo sapiens
tcacggtagatatctagggtaagagggaaagctagcaatcccacaatgatttcctttatttcttgccatccgaatatattcttcttcaccaatggtgaaaccccatctctactaaaaatacaaaaaattagccgagcacggtggtgcatgcctgtaatcccagctacttgggaggctgaggcacgagattccttgaacccaagaggttgaggctatgttgagctgagatcacaccactgtactccagcctggatgacagagtggagactctgtttcaaaaaaacagaaaagaaaatatagtttgattcttcatttttttaaatttgcaaatctcaggataaagtttgctaagtaaattagtaatgtactatagatataactgtacaaaaattgttcaacctaaaacaatctgtaattgcttattgttttattgtatactctttgtctttttaagacccctaatagccttttgtaacttgatggcttaaaaatacttaataaatctgccatttcaaatttct

SEQ ID NO: 308609 - DNA, 979 bp, Homo sapiens
ttgacatattcaatatgtcaaagtgctgtattttgacatattgaatattttaagctgaaggcatttgaggaaattgcagaagcaggaaggtgactctgaccttctgcctgctgttctccccagaagcagccataaaacctgggaaggattttctgaccttcccctgaagtagatcataagactgtcatgtaagaggtgctctcctggcacccagagaaaaggagcatccttacctccaaaagcacagggacacaaagaggaatctaaacaaacaggcctctcagtttcccccagtttattacatttagcttgttcacactttgccctatgacatttctacatcactggctgctcttcatcaaacctactataaaaaacattcaagttcaaaaaaaaaaaaaaaaaacacaaaaaaaaaaaaataaaaaaaaaagaacacaacaaacaacaaaaaaaaaaaaaaaaaaaaaaaaaaaaagaggggggggcgcccaaagagatatcccctcggggggccccacattgagcgcccccgctgtttttagtgacaaagggtgggcgcctactcaaagtggggaggcgttatataaactaggaggcgggcgcgcgctataaaacaagcacgaggtacgtgagggaacaactggtgtacttgagagaagttatatggatagagaagcaccctctttctatgggctgtggggtgataacaataaatagagtaggacagcaaaaacaatctaacacatcagaaggataaaatgtaataccccgcacctcacacgaactaggccgaacaaatatataaaaacataaattcttgacggcgcatcaaatatattagtaggtgcgcaacaaccacactaccatattcaaatctacttcccgcgcaagtccggtacacaaaacattatagtcgcttatgcaagctgactaaacaactacatcttagcacaaccacctaataatttttccaccg

SEQ ID NO: 308610 - DNA, 1922 bp, Homo sapiens
gacaagggctcttcttgatggcttactgtatccactttgtccccaagaccatagggaaatgactagaggtgactgtactagctagattttaaatgaaaccgaaatgaaagttcacttcctcattttgagtacctcatgtgacaagttccaatttcttttcaagtcaattgaactgaaatctccttgttgctttgaaatcttagaagagagcccactaattcaaggactcttactgtgggagcaactgctggttctatcacaatgaaacggctggtttgtgtgctcttggtgtgctcctctgcagtggcacagttgcataaagatcctaccctggatcaccactggcatctctggaagaaaacctatggcaaacaatacaaggaaaagaatgaagaagcagtacgacgtctcatctgggaaaagaatctaaagtttgtgatgcttcacaacctggagcattcaatgggaatgcactcatacgatctgggcatgaaccacctgggagacatgaccagtgaagaagtgatgtctttgatgagttccctgagagttcccagccagtggcagagaaatatcacatataagtcaaaccctaatcggatattgcctgattctgtggactggagagagaaagggtgtgttactgaagtgaaatatcaaggttcttgtggtgcttgctgggctttcagtgctgtgggggccctggaagcacagctgaagctgaaaacaggaaagctggtgtctctcagtgcccagaacctggtggattgctcaactgaaaaatatggaaacaaaggctgcaatggtggcttcatgacaacggctttccagtacatcattgataacaagggcatcgactcagacgcttcctatccctacaaagccatggatcagaaatgtcaatatgactcaaaatatcgtgctgccacatgttcaaagtacactgaacttccttatggcagagaagatgtcctgaaagaagctgtggccaataaaggcccagtgtctgttggtgtagatgcgcgtcatccttctttcttcctctacagaagtggtgtctactatgaaccatcctgtactcagaatgtgaatcatggtgtacttgtggttggctatggtgatcttaatgggaaagaatactggcttgtgaaaaacagctggggccacaactttggtgaagaaggatatattcggatggcaagaaataaaggaaatcattgtgggattgctagctttccctcttacccagaaatctagaggatctctcctttttataacaaatcaagaaatatgaagcactttctcttaacttaatttttcctgctgtatccagaagaaataattgtgtcatgattaatgtgtatttactgtactaattagaaaatatagtttgaggccgggcacggtggctcacgcctgtaatcccagtacttgggaggccaaggcaggcatatcaacttgaggccaggagttaaagagcagcctggctaacatggtgaaaccccatctctactaaaaatacaaaaaattagccgagcacggtggtgcatgcctgtaatcccagctacttgggaggctgaggcacgagattccttgaacccaagaggttgaggctatgttgagctgagatcacaccactgtactccagcctggatgacagagtggagactctgtttcaaaaaaacagaaaagaaaatatagtttgattcttcatttttttaaatttgcaaatctcaggataaagtttgctaagtaaattagtaatgtactatagatataactgtacaaaaattgttcaacctaaaacaatctgtaattgcttattgttttattgtatactctttgtctttttaagacccctaatagccttttgtaacttgatggcttaaaaatacttaataaatctgccatttcaaatttct

SEQ ID NO: 308611 - DNA, 1796 bp, Homo sapiens
  misc_feature (32)..(32): n is a, c, g, or t
  misc_feature (36)..(36): n is a, c, g, or t
ggcagtactcctacggtcttaggtacgaggcngggngtcaattgaactgaaatctccttgttgctttgaaatcttagaagagagcccactaattcaaggactcttactgtgggagcaactgctggttctatcacaatgaaacggctggtttgtgtgctcttggtgtgctcctctgcagtggcacagttgcataaagatcctaccctggatcaccactggcatctctggaagaaaacctatggcaaacaatacaaggaaaagaatgaagaagcagtacgacgtctcatctgggaaaagaatctaaagtttgtgatgcttcacaacctggagcattcaatgggaatgcactcatacgatctgggcatgaaccacctgggagacatgaccagtgaagaagtgatgtctttgatgagttccctgagagttcccagccagtggcagagaaatatcacatataagtcaaaccctaatcggatattgcctgattctgtggactggagagagaaagggtgtgttactgaagtgaaatatcaaggttcttgtggtgcttgctgggctttcagtgctgtgggggccctggaagcacagctgaagctgaaaacaggaaagctggtgtctctcagtgcccagaacctggtggattgctcaactgaaaaatatggaaacaaaggctgcaatggtggcttcatgacaacggctttccagtacatcattgataacaagggcatcgactcagacgcttcctatccctacaaagccatggatcagaaatgtcaatatgactcaaaatatcgtgctgccacatgttcaaagtacactgaacttccttatggcagagaagatgtcctgaaagaagctgtggccaataaaggcccagtgtctgttggtgtagatgcgcgtcatccttctttcttcctctacagaagtggtgtctactatgaaccatcctgtactcagaatgtgaatcatggtgtacttgtggttggctatggtgatcttaatgggaaagaatactggcttgtgaaaaacagctggggccacaactttggtgaagaaggatatattcggatggcaagaaataaaggaaatcattgtgggattgctagctttccctcttacccagaaatctagaggatctctcctttttataacaaatcaagaaatatgaagcactttctcttaacttaatttttcctgctgtatccagaagaaataattgtgtcatgattaatgtgtatttactgtactaattagaaaatatagtttgaggccgggcacggtggctcacgcctgtaatcccagtacttgggaggccaaggcaggcatatcaacttgaggccaggagttaaagagcagcctggctaacatggtgaaaccccatctctactaaaaatacaaaaaattagccgagcacggtggtgcatgcctgtaatcccagctacttgggaggctgaggcacgagattccttgaacccaagaggttgaggctatgttgagctgagatcacaccactgtactccagcctggatgacagagtggagactctgtttcaaaaaaacagaaaagaaaatatagtttgattcttcatttttttaaatttgcaaatctcaggataaagtttgctaagtaaattagtaatgtactatagatataactgtacaaaaattgttcaacctaaaacaatctgtaattgcttattgttttattgtatactctttgtctttttaagacccctaatagccttttgtaacttgatggcttaaaaatacttaataaatctgccatttcaaatttct

SEQ ID NO: 308612 - DNA, 4109 bp, Homo sapiens
  misc_feature (2119)..(2120): n is a, c, g, or t
  misc_feature (2126)..(2126): n is a, c, g, or t
  misc_feature (2280)..(2280): n is a, c, g, or t
  misc_feature (2293)..(2293): n is a, c, g, or t
  misc_feature (2296)..(2296): n is a, c, g, or t
  misc_feature (2298)..(2298): n is a, c, g, or t
  misc_feature (2303)..(2303): n is a, c, g, or t
  misc_feature (2361)..(2361): n is a, c, g, or t
  misc_feature (2366)..(2367): n is a, c, g, or t
gacaagggctcttcttgatggcttactgtatccactttgtccccaagaccatagggaaatgactagaggtgactgtactagctagattttaaatgaaaccgaaatgaaagttcacttcctcattttgagtacctcatgtgacaagttccaatttcttttcaagtcaattgaactgaaatctccttgttgctttgaaatcttagaagagagcccactaattcaaggactcttactgtgggagcaactgctggttctatcacaatgaaacggctggtttgtgtgctcttggtgtgctcctctgcagtggcacagttgcataaagatcctaccctggatcaccactggcatctctggaagaaaacctatggcaaacaatacaaggaaaagaatgaagaagcagtacgacgtctcatctgggaaaagaatctaaagtttgtgatgcttcacaacctggagcattcaatgggaatgcactcatacgatctgggcatgaaccacctgggagacatgaccagtgaagaagtgatgtctttgatgagttccctgagagttcccagccagtggcagagaaatatcacatataagtcaaaccctaatcggatattgcctgattctgtggactggagagagaaagggtgtgttactgaagtgaaatatcaaggttcttgtggtgcttgctgggctttcagtgctgtgggggccctggaagcacagctgaagctgaaaacaggaaagctggtgtctctcagtgcccagaacctggtggattgctcaactgaaaaatatggaaacaaaggctgcaatggtggcttcatgacaacggctttccagtacatcattgataacaagggcatcgactcagacgcttcctatccctacaaagccatggatcagaaatgtcaatatgactcaaaatatcgtgctgccacatgttcaaagtacactgaacttccttatggcagagaagatgtcctgaaagaagctgtggccaataaaggcccagtgtctgttggtgtagatgcgcgtcatccttctttcttcctctacagaagtggtgtctactatgaaccatcctgtactcagaatgtgaatcatggtgtacttgtggttggctatggtgatcttaatgggaaagaatactggcttgtgaaaaacagctggggccacaactttggtgaagaaggatatattcggatggcaagaaataaaggaaatcattgtgggattgctagctttccctcttacccagaaatctagaggatctctcctttttataacaaatcaagaaatatgaagcactttctcttaacttaatttttcctgctgtatccagaagaaataattgtgtcatgattaatgtgtatttactgtactaattagaaaatatagtttgaggccgggcacggtggctcacgcctgtaatcccagtacttgggaggccaaggcaggcatatcaacttgaggccaggagttaaagagcagcctggctaacatggtgaaaccccatctctactaaaaatacaaaaaattagccgagcacggtggtgcatgcctgtaatcccagctacttgggaggctgaggcacgagattccttgaacccaagaggttgaggctatgttgagctgagatcacaccactgtactccagcctggatgacagagtggagactctgtttcaaaaaaacagaaaagaaaatatagtttgattcttcatttttttaaatttgcaaatctcaggataaagtttgctaagtaaattagtaatgtactatagatataactgtacaaaaattgttcaacctaaaacaatctgtaattgcttattgttttattgtatactctttgtctttttaagacccctaatagccttttgtaacttgatggcttaaaaatacttaataaatctgccatttcaaatttctatcattgccacataccattcttattcctaggcaactattaataatctatcctgagaatattaattgtggtattctggtgatggggtttagcaactttgatggaagaaaatattaggctataaatgtcctaaggactcagattgtatctttgtacagaagaggattcaaaacgccacgtgtagtggctcatgcctgtnntcccgncactttgggaggctgaggtgggaggatcgtcttgagcccaggagttcgagaccagcctggacaacgtggtgagaccttgtctccacaaaaataaaaaagaaactatccaggagtggtggtgtgtgcctgtggtccctgctatgcagatgtctangacaggaggatcncangngcccnggaggttgagaatgcagtgagcttgtaattgcaccactgcactccagcctgggtgacngagcnngaccctgtcttaaaaaaagaggattcaacacatatttttatattatgttaaagtaaagaaatgcataaaagacaagcactttggaagaattattttaatgatcaacaatttaatgtattagtccaaattatttttacgtagtcatcaacaatttgaccagggcctttatttggcaaataactgagccaaccagaataaaataaccaatactccactgctcatatttttatctaattcagatggatcttccttacaactgctctagattagtagatgcatctaagcaggcagcaggaactttaaattttttaagttcatgtctatgacatgaacaatgtgtgggataatgtcattaatatatcctaaattaacctaaacgtatttcactaactctggctccttctccataaagcacattttaaggaacaagaattgctaaatataaaaacataaataataccataatacatggctatcatcaaaagtgtatagaatattatagtttaaaagtatttagttgattacttttcagttttgttttgttttttgagacggagtctcgctctgttgcccaggctggagtgcagtggcaccatctcagttcactgcaacttctgcctcccgggttcaagcgattctcctgcctcagcctcccgagtggctggaattataggcgtgcaccaccacgcccagctgatttttgtatttttggtggggacagggttttgccacattggccaggctggtctcaaactcctgacctcaggtgatccacccaccccagcctcccaaggtgctgagattacaggcgtgagccactgagcccagcctacttttcagtttttaacataatttttgttttatccacaacttttcaagtattgaaagtagaataaaaacatgggttcttagtctttagctatctgttaaagcctatgaatgccttcttaaaatcatgtttttaaatgcataaaatatataggattacaaaggaatctaattatatcgaaatacagttattaaaatgttaaaagataagtttgttatatattaatatgcatgcttctttataaatgcattaaataagagttaatagctatcctaaatttgaaatagtgataagcataatgaaaatagatgcaaaaaactaatgtgatatgaaaatatctgggtttttcttttgatgatgaagtattgctaatattaccgtggtttatgaactatgttcagaattgaagaaaatcctaactttcagttagaggttagtgacggggttcaggacaccctacacaaaatacagcactttgacatattgaatattttaagctgaaggcatttgaggaaattgcagaagcaggaaggtgactctgaccttctgcctgctgttctccccagaagcagccataaaacctgggaaggattttctgaccttcccctgaagtagatcataagactgtcatgtaagaggtgctctcctggcacccagagaaaaggagcatccttacctccaaaagcacagggacacaaagaggaatctaaacaaacaggcctctcagtttcccccagtttattacatttagcttgttcacactttgccctatgacatttctacatcactggctgctcttcatcaaacctactataaaaaacattcaagttcaactgtttctttgggcctttatttccttatggagcccctcgtgtcgtgtaaaacttatattaaataaatgtgcatgcttttc

SEQ ID NO: 308613 - DNA, 4228 bp, Homo sapiens
  misc_feature (2119)..(2120): n is a, c, g, or t
  misc_feature (2126)..(2126): n is a, c, g, or t
  misc_feature (2280)..(2280): n is a, c, g, or t
  misc_feature (2293)..(2293): n is a, c, g, or t
  misc_feature (2296)..(2296): n is a, c, g, or t
  misc_feature (2298)..(2298): n is a, c, g, or t
  misc_feature (2303)..(2303): n is a, c, g, or t
  misc_feature (2361)..(2361): n is a, c, g, or t
  misc_feature (2366)..(2367): n is a, c, g, or t
gacaagggctcttcttgatggcttactgtatccactttgtccccaagaccatagggaaatgactagaggtgactgtactagctagattttaaatgaaaccgaaatgaaagttcacttcctcattttgagtacctcatgtgacaagttccaatttcttttcaagtcaattgaactgaaatctccttgttgctttgaaatcttagaagagagcccactaattcaaggactcttactgtgggagcaactgctggttctatcacaatgaaacggctggtttgtgtgctcttggtgtgctcctctgcagtggcacagttgcataaagatcctaccctggatcaccactggcatctctggaagaaaacctatggcaaacaatacaaggaaaagaatgaagaagcagtacgacgtctcatctgggaaaagaatctaaagtttgtgatgcttcacaacctggagcattcaatgggaatgcactcatacgatctgggcatgaaccacctgggagacatgaccagtgaagaagtgatgtctttgatgagttccctgagagttcccagccagtggcagagaaatatcacatataagtcaaaccctaatcggatattgcctgattctgtggactggagagagaaagggtgtgttactgaagtgaaatatcaaggttcttgtggtgcttgctgggctttcagtgctgtgggggccctggaagcacagctgaagctgaaaacaggaaagctggtgtctctcagtgcccagaacctggtggattgctcaactgaaaaatatggaaacaaaggctgcaatggtggcttcatgacaacggctttccagtacatcattgataacaagggcatcgactcagacgcttcctatccctacaaagccatggatcagaaatgtcaatatgactcaaaatatcgtgctgccacatgttcaaagtacactgaacttccttatggcagagaagatgtcctgaaagaagctgtggccaataaaggcccagtgtctgttggtgtagatgcgcgtcatccttctttcttcctctacagaagtggtgtctactatgaaccatcctgtactcagaatgtgaatcatggtgtacttgtggttggctatggtgatcttaatgggaaagaatactggcttgtgaaaaacagctggggccacaactttggtgaagaaggatatattcggatggcaagaaataaaggaaatcattgtgggattgctagctttccctcttacccagaaatctagaggatctctcctttttataacaaatcaagaaatatgaagcactttctcttaacttaatttttcctgctgtatccagaagaaataattgtgtcatgattaatgtgtatttactgtactaattagaaaatatagtttgaggccgggcacggtggctcacgcctgtaatcccagtacttgggaggccaaggcaggcatatcaacttgaggccaggagttaaagagcagcctggctaacatggtgaaaccccatctctactaaaaatacaaaaaattagccgagcacggtggtgcatgcctgtaatcccagctacttgggaggctgaggcacgagattccttgaacccaagaggttgaggctatgttgagctgagatcacaccactgtactccagcctggatgacagagtggagactctgtttcaaaaaaacagaaaagaaaatatagtttgattcttcatttttttaaatttgcaaatctcaggataaagtttgctaagtaaattagtaatgtactatagatataactgtacaaaaattgttcaacctaaaacaatctgtaattgcttattgttttattgtatactctttgtctttttaagacccctaatagccttttgtaacttgatggcttaaaaatacttaataaatctgccatttcaaatttctatcattgccacataccattcttattcctaggcaactattaataatctatcctgagaatattaattgtggtattctggtgatggggtttagcaactttgatggaagaaaatattaggctataaatgtcctaaggactcagattgtatctttgtacagaagaggattcaaaacgccacgtgtagtggctcatgcctgtnntcccgncactttgggaggctgaggtgggaggatcgtcttgagcccaggagttcgagaccagcctggacaacgtggtgagaccttgtctccacaaaaataaaaaagaaactatccaggagtggtggtgtgtgcctgtggtccctgctatgcagatgtctangacaggaggatcncangngcccnggaggttgagaatgcagtgagcttgtaattgcaccactgcactccagcctgggtgacngagcnngaccctgtcttaaaaaaagaggattcaacacatatttttatattatgttaaagtaaagaaatgcataaaagacaagcactttggaagaattattttaatgatcaacaatttaatgtattagtccaaattatttttacgtagtcatcaacaatttgaccagggcctttatttggcaaataactgagccaaccagaataaaataaccaatactccactgctcatatttttatctaattcagatggatcttccttacaactgctctagattagtagatgcatctaagcaggcagcaggaactttaaattttttaagttcatgtctatgacatgaacaatgtgtgggataatgtcattaatatatcctaaattaacctaaacgtatttcactaactctggctccttctccataaagcacattttaaggaacaagaattgctaaatataaaaacataaataataccataatacatggctatcatcaaaagtgtatagaatattatagtttaaaagtatttagttgattacttttcagttttgttttgttttttgagacggagtctcgctctgttgcccaggctggagtgcagtggcaccatctcagttcactgcaacttctgcctcccgggttcaagcgattctcctgcctcagcctcccgagtggctggaattataggcgtgcaccaccacgcccagctgatttttgtatttttggtggggacagggttttgccacattggccaggctggtctcaaactcctgacctcaggtgatccacccaccccagcctcccaaggtgctgagattacaggcgtgagccactgagcccagcctacttttcagtttttaacataatttttgttttatccacaacttttcaagtattgaaagtagaataaaaacatgggttcttagtctttagctatctgttaaagcctatgaatgccttcttaaaatcatgtttttaaatgcataaaatatataggattacaaaggaatctaattatatcgaaatacagttattaaaatgttaaaagataagtttgttatatattaatatgcatgcttctttataaatgcattaaataagagttaatagctatcctaaatttgaaatagtgataagcataatgaaaatagatgcaaaaaactaatgtgatatgaaaatatctgggtttttcttttgatgatgaagtattgctaatattaccgtggtttatgaactatgttcagaattgaagaaaatcctaactttcagttagaggttagtgacggggttcaggacaccctacacaaaatacagcactttgacatattgaatattttaagctgaaggcatttgaggaaattgcagaagcaggaaggtgactctgaccttctgcctgctgttctccccagaagcagccataaaacctgggaaggattttctgaccttcccctgaagtagatcataagactgtcatgtaagaggtgctctcctggcacccagagaaaaggagcatccttacctccaaaagcacagggacacaaagaggaatctaaacaaacaggcctctcagtttcccccagtttattacatttagcttgttcacactttgccctatgacatttctacatcactggctgctcttcatcaaacctactataaaaaacattcaagttcaactgtttctttgggcctttatttccttatggagcccctcgtgtcgtgtaaaacttatattaaataaatgtgcatgcttttctcttgctaatctctcttttgttatagagatctcagccctaaacctaggatggatagaaggaaacatatgttctcccctacattagtaaaaataaaaatggaattttttacccatacaaa

SEQ ID NO: 308614 - DNA, 3270 bp, Homo sapiens
  misc_feature (2119)..(2120): n is a, c, g, or t
  misc_feature (2126)..(2126): n is a, c, g, or t
gacaagggctcttcttgatggcttactgtatccactttgtccccaagaccatagggaaatgactagaggtgactgtactagctagattttaaatgaaaccgaaatgaaagttcacttcctcattttgagtacctcatgtgacaagttccaatttcttttcaagtcaattgaactgaaatctccttgttgctttgaaatcttagaagagagcccactaattcaaggactcttactgtgggagcaactgctggttctatcacaatgaaacggctggtttgtgtgctcttggtgtgctcctctgcagtggcacagttgcataaagatcctaccctggatcaccactggcatctctggaagaaaacctatggcaaacaatacaaggaaaagaatgaagaagcagtacgacgtctcatctgggaaaagaatctaaagtttgtgatgcttcacaacctggagcattcaatgggaatgcactcatacgatctgggcatgaaccacctgggagacatgaccagtgaagaagtgatgtctttgatgagttccctgagagttcccagccagtggcagagaaatatcacatataagtcaaaccctaatcggatattgcctgattctgtggactggagagagaaagggtgtgttactgaagtgaaatatcaaggttcttgtggtgcttgctgggctttcagtgctgtgggggccctggaagcacagctgaagctgaaaacaggaaagctggtgtctctcagtgcccagaacctggtggattgctcaactgaaaaatatggaaacaaaggctgcaatggtggcttcatgacaacggctttccagtacatcattgataacaagggcatcgactcagacgcttcctatccctacaaagccatggatcagaaatgtcaatatgactcaaaatatcgtgctgccacatgttcaaagtacactgaacttccttatggcagagaagatgtcctgaaagaagctgtggccaataaaggcccagtgtctgttggtgtagatgcgcgtcatccttctttcttcctctacagaagtggtgtctactatgaaccatcctgtactcagaatgtgaatcatggtgtacttgtggttggctatggtgatcttaatgggaaagaatactggcttgtgaaaaacagctggggccacaactttggtgaagaaggatatattcggatggcaagaaataaaggaaatcattgtgggattgctagctttccctcttacccagaaatctagaggatctctcctttttataacaaatcaagaaatatgaagcactttctcttaacttaatttttcctgctgtatccagaagaaataattgtgtcatgattaatgtgtatttactgtactaattagaaaatatagtttgaggccgggcacggtggctcacgcctgtaatcccagtacttgggaggccaaggcaggcatatcaacttgaggccaggagttaaagagcagcctggctaacatggtgaaaccccatctctactaaaaatacaaaaaattagccgagcacggtggtgcatgcctgtaatcccagctacttgggaggctgaggcacgagattccttgaacccaagaggttgaggctatgttgagctgagatcacaccactgtactccagcctggatgacagagtggagactctgtttcaaaaaaacagaaaagaaaatatagtttgattcttcatttttttaaatttgcaaatctcaggataaagtttgctaagtaaattagtaatgtactatagatataactgtacaaaaattgttcaacctaaaacaatctgtaattgcttattgttttattgtatactctttgtctttttaagacccctaatagccttttgtaacttgatggcttaaaaatacttaataaatctgccatttcaaatttctatcattgccacataccattcttattcctaggcaactattaataatctatcctgagaatattaattgtggtattctggtgatggggtttagcaactttgatggaagaaaatattaggctataaatgtcctaaggactcagattgtatctttgtacagaagaggattcaaaacgccacgtgtagtggctcatgcctgtnntcccgncactttgggaggctgaggtgggaggatcgtctcaaactcctgacctcaggtgatccacccaccccagcctcccaaggtgctgagattacaggcgtgagccactgagcccagcctacttttcagtttttaacataatttttgttttatccacaacttttcaagtattgaaagtagaataaaaacatgggttcttagtctttagctatctgttaaagcctatgaatgccttcttaaaatcatgtttttaaatgcataaaatatataggattacaaaggaatctaattatatcgaaatacagttattaaaatgttaaaagataagtttgttatatattaatatgcatgcttctttataaatgcattaaataagagttaatagctatcctaaatttgaaatagtgataagcataatgaaaatagatgcaaaaaactaatgtgatatgaaaatatctgggtttttcttttgatgatgaagtattgctaatattaccgtggtttatgaactatgttcagaattgaagaaaatcctaactttcagttagaggttagtgacggggttcaggacaccctacacaaaatacagcactttgacatattgaatattttaagctgaaggcatttgaggaaattgcagaagcaggaaggtgactctgaccttctgcctgctgttctccccagaagcagccataaaacctgggaaggattttctgaccttcccctgaagtagatcataagactgtcatgtaagaggtgctctcctggcacccagagaaaaggagcatccttacctccaaaagcacagggacacaaagaggaatctaaacaaacaggcctctcagtttcccccagtttattacatttagcttgttcacactttgccctatgacatttctacatcactggctgctcttcatcaaacctactataaaaaacattcaagttcaactgtttctttgggcctttatttccttatggagcccctcgtgtcgtgtaaaacttatattaaataaatgtgcatgcttttctcttgctaatctctcttttgttatagagatctcagccctaaacctaggatggatagaaggaaacatatgttctcccctacattagtaaaaataaaaatggaattttttacccatacaaa

SEQ ID NO: 308615 - DNA, 3923 bp, Homo sapiens
  misc_feature (1933)..(1934): n is a, c, g, or t
  misc_feature (1940)..(1940): n is a, c, g, or t
  misc_feature (2094)..(2094): n is a, c, g, or t
  misc_feature (2107)..(2107): n is a, c, g, or t
  misc_feature (2110)..(2110): n is a, c, g, or t
  misc_feature (2112)..(2112): n is a, c, g, or t
  misc_feature (2117)..(2117): n is a, c, g, or t
  misc_feature (2175)..(2175): n is a, c, g, or t
  misc_feature (2180)..(2181): n is a, c, g, or t
gacaagggctcttcttgatggcttactgtatccactttgtccccaagaccatagggaaatgactagaggtgactgtactagctagattttaaatgaaaccgaaatgaaagttcacttcctcattttgagtacctcatgtgacaagttccaatttcttttcaagtcaattgaactgaaatctccttgttgctttgaaatcttagaagagagcccactaattcaaggactcttactgtgggagcaactgctggttctatcacaatgaaacggctggtttgtgtgctcttggtgtgctcctctgcagtggcacagttgcataaagatcctaccctggatcaccactggcatctctggaagaaaacctatggcaaacaatacaaggaaaagaatgaagaagcagtacgacgtctcatctgggaaaagaatctaaagtttgtgatgcttcacaacctggagcattcaatgggaatgcactcatacgatctgggcatgaaccacctgggagacatgaccagtgaagaagtgatgtctttgatgagttccctgagagttcccagccagtggcagagaaatatcacatataagtcaaaccctaatcggatattgcctgattctgtggactggagagagaaagggtgtgttactgaagtgaaatatcaaggttcttgtggtgcttgctgggctttcagtgctgtgggggccctggaagcacagctgaagctgaaaacaggaaagctggtgtctctcagtgcccagaacctggtggattgctcaactgaaaaatatggaaacaaaggctgcaatggtggcttcatgacaacggctttccagtacatcattgataacaagggcatcgactcagacgcttcctatccctacaaagccatggatcagaaatgtcaatatgactcaaaatatcgtgctgccacatgttcaaagtacactgaacttccttatggcagagaagatgtcctgaaagaagctgtggccaataaaggcccagtgtctgttggtgtagatgcgcgtcatccttctttcttcctctacagaagtggtgtctactatgaaccatcctgtactcagaatgtgaatcatggtgtacttgtggttggctatggtgatcttaatgggaaagaatactggcttgtgaaaaacagctggggccacaactttggtgaagaaggatatattcggatggcaagaaataaaggaaatcattgtgggattgctagctttccctcttacccagaaatctagaggatctctcctttttataacaaatcaagaaatatgaagcactttctcttaacttaatttttcctgctgtatccagaagaaataattgtgtcatgattaatgtgtatttactgtactaattagaaaatatagtttgaggcacgagattccttgaacccaagaggttgaggctatgttgagctgagatcacaccactgtactccagcctggatgacagagtggagactctgtttcaaaaaaacagaaaagaaaatatagtttgattcttcatttttttaaatttgcaaatctcaggataaagtttgctaagtaaattagtaatgtactatagatataactgtacaaaaattgttcaacctaaaacaatctgtaattgcttattgttttattgtatactctttgtctttttaagacccctaatagccttttgtaacttgatggcttaaaaatacttaataaatctgccatttcaaatttctatcattgccacataccattcttattcctaggcaactattaataatctatcctgagaatattaattgtggtattctggtgatggggtttagcaactttgatggaagaaaatattaggctataaatgtcctaaggactcagattgtatctttgtacagaagaggattcaaaacgccacgtgtagtggctcatgcctgtnntcccgncactttgggaggctgaggtgggaggatcgtcttgagcccaggagttcgagaccagcctggacaacgtggtgagaccttgtctccacaaaaataaaaaagaaactatccaggagtggtggtgtgtgcctgtggtccctgctatgcagatgtctangacaggaggatcncangngcccnggaggttgagaatgcagtgagcttgtaattgcaccactgcactccagcctgggtgacngagcnngaccctgtcttaaaaaaagaggattcaacacatatttttatattatgttaaagtaaagaaatgcataaaagacaagcactttggaagaattattttaatgatcaacaatttaatgtattagtccaaattatttttacgtagtcatcaacaatttgaccagggcctttatttggcaaataactgagccaaccagaataaaataaccaatactccactgctcatatttttatctaattcagatggatcttccttacaactgctctagattagtagatgcatctaagcaggcagcaggaactttaaattttttaagttcatgtctatgacatgaacaatgtgtgggataatgtcattaatatatcctaaattaacctaaacgtatttcactaactctggctccttctccataaagcacattttaaggaacaagaattgctaaatataaaaacataaataataccataatacatggctatcatcaaaagtgtatagaatattatagtttaaaagtatttagttgattacttttcagttttgttttgttttttgagacggagtctcgctctgttgcccaggctggagtgcagtggcaccatctcagttcactgcaacttctgcctcccgggttcaagcgattctcctgcctcagcctcccgagtggctggaattataggcgtgcaccaccacgcccagctgatttttgtatttttggtggggacagggttttgccacattggccaggctggtctcaaactcctgacctcaggtgatccacccaccccagcctcccaaggtgctgagattacaggcgtgagccactgagcccagcctacttttcagtttttaacataatttttgttttatccacaacttttcaagtattgaaagtagaataaaaacatgggttcttagtctttagctatctgttaaagcctatgaatgccttcttaaaatcatgtttttaaatgcataaaatatataggattacaaaggaatctaattatatcgaaatacagttattaaaatgttaaaagataagtttgttatatattaatatgcatgcttctttataaatgcattaaataagagttaatagctatcctaaatttgaaatagtgataagcataatgaaaatagatgcaaaaaactaatgtgatatgaaaatatctgggtttttcttttgatgatgaagtattgctaatattaccgtggtttatgaactatgttcagaattgaagaaaatcctaactttcagttagaggttagtgacggggttcaggacaccctacacaaaatacagcactttgacatattgaatattttaagctgaaggcatttgaggaaattgcagaagcaggaaggtgactctgaccttctgcctgctgttctccccagaagcagccataaaacctgggaaggattttctgaccttcccctgaagtagatcataagactgtcatgtaagaggtgctctcctggcacccagagaaaaggagcatccttacctccaaaagcacagggacacaaagaggaatctaaacaaacaggcctctcagtttcccccagtttattacatttagcttgttcacactttgccctatgacatttctacatcactggctgctcttcatcaaacctactataaaaaacattcaagttcaactgtttctttgggcctttatttccttatggagcccctcgtgtcgtgtaaaacttatattaaataaatgtgcatgcttttc

SEQ ID NO: 308616 - DNA, 3968 bp, Homo sapiens
  misc_feature (1978)..(1979): n is a, c, g, or t
  misc_feature (1985)..(1985): n is a, c, g, or t
  misc_feature (2139)..(2139): n is a, c, g, or t
  misc_feature (2152)..(2152): n is a, c, g, or t
  misc_feature (2155)..(2155): n is a, c, g, or t
  misc_feature (2157)..(2157): n is a, c, g, or t
  misc_feature (2162)..(2162): n is a, c, g, or t
  misc_feature (2220)..(2220): n is a, c, g, or t
  misc_feature (2225)..(2226): n is a, c, g, or t
gacaagggctcttcttgatggcttactgtatccactttgtccccaagaccatagggaaatgactagaggtgactgtactagctagattttaaatgaaaccgaaatgaaagttcacttcctcattttgagtacctcatgtgacaagttccaatttcttttcaagtcaattgaactgaaatctccttgttgctttgaaatcttagaagagagcccactaattcaaggactcttactgtgggagcaactgctggttctatcacaatgaaacggctggtttgtgtgctcttggtgtgctcctctgcagtggcacagttgcataaagatcctaccctggatcaccactggcatctctggaagaaaacctatggcaaacaatacaaggaaaagaatgaagaagcagtacgacgtctcatctgggaaaagaatctaaagtttgtgatgcttcacaacctggagcattcaatgggaatgcactcatacgatctgggcatgaaccacctgggagacatgaccagtgaagaagtgatgtctttgatgagttccctgagagttcccagccagtggcagagaaatatcacatataagtcaaaccctaatcggatattgcctgattctgtggactggagagagaaagggtgtgttactgaagtgaaatatcaaggttcttgtggtgcttgctgggctttcagtgctgtgggggccctggaagcacagctgaagctgaaaacaggaaagctggtgtctctcagtgcccagaacctggtggattgctcaactgaaaaatatggaaacaaaggctgcaatggtggcttcatgacaacggctttccagtacatcattgataacaagggcatcgactcagacgcttcctatccctacaaagccatggatcagaaatgtcaatatgactcaaaatatcgtgctgccacatgttcaaagtacactgaacttccttatggcagagaagatgtcctgaaagaagctgtggccaataaaggcccagtgtctgttggtgtagatgcgcgtcatccttctttcttcctctacagaagtggtgtctactatgaaccatcctgtactcagaatgtgaatcatggtgtacttgtggttggctatggtgatcttaatgggaaagaatactggcttgtgaaaaacagctggggccacaactttggtgaagaaggatatattcggatggcaagaaataaaggaaatcattgtgggattgctagctttccctcttacccagaaatctagaggatctctcctttttataacaaatcaagaaatatgaagcactttctcttaacttaatttttcctgctgtatccagaagaaataattgtgtcatgattaatgtgtatttactgtataaaaatacaaaaaattagccgagcacggtggtgcatgcctgtaatcccagctacttgggaggctgaggcacgagattccttgaacccaagaggttgaggctatgttgagctgagatcacaccactgtactccagcctggatgacagagtggagactctgtttcaaaaaaacagaaaagaaaatatagtttgattcttcatttttttaaatttgcaaatctcaggataaagtttgctaagtaaattagtaatgtactatagatataactgtacaaaaattgttcaacctaaaacaatctgtaattgcttattgttttattgtatactctttgtctttttaagacccctaatagccttttgtaacttgatggcttaaaaatacttaataaatctgccatttcaaatttctatcattgccacataccattcttattcctaggcaactattaataatctatcctgagaatattaattgtggtattctggtgatggggtttagcaactttgatggaagaaaatattaggctataaatgtcctaaggactcagattgtatctttgtacagaagaggattcaaaacgccacgtgtagtggctcatgcctgtnntcccgncactttgggaggctgaggtgggaggatcgtcttgagcccaggagttcgagaccagcctggacaacgtggtgagaccttgtctccacaaaaataaaaaagaaactatccaggagtggtggtgtgtgcctgtggtccctgctatgcagatgtctangacaggaggatcncangngcccnggaggttgagaatgcagtgagcttgtaattgcaccactgcactccagcctgggtgacngagcnngaccctgtcttaaaaaaagaggattcaacacatatttttatattatgttaaagtaaagaaatgcataaaagacaagcactttggaagaattattttaatgatcaacaatttaatgtattagtccaaattatttttacgtagtcatcaacaatttgaccagggcctttatttggcaaataactgagccaaccagaataaaataaccaatactccactgctcatatttttatctaattcagatggatcttccttacaactgctctagattagtagatgcatctaagcaggcagcaggaactttaaattttttaagttcatgtctatgacatgaacaatgtgtgggataatgtcattaatatatcctaaattaacctaaacgtatttcactaactctggctccttctccataaagcacattttaaggaacaagaattgctaaatataaaaacataaataataccataatacatggctatcatcaaaagtgtatagaatattatagtttaaaagtatttagttgattacttttcagttttgttttgttttttgagacggagtctcgctctgttgcccaggctggagtgcagtggcaccatctcagttcactgcaacttctgcctcccgggttcaagcgattctcctgcctcagcctcccgagtggctggaattataggcgtgcaccaccacgcccagctgatttttgtatttttggtggggacagggttttgccacattggccaggctggtctcaaactcctgacctcaggtgatccacccaccccagcctcccaaggtgctgagattacaggcgtgagccactgagcccagcctacttttcagtttttaacataatttttgttttatccacaacttttcaagtattgaaagtagaataaaaacatgggttcttagtctttagctatctgttaaagcctatgaatgccttcttaaaatcatgtttttaaatgcataaaatatataggattacaaaggaatctaattatatcgaaatacagttattaaaatgttaaaagataagtttgttatatattaatatgcatgcttctttataaatgcattaaataagagttaatagctatcctaaatttgaaatagtgataagcataatgaaaatagatgcaaaaaactaatgtgatatgaaaatatctgggtttttcttttgatgatgaagtattgctaatattaccgtggtttatgaactatgttcagaattgaagaaaatcctaactttcagttagaggttagtgacggggttcaggacaccctacacaaaatacagcactttgacatattgaatattttaagctgaaggcatttgaggaaattgcagaagcaggaaggtgactctgaccttctgcctgctgttctccccagaagcagccataaaacctgggaaggattttctgaccttcccctgaagtagatcataagactgtcatgtaagaggtgctctcctggcacccagagaaaaggagcatccttacctccaaaagcacagggacacaaagaggaatctaaacaaacaggcctctcagtttcccccagtttattacatttagcttgttcacactttgccctatgacatttctacatcactggctgctcttcatcaaacctactataaaaaacattcaagttcaactgtttctttgggcctttatttccttatggagcccctcgtgtcgtgtaaaacttatattaaataaatgtgcatgcttttc

SEQ ID NO: 308617 - DNA, 4230 bp, Homo sapiens
  misc_feature (2240)..(2241): n is a, c, g, or t
  misc_feature (2247)..(2247): n is a, c, g, or t
  misc_feature (2401)..(2401): n is a, c, g, or t
  misc_feature (2414)..(2414): n is a, c, g, or t
  misc_feature (2417)..(2417): n is a, c, g, or t
  misc_feature (2419)..(2419): n is a, c, g, or t
  misc_feature (2424)..(2424): n is a, c, g, or t
  misc_feature (2482)..(2482): n is a, c, g, or t
  misc_feature (2487)..(2488): n is a, c, g, or t
gacaagggctcttcttgatggcttactgtatccactttgtccccaagaccatagggaaatgactagaggtgactgtactagctagattttaaatgaaaccgaaatgaaagttcacttcctcattttgagtacctcatgtgacaagttccaatttcttttcaagtcaattgaactgaaatctccttgttgctttgaaatcttagaagagagcccactaattcaaggactcttactgtgggagcaactgctggttctatcacaatgaaacggctggtttgtgtgctcttggtgtgctcctctgcagtggcacagttgcataaagatcctaccctggatcaccactggcatctctggaagaaaacctatggcaaacaatacaaggaaaagaatgaagaagcagtacgacgtctcatctgggaaaagaatctaaagtttgtgatgcttcacaacctggagcattcaatgggaatgcactcatacgatctgggcatgaaccacctgggagacatgaccagtgaagaagtgatgtctttgatgagttccctgagagttcccagccagtggcagagaaatatcacatataagtcaaaccctaatcggatattgcctgattctgtggactggagagagaaagggtgtgttactgaagtgaaatatcaaggttcttgtggtgcttgctgggctttcagtgctgtgggggccctggaagcacagctgaagctgaaaacaggaaagctggtgtctctcagtgcccagaacctggtggattgctcaactgaaaaatatggaaacaaaggctgcaatggtggcttcatgacaacggctttccagtacatcattgataacaagggcatcgactcagacgcttcctatccctacaaagccatggatcagaaatgtcaatatgactcaaaatatcgtgctgccacatgttcaaagtacactgaacttccttatggcagagaagatgtcctgaaagaagctgtggccaataaaggcccagtgtctgttggtgtagatgcgcgtcatccttctttcttcctctacagaagtgatggagtcttgctctgttgccaggctggagtgaggtggcacgatctcagctcactgcaacctctgcctcctgggttcaagcaattctcctgcctcagcctcctgagtagctgggactacaggtgtctactatgaaccatcctgtactcagaatgtgaatcatggtgtacttgtggttggctatggtgatcttaatgggaaagaatactggcttgtgaaaaacagctggggccacaactttggtgaagaaggatatattcggatggcaagaaataaaggaaatcattgtgggattgctagctttccctcttacccagaaatctagaggatctctcctttttataacaaatcaagaaatatgaagcactttctcttaacttaatttttcctgctgtatccagaagaaataattgtgtcatgattaatgtgtatttactgtactaattagaaaatatagtttgaggccgggcacggtggctcacgcctgtaatcccagtacttgggaggccaaggcaggcatatcaacttgaggccaggagttaaagagcagcctggctaacatggtgaaaccccatctctactaaaaatacaaaaaattagccgagcacggtggtgcatgcctgtaatcccagctacttgggaggctgaggcacgagattccttgaacccaagaggttgaggctatgttgagctgagatcacaccactgtactccagcctggatgacagagtggagactctgtttcaaaaaaacagaaaagaaaatatagtttgattcttcatttttttaaatttgcaaatctcaggataaagtttgctaagtaaattagtaatgtactatagatataactgtacaaaaattgttcaacctaaaacaatctgtaattgcttattgttttattgtatactctttgtctttttaagacccctaatagccttttgtaacttgatggcttaaaaatacttaataaatctgccatttcaaatttctatcattgccacataccattcttattcctaggcaactattaataatctatcctgagaatattaattgtggtattctggtgatggggtttagcaactttgatggaagaaaatattaggctataaatgtcctaaggactcagattgtatctttgtacagaagaggattcaaaacgccacgtgtagtggctcatgcctgtnntcccgncactttgggaggctgaggtgggaggatcgtcttgagcccaggagttcgagaccagcctggacaacgtggtgagaccttgtctccacaaaaataaaaaagaaactatccaggagtggtggtgtgtgcctgtggtccctgctatgcagatgtctangacaggaggatcncangngcccnggaggttgagaatgcagtgagcttgtaattgcaccactgcactccagcctgggtgacngagcnngaccctgtcttaaaaaaagaggattcaacacatatttttatattatgttaaagtaaagaaatgcataaaagacaagcactttggaagaattattttaatgatcaacaatttaatgtattagtccaaattatttttacgtagtcatcaacaatttgaccagggcctttatttggcaaataactgagccaaccagaataaaataaccaatactccactgctcatatttttatctaattcagatggatcttccttacaactgctctagattagtagatgcatctaagcaggcagcaggaactttaaattttttaagttcatgtctatgacatgaacaatgtgtgggataatgtcattaatatatcctaaattaacctaaacgtatttcactaactctggctccttctccataaagcacattttaaggaacaagaattgctaaatataaaaacataaataataccataatacatggctatcatcaaaagtgtatagaatattatagtttaaaagtatttagttgattacttttcagttttgttttgttttttgagacggagtctcgctctgttgcccaggctggagtgcagtggcaccatctcagttcactgcaacttctgcctcccgggttcaagcgattctcctgcctcagcctcccgagtggctggaattataggcgtgcaccaccacgcccagctgatttttgtatttttggtggggacagggttttgccacattggccaggctggtctcaaactcctgacctcaggtgatccacccaccccagcctcccaaggtgctgagattacaggcgtgagccactgagcccagcctacttttcagtttttaacataatttttgttttatccacaacttttcaagtattgaaagtagaataaaaacatgggttcttagtctttagctatctgttaaagcctatgaatgccttcttaaaatcatgtttttaaatgcataaaatatataggattacaaaggaatctaattatatcgaaatacagttattaaaatgttaaaagataagtttgttatatattaatatgcatgcttctttataaatgcattaaataagagttaatagctatcctaaatttgaaatagtgataagcataatgaaaatagatgcaaaaaactaatgtgatatgaaaatatctgggtttttcttttgatgatgaagtattgctaatattaccgtggtttatgaactatgttcagaattgaagaaaatcctaactttcagttagaggttagtgacggggttcaggacaccctacacaaaatacagcactttgacatattgaatattttaagctgaaggcatttgaggaaattgcagaagcaggaaggtgactctgaccttctgcctgctgttctccccagaagcagccataaaacctgggaaggattttctgaccttcccctgaagtagatcataagactgtcatgtaagaggtgctctcctggcacccagagaaaaggagcatccttacctccaaaagcacagggacacaaagaggaatctaaacaaacaggcctctcagtttcccccagtttattacatttagcttgttcacactttgccctatgacatttctacatcactggctgctcttcatcaaacctactataaaaaacattcaagttcaactgtttctttgggcctttatttccttatggagcccctcgtgtcgtgtaaaacttatattaaataaatgtgcatgcttttc

SEQ ID NO: 308618 - DNA, 2448 bp, Homo sapiens
gacaagggctcttcttgatggcttactgtatccactttgtccccaagaccatagggaaatgactagaggtgactgtactagctagattttaaatgaaaccgaaatgaaagttcacttcctcattttgagtacctcatgtgacaagttccaatttcttttcaagtcaattgaactgaaatctccttgttgctttgaaatcttagaagagagcccactaattcaaggactcttactgtgggagcaactgctggttctatcacaatgaaacggctggtttgtgtgctcttggtgtgctcctctgcagtggcacagttgcataaagatcctaccctggatcaccactggcatctctggaagaaaacctatggcaaacaatacaaggaaaagaatgaagaagcagtacgacgtctcatctgggaaaagaatctaaagtttgtgatgcttcacaacctggagcattcaatgggaatgcactcatacgatctgggcatgaaccacctgggagacatgaccagtgaagaagtgatgtctttgatgagttccctgagagttcccagccagtggcagagaaatatcacatataagtcaaaccctaatcggatattgcctgattctgtggactggagagagaaagggtgtgttactgaagtgaaatatcaaggttcttgtggtgcttgctgggctttcagtgctgtgggggccctggaagcacagctgaagctgaaaacaggaaagctggtgtctctcagtgcccagaacctggtggattgctcaactgaaaaatatggaaacaaaggctgcaatggtggcttcatgacaacggctttccagtacatcattgataacaagggcatcgactcagacgcttcctatccctacaaagccatggatcagaaatgtcaatatgactcaaaatatcgtgctgccacatgttcaaagtacactgaacttccttatggcagagaagatgtcctgaaagaagctgtggccaataaaggcccagtgtctgttggtgtagatgcgcgtcatccttctttcttcctctacagaagtggtgtctactatgaaccatcctgtactcagaatgtgaatcatggtgtacttgtggttggctatggtgatcttaatgggaaagaatactggcttgtgaaaaacagctggggccacaactttggtgaagaaggatatattcggatggcaagaaataaaggaaatcattgtgggattgctagctttccctcttacccagaaatctagaggatctctcctttttataacaaatcaagaaatatgaagcactttctcttaacttaatttttcctgctgtatccagaagaaataattgtgtcatgattaatgtgtatttactgtactaattagaaaatatagtttgaggcgtgagccactgagcccagcctacttttcagtttttaacataatttttgttttatccacaacttttcaagtattgaaagtagaataaaaacatgggttcttagtctttagctatctgttaaagcctatgaatgccttcttaaaatcatgtttttaaatgcataaaatatataggattacaaaggaatctaattatatcgaaatacagttattaaaatgttaaaagataagtttgttatatattaatatgcatgcttctttataaatgcattaaataagagttaatagctatcctaaatttgaaatagtgataagcataatgaaaatagatgcaaaaaactaatgtgatatgaaaatatctgggtttttcttttgatgatgaagtattgctaatattaccgtggtttatgaactatgttcagaattgaagaaaatcctaactttcagttagaggttagtgacggggttcaggacaccctacacaaaatacagcactttgacatattgaatattttaagctgaaggcatttgaggaaattgcagaagcaggaaggtgactctgaccttctgcctgctgttctccccagaagcagccataaaacctgggaaggattttctgaccttcccctgaagtagatcataagactgtcatgtaagaggtgctctcctggcacccagagaaaaggagcatccttacctccaaaagcacagggacacaaagaggaatctaaacaaacaggcctctcagtttcccccagtttattacatttagcttgttcacactttgccctatgacatttctacatcactggctgctcttcatcaaacctactataaaaaacattcaagttcaactgtttctttgggcctttatttccttatggagcccctcgtgtcgtgtaaaacttatattaaataaatgtgcatgcttttctcttgctaatctctcttttgttatagagatctcagccctaaacctaggatggatagaaggaaacatatgttctcccctacattagtaaaaataaaaatggaattttttacccatacaaa

SEQ ID NO: 308619 - DNA, 4056 bp, Homo sapiens
  misc_feature (2066)..(2067): n is a, c, g, or t
  misc_feature (2073)..(2073): n is a, c, g, or t
  misc_feature (2227)..(2227): n is a, c, g, or t
  misc_feature (2240)..(2240): n is a, c, g, or t
  misc_feature (2243)..(2243): n is a, c, g, or t
  misc_feature (2245)..(2245): n is a, c, g, or t
  misc_feature (2250)..(2250): n is a, c, g, or t
  misc_feature (2308)..(2308): n is a, c, g, or t
  misc_feature (2313)..(2314): n is a, c, g, or t
gacaagggctcttcttgatggcttactgtatccactttgtccccaagaccatagggaaatgactagaggtgactgtactagctagattttaaatgaaaccgaaatgaaagttcacttcctcattttgagtacctcatgtgacaagttccaatttcttttcaagtcaattgaactgaaatctccttgttgctttgaaatcttagaagagagcccactaattcaaggactcttactgtgggagcaactgctggttctatcacaatgaaacggctggtttgtgtgctcttggtgtgctcctctgcagtggcacagttgcataaagatcctaccctggatcaccactggcatctctggaagaaaacctatggcaaacaatacaaggaaaagaatgaagaagcagtacgacgtctcatctgggaaaagaatctaaagtttgtgatgcttcacaacctggagcattcaatgggaatgcactcatacgatctgggcatgaaccacctgggagacatgaccagtgaagaagtgatgtctttgatgagttccctgagagttcccagccagtggcagagaaatatcacatataagtcaaaccctaatcggatattgcctgattctgtggactggagagagaaagggtgtgttactgaagtgaaatatcaaggttcttgtggtgcttgctgggctttcagtgctgtgggggccctggaagcacagctgaagctgaaaacaggaaagctggtgtctctcagtgcccagaacctggtggattgctcaactgtacatcattgataacaagggcatcgactcagacgcttcctatccctacaaagccatggatcagaaatgtcaatatgactcaaaatatcgtgctgccacatgttcaaagtacactgaacttccttatggcagagaagatgtcctgaaagaagctgtggccaataaaggcccagtgtctgttggtgtagatgcgcgtcatccttctttcttcctctacagaagtggtgtctactatgaaccatcctgtactcagaatgtgaatcatggtgtacttgtggttggctatggtgatcttaatgggaaagaatactggcttgtgaaaaacagctggggccacaactttggtgaagaaggatatattcggatggcaagaaataaaggaaatcattgtgggattgctagctttccctcttacccagaaatctagaggatctctcctttttataacaaatcaagaaatatgaagcactttctcttaacttaatttttcctgctgtatccagaagaaataattgtgtcatgattaatgtgtatttactgtactaattagaaaatatagtttgaggccgggcacggtggctcacgcctgtaatcccagtacttgggaggccaaggcaggcatatcaacttgaggccaggagttaaagagcagcctggctaacatggtgaaaccccatctctactaaaaatacaaaaaattagccgagcacggtggtgcatgcctgtaatcccagctacttgggaggctgaggcacgagattccttgaacccaagaggttgaggctatgttgagctgagatcacaccactgtactccagcctggatgacagagtggagactctgtttcaaaaaaacagaaaagaaaatatagtttgattcttcatttttttaaatttgcaaatctcaggataaagtttgctaagtaaattagtaatgtactatagatataactgtacaaaaattgttcaacctaaaacaatctgtaattgcttattgttttattgtatactctttgtctttttaagacccctaatagccttttgtaacttgatggcttaaaaatacttaataaatctgccatttcaaatttctatcattgccacataccattcttattcctaggcaactattaataatctatcctgagaatattaattgtggtattctggtgatggggtttagcaactttgatggaagaaaatattaggctataaatgtcctaaggactcagattgtatctttgtacagaagaggattcaaaacgccacgtgtagtggctcatgcctgtnntcccgncactttgggaggctgaggtgggaggatcgtcttgagcccaggagttcgagaccagcctggacaacgtggtgagaccttgtctccacaaaaataaaaaagaaactatccaggagtggtggtgtgtgcctgtggtccctgctatgcagatgtctangacaggaggatcncangngcccnggaggttgagaatgcagtgagcttgtaattgcaccactgcactccagcctgggtgacngagcnngaccctgtcttaaaaaaagaggattcaacacatatttttatattatgttaaagtaaagaaatgcataaaagacaagcactttggaagaattattttaatgatcaacaatttaatgtattagtccaaattatttttacgtagtcatcaacaatttgaccagggcctttatttggcaaataactgagccaaccagaataaaataaccaatactccactgctcatatttttatctaattcagatggatcttccttacaactgctctagattagtagatgcatctaagcaggcagcaggaactttaaattttttaagttcatgtctatgacatgaacaatgtgtgggataatgtcattaatatatcctaaattaacctaaacgtatttcactaactctggctccttctccataaagcacattttaaggaacaagaattgctaaatataaaaacataaataataccataatacatggctatcatcaaaagtgtatagaatattatagtttaaaagtatttagttgattacttttcagttttgttttgttttttgagacggagtctcgctctgttgcccaggctggagtgcagtggcaccatctcagttcactgcaacttctgcctcccgggttcaagcgattctcctgcctcagcctcccgagtggctggaattataggcgtgcaccaccacgcccagctgatttttgtatttttggtggggacagggttttgccacattggccaggctggtctcaaactcctgacctcaggtgatccacccaccccagcctcccaaggtgctgagattacaggcgtgagccactgagcccagcctacttttcagtttttaacataatttttgttttatccacaacttttcaagtattgaaagtagaataaaaacatgggttcttagtctttagctatctgttaaagcctatgaatgccttcttaaaatcatgtttttaaatgcataaaatatataggattacaaaggaatctaattatatcgaaatacagttattaaaatgttaaaagataagtttgttatatattaatatgcatgcttctttataaatgcattaaataagagttaatagctatcctaaatttgaaatagtgataagcataatgaaaatagatgcaaaaaactaatgtgatatgaaaatatctgggtttttcttttgatgatgaagtattgctaatattaccgtggtttatgaactatgttcagaattgaagaaaatcctaactttcagttagaggttagtgacggggttcaggacaccctacacaaaatacagcactttgacatattgaatattttaagctgaaggcatttgaggaaattgcagaagcaggaaggtgactctgaccttctgcctgctgttctccccagaagcagccataaaacctgggaaggattttctgaccttcccctgaagtagatcataagactgtcatgtaagaggtgctctcctggcacccagagaaaaggagcatccttacctccaaaagcacagggacacaaagaggaatctaaacaaacaggcctctcagtttcccccagtttattacatttagcttgttcacactttgccctatgacatttctacatcactggctgctcttcatcaaacctactataaaaaacattcaagttcaactgtttctttgggcctttatttccttatggagcccctcgtgtcgtgtaaaacttatattaaataaatgtgcatgcttttc

SEQ ID NO: 308620 - DNA, 3943 bp, Homo sapiens
  misc_feature (1953)..(1954): n is a, c, g, or t
  misc_feature (1960)..(1960): n is a, c, g, or t
  misc_feature (2114)..(2114): n is a, c, g, or t
  misc_feature (2127)..(2127): n is a, c, g, or t
  misc_feature (2130)..(2130): n is a, c, g, or t
  misc_feature (2132)..(2132): n is a, c, g, or t
  misc_feature (2137)..(2137): n is a, c, g, or t
  misc_feature (2195)..(2195): n is a, c, g, or t
  misc_feature (2200)..(2201): n is a, c, g, or t
gacaagggctcttcttgatggcttactgtatccactttgtccccaagaccatagggaaatgactagaggtgactgtactagctagattttaaatgaaaccgaaatgaaagttcacttcctcattttgagtacctcatgtgacaagttccaatttcttttcaagtcaattgaactgaaatctccttgttgctttgaaatcttagaagagagcccactaattcaaggactcttactgtgggagcaactgctggttctatcacaatgaaacggctggtttgtgtgctcttggtgtgctcctctgcagtggcacagttgcataaagatcctaccctggatcaccactggcatctctggaagaaaacctatggcaaacaatacaaggaaaagaatgaagaagcagtacgacgtctcatctgggaaaagaatctaaagtttgtgatgcttcacaacctggagcattcaatgggaatgcactcatacgatctgggcatgaaccacctgggagacatgaccagtgaagaagtgatgtctttgatgagttccctgagagttcccagccagtggcagagaaatatcacatataagtcaaaccctaatcggatattgcctgattctgtggactggagagagaaagggtgtgttactgaagtgaaatatcaaggttcttgtggtgcttgctgggctttcagtgctgtgggggccctggaagcacagctgaagctgaaaacaggaaagctggtgtctctcagtgcccagaacctggtggattgctcaactgaaaaatatggaaacaaaggctgcaatggtggcttcatgacaacggctttccagtacatcattgataacaagggcatcgactcagacgcttcctatccctacaaagccatggtgtctactatgaaccatcctgtactcagaatgtgaatcatggtgtacttgtggttggctatggtgatcttaatgggaaagaatactggcttgtgaaaaacagctggggccacaactttggtgaagaaggatatattcggatggcaagaaataaaggaaatcattgtgggattgctagctttccctcttacccagaaatctagaggatctctcctttttataacaaatcaagaaatatgaagcactttctcttaacttaatttttcctgctgtatccagaagaaataattgtgtcatgattaatgtgtatttactgtactaattagaaaatatagtttgaggccgggcacggtggctcacgcctgtaatcccagtacttgggaggccaaggcaggcatatcaacttgaggccaggagttaaagagcagcctggctaacatggtgaaaccccatctctactaaaaatacaaaaaattagccgagcacggtggtgcatgcctgtaatcccagctacttgggaggctgaggcacgagattccttgaacccaagaggttgaggctatgttgagctgagatcacaccactgtactccagcctggatgacagagtggagactctgtttcaaaaaaacagaaaagaaaatatagtttgattcttcatttttttaaatttgcaaatctcaggataaagtttgctaagtaaattagtaatgtactatagatataactgtacaaaaattgttcaacctaaaacaatctgtaattgcttattgttttattgtatactctttgtctttttaagacccctaatagccttttgtaacttgatggcttaaaaatacttaataaatctgccatttcaaatttctatcattgccacataccattcttattcctaggcaactattaataatctatcctgagaatattaattgtggtattctggtgatggggtttagcaactttgatggaagaaaatattaggctataaatgtcctaaggactcagattgtatctttgtacagaagaggattcaaaacgccacgtgtagtggctcatgcctgtnntcccgncactttgggaggctgaggtgggaggatcgtcttgagcccaggagttcgagaccagcctggacaacgtggtgagaccttgtctccacaaaaataaaaaagaaactatccaggagtggtggtgtgtgcctgtggtccctgctatgcagatgtctangacaggaggatcncangngcccnggaggttgagaatgcagtgagcttgtaattgcaccactgcactccagcctgggtgacngagcnngaccctgtcttaaaaaaagaggattcaacacatatttttatattatgttaaagtaaagaaatgcataaaagacaagcactttggaagaattattttaatgatcaacaatttaatgtattagtccaaattatttttacgtagtcatcaacaatttgaccagggcctttatttggcaaataactgagccaaccagaataaaataaccaatactccactgctcatatttttatctaattcagatggatcttccttacaactgctctagattagtagatgcatctaagcaggcagcaggaactttaaattttttaagttcatgtctatgacatgaacaatgtgtgggataatgtcattaatatatcctaaattaacctaaacgtatttcactaactctggctccttctccataaagcacattttaaggaacaagaattgctaaatataaaaacataaataataccataatacatggctatcatcaaaagtgtatagaatattatagtttaaaagtatttagttgattacttttcagttttgttttgttttttgagacggagtctcgctctgttgcccaggctggagtgcagtggcaccatctcagttcactgcaacttctgcctcccgggttcaagcgattctcctgcctcagcctcccgagtggctggaattataggcgtgcaccaccacgcccagctgatttttgtatttttggtggggacagggttttgccacattggccaggctggtctcaaactcctgacctcaggtgatccacccaccccagcctcccaaggtgctgagattacaggcgtgagccactgagcccagcctacttttcagtttttaacataatttttgttttatccacaacttttcaagtattgaaagtagaataaaaacatgggttcttagtctttagctatctgttaaagcctatgaatgccttcttaaaatcatgtttttaaatgcataaaatatataggattacaaaggaatctaattatatcgaaatacagttattaaaatgttaaaagataagtttgttatatattaatatgcatgcttctttataaatgcattaaataagagttaatagctatcctaaatttgaaatagtgataagcataatgaaaatagatgcaaaaaactaatgtgatatgaaaatatctgggtttttcttttgatgatgaagtattgctaatattaccgtggtttatgaactatgttcagaattgaagaaaatcctaactttcagttagaggttagtgacggggttcaggacaccctacacaaaatacagcactttgacatattgaatattttaagctgaaggcatttgaggaaattgcagaagcaggaaggtgactctgaccttctgcctgctgttctccccagaagcagccataaaacctgggaaggattttctgaccttcccctgaagtagatcataagactgtcatgtaagaggtgctctcctggcacccagagaaaaggagcatccttacctccaaaagcacagggacacaaagaggaatctaaacaaacaggcctctcagtttcccccagtttattacatttagcttgttcacactttgccctatgacatttctacatcactggctgctcttcatcaaacctactataaaaaacattcaagttcaactgtttctttgggcctttatttccttatggagcccctcgtgtcgtgtaaaacttatattaaataaatgtgcatgcttttc

SEQ ID NO: 308621 - DNA, 3925 bp, Homo sapiens
  misc_feature (1935)..(1936): n is a, c, g, or t
  misc_feature (1942)..(1942): n is a, c, g, or t
  misc_feature (2096)..(2096): n is a, c, g, or t
  misc_feature (2109)..(2109): n is a, c, g, or t
  misc_feature (2112)..(2112): n is a, c, g, or t
  misc_feature (2114)..(2114): n is a, c, g, or t
  misc_feature (2119)..(2119): n is a, c, g, or t
  misc_feature (2177)..(2177): n is a, c, g, or t
  misc_feature (2182)..(2183): n is a, c, g, or t
gcccaccggcgcgctgagtctagttaccatcacaccccgggaggagtcgtagttgtctgcagccggccccagtctagcgcatcgacgctgcaatcagtgagtcagcgatggtcgcgagagccagcgagttgcataaagatcctaccctggatcaccactggcatctctggaagaaaacctatggcaaacaatacaaggaaaagaatgaagaagcagtacgacgtctcatctgggaaaagaatctaaagtttgtgatgcttcacaacctggagcattcaatgggaatgcactcatacgatctgggcatgaaccacctgggagacatgaccagtgaagaagtgatgtctttgatgagttccctgagagttcccagccagtggcagagaaatatcacatataagtcaaaccctaatcggatattgcctgattctgtggactggagagagaaagggtgtgttactgaagtgaaatatcaaggttcttgtggtgcttgctgggctttcagtgctgtgggggccctggaagcacagctgaagctgaaaacaggaaagctggtgtctctcagtgcccagaacctggtggattgctcaactgaaaaatatggaaacaaaggctgcaatggtggcttcatgacaacggctttccagtacatcattgataacaagggcatcgactcagacgcttcctatccctacaaagccatggatcagaaatgtcaatatgactcaaaatatcgtgctgccacatgttcaaagtacactgaacttccttatggcagagaagatgtcctgaaagaagctgtggccaataaaggcccagtgtctgttggtgtagatgcgcgtcatccttctttcttcctctacagaagtggtgtctactatgaaccatcctgtactcagaatgtgaatcatggtgtacttgtggttggctatggtgatcttaatgggaaagaatactggcttgtgaaaaacagctggggccacaactttggtgaagaaggatatattcggatggcaagaaataaaggaaatcattgtgggattgctagctttccctcttacccagaaatctagaggatctctcctttttataacaaatcaagaaatatgaagcactttctcttaacttaatttttcctgctgtatccagaagaaataattgtgtcatgattaatgtgtatttactgtactaattagaaaatatagtttgaggccgggcacggtggctcacgcctgtaatcccagtacttgggaggccaaggcaggcatatcaacttgaggccaggagttaaagagcagcctggctaacatggtgaaaccccatctctactaaaaatacaaaaaattagccgagcacggtggtgcatgcctgtaatcccagctacttgggaggctgaggcacgagattccttgaacccaagaggttgaggctatgttgagctgagatcacaccactgtactccagcctggatgacagagtggagactctgtttcaaaaaaacagaaaagaaaatatagtttgattcttcatttttttaaatttgcaaatctcaggataaagtttgctaagtaaattagtaatgtactatagatataactgtacaaaaattgttcaacctaaaacaatctgtaattgcttattgttttattgtatactctttgtctttttaagacccctaatagccttttgtaacttgatggcttaaaaatacttaataaatctgccatttcaaatttctatcattgccacataccattcttattcctaggcaactattaataatctatcctgagaatattaattgtggtattctggtgatggggtttagcaactttgatggaagaaaatattaggctataaatgtcctaaggactcagattgtatctttgtacagaagaggattcaaaacgccacgtgtagtggctcatgcctgtnntcccgncactttgggaggctgaggtgggaggatcgtcttgagcccaggagttcgagaccagcctggacaacgtggtgagaccttgtctccacaaaaataaaaaagaaactatccaggagtggtggtgtgtgcctgtggtccctgctatgcagatgtctangacaggaggatcncangngcccnggaggttgagaatgcagtgagcttgtaattgcaccactgcactccagcctgggtgacngagcnngaccctgtcttaaaaaaagaggattcaacacatatttttatattatgttaaagtaaagaaatgcataaaagacaagcactttggaagaattattttaatgatcaacaatttaatgtattagtccaaattatttttacgtagtcatcaacaatttgaccagggcctttatttggcaaataactgagccaaccagaataaaataaccaatactccactgctcatatttttatctaattcagatggatcttccttacaactgctctagattagtagatgcatctaagcaggcagcaggaactttaaattttttaagttcatgtctatgacatgaacaatgtgtgggataatgtcattaatatatcctaaattaacctaaacgtatttcactaactctggctccttctccataaagcacattttaaggaacaagaattgctaaatataaaaacataaataataccataatacatggctatcatcaaaagtgtatagaatattatagtttaaaagtatttagttgattacttttcagttttgttttgttttttgagacggagtctcgctctgttgcccaggctggagtgcagtggcaccatctcagttcactgcaacttctgcctcccgggttcaagcgattctcctgcctcagcctcccgagtggctggaattataggcgtgcaccaccacgcccagctgatttttgtatttttggtggggacagggttttgccacattggccaggctggtctcaaactcctgacctcaggtgatccacccaccccagcctcccaaggtgctgagattacaggcgtgagccactgagcccagcctacttttcagtttttaacataatttttgttttatccacaacttttcaagtattgaaagtagaataaaaacatgggttcttagtctttagctatctgttaaagcctatgaatgccttcttaaaatcatgtttttaaatgcataaaatatataggattacaaaggaatctaattatatcgaaatacagttattaaaatgttaaaagataagtttgttatatattaatatgcatgcttctttataaatgcattaaataagagttaatagctatcctaaatttgaaatagtgataagcataatgaaaatagatgcaaaaaactaatgtgatatgaaaatatctgggtttttcttttgatgatgaagtattgctaatattaccgtggtttatgaactatgttcagaattgaagaaaatcctaactttcagttagaggttagtgacggggttcaggacaccctacacaaaatacagcactttgacatattgaatattttaagctgaaggcatttgaggaaattgcagaagcaggaaggtgactctgaccttctgcctgctgttctccccagaagcagccataaaacctgggaaggattttctgaccttcccctgaagtagatcataagactgtcatgtaagaggtgctctcctggcacccagagaaaaggagcatccttacctccaaaagcacagggacacaaagaggaatctaaacaaacaggcctctcagtttcccccagtttattacatttagcttgttcacactttgccctatgacatttctacatcactggctgctcttcatcaaacctactataaaaaacattcaagttcaactgtttctttgggcctttatttccttatggagcccctcgtgtcgtgtaaaacttatattaaataaatgtgcatgcttttc

SEQ ID NO: 308622 - DNA, 1781 bp, Homo sapiens
gacaagggctcttcttgatggcttactgtatccactttgtccccaagaccatagggaaatgactagaggtgactgtactagctagattttaaatgaaaccgaaatgaaagttcacttcctcattttgagtacctcatgtgacaagttccaatttcttttcaagtcaattgaactgaaatctccttgttgctttgaaatcttagaagagagcccactaattcaaggactcttactgtgggagcaactgctggttctatcacaatgaaacggctggtttgtgtgctcttggtgtgctcctctgcagtggcacagttgcataaagatcctaccctggatcaccactggcatctctggaagaaaacctatggcaaacaatacaaggaaaagaatgaagaagcagtacgacgtctcatctgggaaaagaatctaaagtttgtgatgcttcacaacctggagcattcaatgggaatgcactcatacgatctgggcatgaaccacctgggagacatgaccagtgaagaagtgatgtctttgatgagttccctgagagttcccagccagtggcagagaaatatcacatataagtcaaaccctaatcggatattgcctgattctgtggactggagagagaaagggtgtgttactgaagtgaaatatcaaggttcttgtggtgcttgctgggctttcagtgctgtgggggccctggaagcacagctgaagctgaaaacaggaaagctggtgtctctcagtgcccagaacctggtggattgctcaactgaaaaatatggaaacaaaggctgcaatggtggcttcatgacaacggctttccagtacatcattgataacaagggcatcgactcagacgcttcctatccctacaaagccatggatcagaaatgtcaatatgactcaaaatatcgtgctgccacatgttcaaagtacactgaacttccttatggcagagaagatgtcctgaaagaagctgtggccaataaaggcccagtgtctgttggtgtagatgcgcgtcatccttctttcttcctctacagaagtggtgtctactatgaaccatcctgtactcagaatgtgaatcatggtgtacttgtggttggctatggtgatcttaatgggaaagaatactggcttgtgaaaaacagctggggccacaactttggtgaagaaggatatattcggatggcaagaaataaaggaaatcattgtgggattgctagctttccctcttacccagaaatctagaggatctctcctttttataacaaatcaagaaatatgaagcactttctcttaacttaatttttcctgctgtatccagaagaaataattgtgtcatgattaatgtgtatttactgtataaaaatacaaaaaattagccgagcacggtggtgcatgcctgtaatcccagctacttgggaggctgaggcacgagattccttgaacccaagaggttgaggctatgttgagctgagatcacaccactgtactccagcctggatgacagagtggagactctgtttcaaaaaaacagaaaagaaaatatagtttgattcttcatttttttaaatttgcaaatctcaggataaagtttgctaagtaaattagtaatgtactatagatataactgtacaaaaattgttcaacctaaaacaatctgtaattgcttattgttttattgtatactctttgtctttttaagacccctaatagccttttgtaacttgatggcttaaaaatacttaataaatctgccatttcaaatttct

SEQ ID NO: 308623 - DNA, 4055 bp, Homo sapiens
  misc_feature (2065)..(2066): n is a, c, g, or t
  misc_feature (2072)..(2072): n is a, c, g, or t
  misc_feature (2226)..(2226): n is a, c, g, or t
  misc_feature (2239)..(2239): n is a, c, g, or t
  misc_feature (2242)..(2242): n is a, c, g, or t
  misc_feature (2244)..(2244): n is a, c, g, or t
  misc_feature (2249)..(2249): n is a, c, g, or t
  misc_feature (2307)..(2307): n is a, c, g, or t
  misc_feature (2312)..(2313): n is a, c, g, or t
gacaagggctcttcttgatggcttactgtatccactttgtccccaagaccatagggaaatgactagaggtgactgtactagctagattttaaatgaaaccgaaatgaaagttcacttcctcattttgagtacctcatgtgacaagttccaatttcttttcaagtcaattgaactgaaatctccttgttgctttgaaatcttagaagagagcccactaattcaaggactcttactgtgggagcaactgctggttctatcacaatgaaacggctggtttgtgtgctcttggtgtgctcctctgcagtggcacagttgcataaagatcctaccctggatcaccactggcatctctggaagaaaacctatggcaaacaatacaaggaaaagaatgaagaagcagtacgacgtctcatctgggactcatacgatctgggcatgaaccacctgggagacatgaccagtgaagaagtgatgtctttgatgagttccctgagagttcccagccagtggcagagaaatatcacatataagtcaaaccctaatcggatattgcctgattctgtggactggagagagaaagggtgtgttactgaagtgaaatatcaaggttcttgtggtgcttgctgggctttcagtgctgtgggggccctggaagcacagctgaagctgaaaacaggaaagctggtgtctctcagtgcccagaacctggtggattgctcaactgaaaaatatggaaacaaaggctgcaatggtggcttcatgacaacggctttccagtacatcattgataacaagggcatcgactcagacgcttcctatccctacaaagccatggatcagaaatgtcaatatgactcaaaatatcgtgctgccacatgttcaaagtacactgaacttccttatggcagagaagatgtcctgaaagaagctgtggccaataaaggcccagtgtctgttggtgtagatgcgcgtcatccttctttcttcctctacagaagtggtgtctactatgaaccatcctgtactcagaatgtgaatcatggtgtacttgtggttggctatggtgatcttaatgggaaagaatactggcttgtgaaaaacagctggggccacaactttggtgaagaaggatatattcggatggcaagaaataaaggaaatcattgtgggattgctagctttccctcttacccagaaatctagaggatctctcctttttataacaaatcaagaaatatgaagcactttctcttaacttaatttttcctgctgtatccagaagaaataattgtgtcatgattaatgtgtatttactgtactaattagaaaatatagtttgaggccgggcacggtggctcacgcctgtaatcccagtacttgggaggccaaggcaggcatatcaacttgaggccaggagttaaagagcagcctggctaacatggtgaaaccccatctctactaaaaatacaaaaaattagccgagcacggtggtgcatgcctgtaatcccagctacttgggaggctgaggcacgagattccttgaacccaagaggttgaggctatgttgagctgagatcacaccactgtactccagcctggatgacagagtggagactctgtttcaaaaaaacagaaaagaaaatatagtttgattcttcatttttttaaatttgcaaatctcaggataaagtttgctaagtaaattagtaatgtactatagatataactgtacaaaaattgttcaacctaaaacaatctgtaattgcttattgttttattgtatactctttgtctttttaagacccctaatagccttttgtaacttgatggcttaaaaatacttaataaatctgccatttcaaatttctatcattgccacataccattcttattcctaggcaactattaataatctatcctgagaatattaattgtggtattctggtgatggggtttagcaactttgatggaagaaaatattaggctataaatgtcctaaggactcagattgtatctttgtacagaagaggattcaaaacgccacgtgtagtggctcatgcctgtnntcccgncactttgggaggctgaggtgggaggatcgtcttgagcccaggagttcgagaccagcctggacaacgtggtgagaccttgtctccacaaaaataaaaaagaaactatccaggagtggtggtgtgtgcctgtggtccctgctatgcagatgtctangacaggaggatcncangngcccnggaggttgagaatgcagtgagcttgtaattgcaccactgcactccagcctgggtgacngagcnngaccctgtcttaaaaaaagaggattcaacacatatttttatattatgttaaagtaaagaaatgcataaaagacaagcactttggaagaattattttaatgatcaacaatttaatgtattagtccaaattatttttacgtagtcatcaacaatttgaccagggcctttatttggcaaataactgagccaaccagaataaaataaccaatactccactgctcatatttttatctaattcagatggatcttccttacaactgctctagattagtagatgcatctaagcaggcagcaggaactttaaattttttaagttcatgtctatgacatgaacaatgtgtgggataatgtcattaatatatcctaaattaacctaaacgtatttcactaactctggctccttctccataaagcacattttaaggaacaagaattgctaaatataaaaacataaataataccataatacatggctatcatcaaaagtgtatagaatattatagtttaaaagtatttagttgattacttttcagttttgttttgttttttgagacggagtctcgctctgttgcccaggctggagtgcagtggcaccatctcagttcactgcaacttctgcctcccgggttcaagcgattctcctgcctcagcctcccgagtggctggaattataggcgtgcaccaccacgcccagctgatttttgtatttttggtggggacagggttttgccacattggccaggctggtctcaaactcctgacctcaggtgatccacccaccccagcctcccaaggtgctgagattacaggcgtgagccactgagcccagcctacttttcagtttttaacataatttttgttttatccacaacttttcaagtattgaaagtagaataaaaacatgggttcttagtctttagctatctgttaaagcctatgaatgccttcttaaaatcatgtttttaaatgcataaaatatataggattacaaaggaatctaattatatcgaaatacagttattaaaatgttaaaagataagtttgttatatattaatatgcatgcttctttataaatgcattaaataagagttaatagctatcctaaatttgaaatagtgataagcataatgaaaatagatgcaaaaaactaatgtgatatgaaaatatctgggtttttcttttgatgatgaagtattgctaatattaccgtggtttatgaactatgttcagaattgaagaaaatcctaactttcagttagaggttagtgacggggttcaggacaccctacacaaaatacagcactttgacatattgaatattttaagctgaaggcatttgaggaaattgcagaagcaggaaggtgactctgaccttctgcctgctgttctccccagaagcagccataaaacctgggaaggattttctgaccttcccctgaagtagatcataagactgtcatgtaagaggtgctctcctggcacccagagaaaaggagcatccttacctccaaaagcacagggacacaaagaggaatctaaacaaacaggcctctcagtttcccccagtttattacatttagcttgttcacactttgccctatgacatttctacatcactggctgctcttcatcaaacctactataaaaaacattcaagttcaactgtttctttgggcctttatttccttatggagcccctcgtgtcgtgtaaaacttatattaaataaatgtgcatgcttttc

SEQ ID NO: 308624 - DNA, 3257 bp, Homo sapiens
  misc_feature (1267)..(1268): n is a, c, g, or t
  misc_feature (1274)..(1274): n is a, c, g, or t
  misc_feature (1428)..(1428): n is a, c, g, or t
  misc_feature (1441)..(1441): n is a, c, g, or t
  misc_feature (1444)..(1444): n is a, c, g, or t
  misc_feature (1446)..(1446): n is a, c, g, or t
  misc_feature (1451)..(1451): n is a, c, g, or t
  misc_feature (1509)..(1509): n is a, c, g, or t
  misc_feature (1514)..(1515): n is a, c, g, or t
ccacgcgtccgacccacgcgtcgctacaaagccatggatcagaaatgtcaatatgactcaaaatatcgtgctgccacatgttcaaagtacactgaacttccttatggcagagaagatgtcctgaaagaagctgtggccaataaaggcccagtgtctgttggtgtagatgcgcgtcatccttctttcttcctctacagaagtggtgtctactatgaaccatcctgtactcagaatgtgaatcatggtgtacttgtggttggctatggtgatcttaatgggaaagaatactggcttgtgaaaaacagctggggccacaactttggtgaagaaggatatattcggatggcaagaaataaaggaaatcattgtgggattgctagctttccctcttacccagaaatctagaggatctctcctttttataacaaatcaagaaatatgaagcactttctcttaacttaatttttcctgctgtatccagaagaaataattgtgtcatgattaatgtgtatttactgtactaattagaaaatatagtttgaggccgggcacggtggctcacgcctgtaatcccagtacttgggaggccaaggcaggcatatcaacttgaggccaggagttaaagagcagcctggctaacatggtgaaaccccatctctactaaaaatacaaaaaattagccgagcacggtggtgcatgcctgtaatcccagctacttgggaggctgaggcacgagattccttgaacccaagaggttgaggctatgttgagctgagatcacaccactgtactccagcctggatgacagagtggagactctgtttcaaaaaaacagaaaagaaaatatagtttgattcttcatttttttaaatttgcaaatctcaggataaagtttgctaagtaaattagtaatgtactatagatataactgtacaaaaattgttcaacctaaaacaatctgtaattgcttattgttttattgtatactctttgtctttttaagacccctaatagccttttgtaacttgatggcttaaaaatacttaataaatctgccatttcaaatttctatcattgccacataccattcttattcctaggcaactattaataatctatcctgagaatattaattgtggtattctggtgatggggtttagcaactttgatggaagaaaatattaggctataaatgtcctaaggactcagattgtatctttgtacagaagaggattcaaaacgccacgtgtagtggctcatgcctgtnntcccgncactttgggaggctgaggtgggaggatcgtcttgagcccaggagttcgagaccagcctggacaacgtggtgagaccttgtctccacaaaaataaaaaagaaactatccaggagtggtggtgtgtgcctgtggtccctgctatgcagatgtctangacaggaggatcncangngcccnggaggttgagaatgcagtgagcttgtaattgcaccactgcactccagcctgggtgacngagcnngaccctgtcttaaaaaaagaggattcaacacatatttttatattatgttaaagtaaagaaatgcataaaagacaagcactttggaagaattattttaatgatcaacaatttaatgtattagtccaaattatttttacgtagtcatcaacaatttgaccagggcctttatttggcaaataactgagccaaccagaataaaataaccaatactccactgctcatatttttatctaattcagatggatcttccttacaactgctctagattagtagatgcatctaagcaggcagcaggaactttaaattttttaagttcatgtctatgacatgaacaatgtgtgggataatgtcattaatatatcctaaattaacctaaacgtatttcactaactctggctccttctccataaagcacattttaaggaacaagaattgctaaatataaaaacataaataataccataatacatggctatcatcaaaagtgtatagaatattatagtttaaaagtatttagttgattacttttcagttttgttttgttttttgagacggagtctcgctctgttgcccaggctggagtgcagtggcaccatctcagttcactgcaacttctgcctcccgggttcaagcgattctcctgcctcagcctcccgagtggctggaattataggcgtgcaccaccacgcccagctgatttttgtatttttggtggggacagggttttgccacattggccaggctggtctcaaactcctgacctcaggtgatccacccaccccagcctcccaaggtgctgagattacaggcgtgagccactgagcccagcctacttttcagtttttaacataatttttgttttatccacaacttttcaagtattgaaagtagaataaaaacatgggttcttagtctttagctatctgttaaagcctatgaatgccttcttaaaatcatgtttttaaatgcataaaatatataggattacaaaggaatctaattatatcgaaatacagttattaaaatgttaaaagataagtttgttatatattaatatgcatgcttctttataaatgcattaaataagagttaatagctatcctaaatttgaaatagtgataagcataatgaaaatagatgcaaaaaactaatgtgatatgaaaatatctgggtttttcttttgatgatgaagtattgctaatattaccgtggtttatgaactatgttcagaattgaagaaaatcctaactttcagttagaggttagtgacggggttcaggacaccctacacaaaatacagcactttgacatattgaatattttaagctgaaggcatttgaggaaattgcagaagcaggaaggtgactctgaccttctgcctgctgttctccccagaagcagccataaaacctgggaaggattttctgaccttcccctgaagtagatcataagactgtcatgtaagaggtgctctcctggcacccagagaaaaggagcatccttacctccaaaagcacagggacacaaagaggaatctaaacaaacaggcctctcagtttcccccagtttattacatttagcttgttcacactttgccctatgacatttctacatcactggctgctcttcatcaaacctactataaaaaacattcaagttcaactgtttctttgggcctttatttccttatggagcccctcgtgtcgtgtaaaacttatattaaataaatgtgcatgcttttc

SEQ ID NO: 308625 - DNA, 1516 bp, Homo sapiens
gacaagggctcttcttgatggcttactgtatccactttgtccccaagaccatagggaaatgactagaggtgactgtactagctagattttaaatgaaaccgaaatgaaagttcacttcctcattttgagtacctcatgtgacaagttccaatttcttttcaagtcaattgaactgaaatctccttgttgctttgaaatcttagaagagagcccactaattcaaggactcttactgtgggagcaactgctggttctatcacaatgaaacggctggtttgtgtgctcttggtgtgctcctctgcagtggcacagttgcataaagatcctaccctggatcaccactggcatctctggaagaaaacctatggcaaacaatacaaggaaaagaatgaagaagcagtacgacgtctcatctgggaaaagaatctaaagtttgtgatgcttcacaacctggagcattcaatgggaatgcactcatacgatctgggcatgaaccacctgggagacatgaccagtgaagaagtgatgtctttgatgagttccctgagagttcccagccagtggcagagaaatatcacatataagtcaaaccctaatcggatattgcctgattctgtggactggagagagaaagggtgtgttactgaagtgaaatatcaaggttcttgtggtgcttgctgggctttcagtgctgtgggggccctggaagcacagctgaagctgaaaacaggaaagctggtgtctctcagtgcccagaacctggtggattgctcaactgaaaaatatggaaacaaaggctgcaatggtggcttcatgacaacggctttccagtacatcattgataacaagggcatcgactcagacgcttcctatccctacaaagccatggatcagaaatgtcaatatgactcaaaatatcgtgctgccacatgttcaaagtacactgaacttccttatggcagagaagatgtcctgaaagaagctgtggccaataaaggcccagtgtctgttggtgtagatgcgcgtcatccttctttcttcctctacagaagtggtgtctactatgaaccatcctgtactcagaatgtgaatcatggtgtacttgtggttggctatggtgatcttaatgggaaagaatactggcttgtgaaaaacagctggggccacaactttggtgaagaaggatatattcggatggcaagaaataaaggaaatcattgtgggattgctagctttccctcttacccagaaatctagaggatctctcctttttataacaaatcaagaaaatatagtttgattcttcatttttttaaatttgcaaatctcaggataaagtttgctaagtaaattagtaatgtactatagatataactgtacaaaaattgttcaacctaaaacaatctgtaattgcttattgttttattgtatactctttgtctttttaagacccctaatagccttttgtaacttgatggcttaaaaatacttaataaatctgccatttcaaatttct

SEQ ID NO: 308626 - DNA, 3092 bp, Homo sapiens
  misc_feature (1102)..(1103): n is a, c, g, or t
  misc_feature (1109)..(1109): n is a, c, g, or t
  misc_feature (1263)..(1263): n is a, c, g, or t
  misc_feature (1276)..(1276): n is a, c, g, or t
  misc_feature (1279)..(1279): n is a, c, g, or t
  misc_feature (1281)..(1281): n is a, c, g, or t
  misc_feature (1286)..(1286): n is a, c, g, or t
  misc_feature (1344)..(1344): n is a, c, g, or t
  misc_feature (1349)..(1350): n is a, c, g, or t
gcttcctattaggtgcatgagtaggtggcctgcagtaatgttagcggttaggcgtacggccagggctattggttgaatgagtaggttgtggttggctatggtgatcttaatgggaaagaatactggcttgtgaaaaacagctggggccacaactttggtgaagaaggatatattcggatggcaagaaataaaggaaatcattgtgggattgctagctttccctcttacccagaaatctagaggatctctcctttttataacaaatcaagaaatatgaagcactttctcttaacttaatttttcctgctgtatccagaagaaataattgtgtcatgattaatgtgtatttactgtactaattagaaaatatagtttgaggccgggcacggtggctcacgcctgtaatcccagtacttgggaggccaaggcaggcatatcaacttgaggccaggagttaaagagcagcctggctaacatggtgaaaccccatctctactaaaaatacaaaaaattagccgagcacggtggtgcatgcctgtaatcccagctacttgggaggctgaggcacgagattccttgaacccaagaggttgaggctatgttgagctgagatcacaccactgtactccagcctggatgacagagtggagactctgtttcaaaaaaacagaaaagaaaatatagtttgattcttcatttttttaaatttgcaaatctcaggataaagtttgctaagtaaattagtaatgtactatagatataactgtacaaaaattgttcaacctaaaacaatctgtaattgcttattgttttattgtatactctttgtctttttaagacccctaatagccttttgtaacttgatggcttaaaaatacttaataaatctgccatttcaaatttctatcattgccacataccattcttattcctaggcaactattaataatctatcctgagaatattaattgtggtattctggtgatggggtttagcaactttgatggaagaaaatattaggctataaatgtcctaaggactcagattgtatctttgtacagaagaggattcaaaacgccacgtgtagtggctcatgcctgtnntcccgncactttgggaggctgaggtgggaggatcgtcttgagcccaggagttcgagaccagcctggacaacgtggtgagaccttgtctccacaaaaataaaaaagaaactatccaggagtggtggtgtgtgcctgtggtccctgctatgcagatgtctangacaggaggatcncangngcccnggaggttgagaatgcagtgagcttgtaattgcaccactgcactccagcctgggtgacngagcnngaccctgtcttaaaaaaagaggattcaacacatatttttatattatgttaaagtaaagaaatgcataaaagacaagcactttggaagaattattttaatgatcaacaatttaatgtattagtccaaattatttttacgtagtcatcaacaatttgaccagggcctttatttggcaaataactgagccaaccagaataaaataaccaatactccactgctcatatttttatctaattcagatggatcttccttacaactgctctagattagtagatgcatctaagcaggcagcaggaactttaaattttttaagttcatgtctatgacatgaacaatgtgtgggataatgtcattaatatatcctaaattaacctaaacgtatttcactaactctggctccttctccataaagcacattttaaggaacaagaattgctaaatataaaaacataaataataccataatacatggctatcatcaaaagtgtatagaatattatagtttaaaagtatttagttgattacttttcagttttgttttgttttttgagacggagtctcgctctgttgcccaggctggagtgcagtggcaccatctcagttcactgcaacttctgcctcccgggttcaagcgattctcctgcctcagcctcccgagtggctggaattataggcgtgcaccaccacgcccagctgatttttgtatttttggtggggacagggttttgccacattggccaggctggtctcaaactcctgacctcaggtgatccacccaccccagcctcccaaggtgctgagattacaggcgtgagccactgagcccagcctacttttcagtttttaacataatttttgttttatccacaacttttcaagtattgaaagtagaataaaaacatgggttcttagtctttagctatctgttaaagcctatgaatgccttcttaaaatcatgtttttaaatgcataaaatatataggattacaaaggaatctaattatatcgaaatacagttattaaaatgttaaaagataagtttgttatatattaatatgcatgcttctttataaatgcattaaataagagttaatagctatcctaaatttgaaatagtgataagcataatgaaaatagatgcaaaaaactaatgtgatatgaaaatatctgggtttttcttttgatgatgaagtattgctaatattaccgtggtttatgaactatgttcagaattgaagaaaatcctaactttcagttagaggttagtgacggggttcaggacaccctacacaaaatacagcactttgacatattgaatattttaagctgaaggcatttgaggaaattgcagaagcaggaaggtgactctgaccttctgcctgctgttctccccagaagcagccataaaacctgggaaggattttctgaccttcccctgaagtagatcataagactgtcatgtaagaggtgctctcctggcacccagagaaaaggagcatccttacctccaaaagcacagggacacaaagaggaatctaaacaaacaggcctctcagtttcccccagtttattacatttagcttgttcacactttgccctatgacatttctacatcactggctgctcttcatcaaacctactataaaaaacattcaagttcaactgtttctttgggcctttatttccttatggagcccctcgtgtcgtgtaaaacttatattaaataaatgtgcatgcttttc

SEQ ID NO: 308627 - DNA, 3054 bp, Homo sapiens
  misc_feature (1064)..(1065): n is a, c, g, or t
  misc_feature (1071)..(1071): n is a, c, g, or t
  misc_feature (1225)..(1225): n is a, c, g, or t
  misc_feature (1238)..(1238): n is a, c, g, or t
  misc_feature (1241)..(1241): n is a, c, g, or t
  misc_feature (1243)..(1243): n is a, c, g, or t
  misc_feature (1248)..(1248): n is a, c, g, or t
  misc_feature (1306)..(1306): n is a, c, g, or t
  misc_feature (1311)..(1312): n is a, c, g, or t
gacaagggctcttcttgatggcttactgtatccactttgtccccaagaccatagggaaatgactagaggtgactgtactagctagattttaaatgaaaccgaaatgaaagttcacttcctcattttgagtacctcatgtgacaagttccaatttcttttcaagtcaattgaactgaaatctccttgttgctttgaaatcttagaagagagcccactaattcaaggactcttactgtgggagcaactgctggttctatcacaatgaaacggctggtttgtgtgctcttggtgtgctcctctgcagtggcacagttgcataaagatcctaccctggatcaccactggcatctctggaagaaaacctatggcaaacaatacaaggaaaagaatgaagaagcagtacgacgtctcatctgggaaaagaatctaaagtttgtgatgcttcacaacctggagcattcaatgggaatgcactcatacgatctgggcatgaaccacctgggagacatgaccagtgaagaagtgatgtctttgatgagttccctgagagttcccagccagtggcagagaaatatcacaccactgtactccagcctggatgacagagtggagactctgtttcaaaaaaacagaaaagaaaatatagtttgattcttcatttttttaaatttgcaaatctcaggataaagtttgctaagtaaattagtaatgtactatagatataactgtacaaaaattgttcaacctaaaacaatctgtaattgcttattgttttattgtatactctttgtctttttaagacccctaatagccttttgtaacttgatggcttaaaaatacttaataaatctgccatttcaaatttctatcattgccacataccattcttattcctaggcaactattaataatctatcctgagaatattaattgtggtattctggtgatggggtttagcaactttgatggaagaaaatattaggctataaatgtcctaaggactcagattgtatctttgtacagaagaggattcaaaacgccacgtgtagtggctcatgcctgtnntcccgncactttgggaggctgaggtgggaggatcgtcttgagcccaggagttcgagaccagcctggacaacgtggtgagaccttgtctccacaaaaataaaaaagaaactatccaggagtggtggtgtgtgcctgtggtccctgctatgcagatgtctangacaggaggatcncangngcccnggaggttgagaatgcagtgagcttgtaattgcaccactgcactccagcctgggtgacngagcnngaccctgtcttaaaaaaagaggattcaacacatatttttatattatgttaaagtaaagaaatgcataaaagacaagcactttggaagaattattttaatgatcaacaatttaatgtattagtccaaattatttttacgtagtcatcaacaatttgaccagggcctttatttggcaaataactgagccaaccagaataaaataaccaatactccactgctcatatttttatctaattcagatggatcttccttacaactgctctagattagtagatgcatctaagcaggcagcaggaactttaaattttttaagttcatgtctatgacatgaacaatgtgtgggataatgtcattaatatatcctaaattaacctaaacgtatttcactaactctggctccttctccataaagcacattttaaggaacaagaattgctaaatataaaaacataaataataccataatacatggctatcatcaaaagtgtatagaatattatagtttaaaagtatttagttgattacttttcagttttgttttgttttttgagacggagtctcgctctgttgcccaggctggagtgcagtggcaccatctcagttcactgcaacttctgcctcccgggttcaagcgattctcctgcctcagcctcccgagtggctggaattataggcgtgcaccaccacgcccagctgatttttgtatttttggtggggacagggttttgccacattggccaggctggtctcaaactcctgacctcaggtgatccacccaccccagcctcccaaggtgctgagattacaggcgtgagccactgagcccagcctacttttcagtttttaacataatttttgttttatccacaacttttcaagtattgaaagtagaataaaaacatgggttcttagtctttagctatctgttaaagcctatgaatgccttcttaaaatcatgtttttaaatgcataaaatatataggattacaaaggaatctaattatatcgaaatacagttattaaaatgttaaaagataagtttgttatatattaatatgcatgcttctttataaatgcattaaataagagttaatagctatcctaaatttgaaatagtgataagcataatgaaaatagatgcaaaaaactaatgtgatatgaaaatatctgggtttttcttttgatgatgaagtattgctaatattaccgtggtttatgaactatgttcagaattgaagaaaatcctaactttcagttagaggttagtgacggggttcaggacaccctacacaaaatacagcactttgacatattgaatattttaagctgaaggcatttgaggaaattgcagaagcaggaaggtgactctgaccttctgcctgctgttctccccagaagcagccataaaacctgggaaggattttctgaccttcccctgaagtagatcataagactgtcatgtaagaggtgctctcctggcacccagagaaaaggagcatccttacctccaaaagcacagggacacaaagaggaatctaaacaaacaggcctctcagtttcccccagtttattacatttagcttgttcacactttgccctatgacatttctacatcactggctgctcttcatcaaacctactataaaaaacattcaagttcaactgtttctttgggcctttatttccttatggagcccctcgtgtcgtgtaaaacttatattaaataaatgtgcatgcttttc

SEQ ID NO: 308628 - DNA, 939 bp, Homo sapiens
gacaagggctcttcttgatggcttactgtatccactttgtccccaagaccatagggaaatgactagaggtgactgtactagctagattttaaatgaaaccgaaatgaaagttcacttcctcattttgagtacctcatgtgacaagttccaatttcttttcaagtcaattgaactgaaatctccttgttgctttgaaatcttagaagagagcccactaattcaaggactcttactgtgggagcaactgctggttctatcacaatgaaacggctggtttgtgtgctcttggtgtgctcctctgcagtggcacagttgcataaagatcctaccctggatcaccactggcatctctggaagaaaacctatggcaaacaatacaaggaaaagaatgaagaagcagtacgacgtctcatctgggaaaagaatctaaagtttgtgatgcttcacaacctggagcattcaatgggaatgcactcatacgatctgggcatgaaccacctgggagacatgaccagtgaagaagtgatgtctttgatgagttccctgagagttcccagccagtggcagagaaatatcacatataagtcaaaccctaatcggatattgcctgattctgtggactggagagagaaagggtgtgttactgaagtgaaatatcaaggttcttgtggtgcttgctgggctttcagtgctgtgggggccctggaagcacagctgaagctgaaaacaggaaagctggtgtctctcagtgcccagaacctggtggattgctcaactgaaaaatatggaaacaaaggctgcaatggtggcttcatgacaacggctttccagtacatcattgataacaagggcatcgactcagacgcttcctatccctacaaagccatgatcagtgtcaatatgactcagatagtctgaagaagctgtggccatggcccc

SEQ ID NO: 308629 - DNA, 969 bp, Homo sapiens
gacaagggctcttcttgatggcttactgtatccactttgtccccaagaccatagggaaatgactagaggtgactgtactagctagattttaaatgaaaccgaaatgaaagttcacttcctcattttgagtacctcatgtgacaagttccaatttcttttcaagtcaattgaactgaaatctccttgttgctttgaaatcttagaagagagcccactaattcaaggactcttactgtgggagcaactgctggttctatcacaatgaaacggctggtttgtgtgctcttggtgtgctcctctgcagtggcacagttgcataaagatcctaccctggatcaccactggcatctctggaagaaaacctatggcaaacaatacaaggaaaagaatgaagaagcagtacgacgtctcatctgggaaaagaatctaaagtttgtgatgcttcacaacctggagcattcaatgggaatgcactcatacgatctgggcatgaaccacctgggagacatgaccagtgaagaagtgatgtctttgatgagttccctgagagttcccagccagtggcagagaaatatcacatataagtcaaaccctaatcggatattgcctgattctgtggactggagagagaaagggtgtgttactgaagtgaaatatcaagtgagtattaccatcccaagcctctgaaccctaggtagagctctttaaatgcttagtctagctacagaatttgccagtgaatcttacagtcccacgtgttactttctagttatttttgttattcttgtcttcccaactaaattataaattccttaagggcaaggatcacatattatattttatttatacagttggccctccatatccacagcttccacatctgcagattccaccaaccgtggatcaaaaatatccagaaaaaaatgaaaataaaaaataggccaggcactcacgcctataataccatta

SEQ ID NO: 308630 - DNA, 665 bp, Homo sapiens
gacaagggctcttcttgatggcttactgtatccactttgtccccaagaccatagggaaatgactagaggtgactgtactagctagattttaaatgaaaccgaaatgaaagttcacttcctcattttgagtacctcatgtgacaagttccaatttcttttcaagtcaattgaactgaaatctccttgttgctttgaaatcttagaagagagcccactaattcaaggactcttactgtgggagcaactgctggttctatcacaatgaaacggctggtttgtgtgctcttggtgtgctcctctgcagtggcacagttgcataaagatcctaccctggatcaccactggcatctctggaagaaaacctatggcaaacaatacaaggaaaagaatgaagaagcagtacgacgtctcatctgggaaaagaatctaaagtttgtgatgcttcacaacctggagcattcaatgggaatgcactcatacgatctgggcatgaaccacctgggagacatgaccagtgaagaagtgatgtctttgatgagttccctgagagttcccagccagtggcagagaaatatcacatataagtcaaaccctaatcggatattgcctgattctgtggactggagagagaaaggtgtagcggtggtatcggatcctctagagca

SEQ ID NO: 308631 - DNA, 381 bp, Homo sapiens
cagaatgtgaatcatggtgtacttgtggttggctatggtgatcttaatgggaaagaatactggcttgtgaaaaacaggtaatatatttacactttatatttaattggaatcaggaatttgagggagtttcagcaaatactctcatgattttgatgatgatcattatgatcacgatattgacaatgatgaactttatagcttcttacaaagtgacattctaaattactcagtgcccccatcttttcacttaccattctgccttcatcactttgttttcctggtttatcttctgtactacttctgtgattattccttctcagcctctctcatgaacctattcctctcctctatttagcccaaaaatgttagttttccccaggg

SEQ ID NO: 308632 - DNA, 1423 bp, Homo sapiens
gaggaagaagcggaggaggcggctcccgcgctcgcagggccgtgccacctgcccgcccgcccgctcgctcgctcgcccgccgcgccgcgctgccgaccgccagcatgctgccgagagtgggctgccccgcgctgccgctgccgccgccgccgctgctgccgctgctgccgctgctgctgctgctactgggcgcgagtggcggcggcggcggggcgcgcgcggaggtgctgttccgctgcccgccctgcacacccgagcgcctggccgcctgcgggcccccgccggttgcgccgcccgccgcggtggccgcagtggccggaggcgcccgcatgccatgcgcggagctcgtccgggagccgggctgcggctgctgctcggtgtgcgcccggctggagggcgaggcgtgcggcgtctacaccccgcgctgcggccaggggctgcgctgctatccccacccgggctccgagctgcccctgcaggcgctggtcatgggcgagggcacttgtgagaagcgccgggacgccgagtatggcgccagcccggagcaggttgcagacaatggcgatgaccactcagaaggaggcctggtggagaaccacgtggacagcaccatgaacatgttgggcgggggaggcagtgctggccggaagcccctcaagtcgggtatgaaggagctggccgtgttccgggagaaggtcactgagcagcaccggcagatgggcaagggtggcaagcatcaccttggcctggaggagcccaagaagctgcgaccaccccctgccaggactccctgccaacaggaactggaccaggtcctggagcggatctccaccatgcgccttccggatgagcggggccctctggagcacctctactccctgcacatccccaactgtgacaagcatggcctgtacaacctcaaacagtgcaagatgtctctgaacgggcagcgtggggagtgctggtgtgtgaaccccaacaccgggaagctgatccagggagcccccaccatccggggggaccccgagtgtcatctcttctacaatgagcagcaggaggctcgcggggtgcacacccagcggatgcagtagaccgcagccagccggtgcctggcgcccctgccccccgcccctctccaaacaccggcagaaaacggagagtgcttgggtggtgggtgctggaggattttccagttctgacacacgtatttatatttggaaagagaccagcaccgagctcggcacctccccggcctctctcttcccagctgcagatgccacacctgctccttcttgctttccccgggggaggaagggggttgtggtcggggagctggggtacaggtttggggagggggaagagaaatttttatttttgaacccctgtgtcccttttgcataagattaaaggaaggaaaagtaaa

SEQ ID NO: 308633 - DNA, 1083 bp, Homo sapiens
gaggaagaagcggaggaggcggctcccgcgctcgcagggccgtgccacctgcccgcccgcccgctcgctcgctcgccccccgcgctgcggccaggggctgcgctgctatccccacccgggctccgagctgcccctgcaggcgctggtcatgggcgagggcacttgtgagaagcgccgggacgccgagtatggcgccagcccggagcaggttgcagacaatggcgatgaccactcagaaggaggcctggtggagaaccacgtggacagcaccatgaacatgttgggcgggggaggcagtgctggccggaagcccctcaagtcgggtatgaaggagctggccgtgttccgggagaaggtcactgagcagcaccggcagatgggcaagggtggcaagcatcaccttggcctggaggagcccaagaagctgcgaccaccccctgccaggactccctgccaacaggaactggaccaggtcctggagcggatctccaccatgcgccttccggatgagcggggccctctggagcacctctactccctgcacatccccaactgtgacaagcatggcctgtacaacctcaaacagtgcaagatgtctctgaacgggcagcgtggggagtgctggtgtgtgaaccccaacaccgggaagctgatccagggagcccccaccatccggggggaccccgagtgtcatctcttctacaatgagcagcaggaggctcgcggggtgcacacccagcggatgcagtagaccgcagccagccggtgcctggcgcccctgccccccgcccctctccaaacaccggcagaaaacggagagtgcttgggtggtgggtgctggaggattttccagttctgacacacgtatttatatttggaaagagaccagcaccgagctcggcacctccccggcctctctcttcccagctgcagatgccacacctgctccttcttgctttccccgggggaggaagggggttgtggtcggggagctggggtacaggtttggggagggggaagagaaatttttatttttgaacccctgtgtcccttttgcataagattaaaggaaggaaaagtaaa

SEQ ID NO: 308634 - DNA, 1939 bp, Homo sapiens
gaggaagaagcggaggaggcggctcccgcgctcgcagggccgtgccacctgcccgcccgcccgctcgctcgctcgcccgccgcgccgcgctgccgaccgccagcatgctgccgagagtgggctgccccgcgctgccgctgccgccgccgccgctgctgccgctgctgccgctgctgctgctgctactgggcgcgagtggcggcggcggcggggcgcgcgcggaggtgctgttccgctgcccgccctgcacacccgagcgcctggccgcctgcgggcccccgccggttgcgccgcccgccgcggtggccgcagtggccggaggcgcccgcatgccatgcgcggagctcgtccgggagccgggctgcggctgctgctcggtgtgcgcccggctggagggcgaggcgtgcggcgtctacaccccgcgctgcggccaggggctgcgctgctatccccacccgggctccgagctgcccctgcaggcgctggtcatgggcgagggcacttgtgagaagcgccgggacgccgagtatggcgccagcccggagcaggttgcagacaatggcgatgaccactcagaaggaggcctggtggagaaccacgtggacagcaccatgaacatgttgggcgggggaggcagtgctggccggaagcccctcaagtcgggtatgaaggagctggccgtgttccgggagaaggtcactgagcagcaccggcagatgggcaagggtggcaagcatcaccttggcctggaggagcccaagaagctgcgaccaccccctgccaggactccctgccaacaggaactggaccaggtcctggagcggatctccaccatgcgccttccggatgagcggggccctctggagcacctctactccctgcacatccccaactgtgacaagcatggcctgtacaacctcaaacagtgcaagatgtctctgaacgggcagcgtggggagtgctggtgtgtgaaccccaacaccgggaagctgatccagggagcccccaccatccggggggaccccgagtgtcatctcttctacaatgagcagcaggaggctcgcggggtgcacacccagcggatgcagtagaccgcagccagccggtgcctggcgcccctgccccccgcccctctccaaacaccggcagaaaacggagagtgcttgggtggtgggtgctggaggattttccagttctgacacacgtatttatatttggaaagagaccagcaccgagctcggcacctccccggcctctctcttcccagctgcagatgccacacctgctccttcttgctttccccgggggaggaagggggttgtggtcggggagctggggtacaggtttggggagggggaagagaaatttttatttttgaacccctgtgtcccttttgcataagattaaaggaaggaaaagtaaaaaaaaaaaacaaaacaaaaaaaaaaaaaaaaaaaaaacaacaaaaagggggggcggcgggcggcactaataaaggatccccccgggcggggcgcccaagcgctgtttacgcgcgcgtacccccggtttttttggtgctcaaacacgggcgcccccattatggaggggcgcgcgctatattattacagccatgggccacgggcgccggcggttaacaaaccggtgcgcggcggacggggagaaaaacgtgtataccgtgggggctatcttgggggagagagggactcccctaacttgtcggggggggggagacattatgtggggcgaccaacctcttcctaacgaggaagatttaaacacgctcaagagggaggaattaaataaactttctaaggggtgtattagggggtgtaacaaccatacgcgcgaatatggacgttgcacgcttaaaaagttttgggctcgaccgcgcatagcgttctcgtgaaaatttttttcccccgggagcttctgtatg

SEQ ID NO: 308635 - DNA, 1648 bp, Homo sapiens
gaggaagaagcggaggaggcggctcccgcgctcgcagggccgtgccacctgcccgcccgcccgctcgctcgctcgcccgccgcgccgcgctgccgaccgccagcatgctgccgagagtgggctgccccgcgctgccgctgccgccgccgccgctgctgccgctgctgccgctgctgctgctgctactgggcgcgagtggcggcggcggcggggcgcgcgcggaggtgctgttccgctgcccgccctgcacacccgagcgcctggccgcctgcgggcccccgccggttgcgccgcccgccgcggtggccgcagtggccggaggcgcccgcatgccatgcgcggagctcgtccgggagccgggctgcggctgctgctcggtgtgcgcccggctggagggcgaggcgtgcggcgtctacaccccgcgctgcggccaggggctgcgctgctatccccacccgggctccgagctgcccctgcaggcgctggtcatgggcgagggcacttgtgagaagcgccgggacgccgagtatggcgccagcccggagcaggttgcagacaatggcgatgaccactcagaaggaggcctggtggagaaccacgtggacagcaccatgaacatgttgggcgggggaggcagtgctggccggaagcccctcaagtcgggtatgaaggagctggccgtgttccgggagaaggtcactgagcagcaccggcagatgggcaagggtggcaagcatcaccttggcctggaggagcccaagaagctgcgaccaccccctgccaggactccctgccaacaggaactggaccaggtcctggagcggatctccaccatgcgccttccggatgagcggggccctctggagcacctctactccctgcacatccccaactgtgacaagcatggcctgtacaacctcaaacagtgcaagatgtctctgaacgggcagcgtggggagtgctggtgtgtgaaccccaacaccgggaagctgatccagggagcccccaccatccggggggaccccgagtgtcatctcttctacaatgagcagcaggaggctcgcggggtgcacacccagcggatgcagtagaccgcagccagccggtgcctggcgcccctgccccccgcccctctccaaacaccggcagaaaacggagagtgcttgggtggtgggtgctggaggattttccagttctgacacacgtatttatatttggaaagagaccagcaccgagctcggcacctccccggcctctctcttcccagctgcagatgccacacctgctccttcttgctttccccgggggaggaagggggttgtggtcggggagctggggtacaggtttggggagggggaagagaaatttttatttttgaacccctgtgtcccttttgcataagattaaaggaaggaaaagtaaaggtccttgggatagaataacgggagaccgcatacataaaaacaacaggggcgccgaaaatcaccggggggcacagcaaggacaccgctgtggtaagggcctaaggggggataagacgacggggcggacacgagcagaacacaggacgagcacactggcgtataggaaccgcaaaagaaaaactagaaaccgacaagacgatgaaacataagccgagatcatggcc

SEQ ID NO: 308636 - DNA, 1390 bp, Homo sapiens
gaggaagaagcggaggaggcggctcccgcgctcgcagggccgtgccacctgcccgcccgcccgctcgctcgctcgcccgccgcgccgcgctgccgaccgccagcatgctgccgagagtgggctgccccgcgctgccgctgccgccgccgccgctgctgccgctgctgccgctgctgctgctgctactgggcgcgagtggcggcggcggcggggcgcgcgcggaggtgctgttccgctgcccgccctgcacacccgagcgcctggccgcctgcgggcccccgccggttgcgccgcccgccgcggtggccgcagtggccggaggcgcccgcatgccatgcgcggagctcgtccgggagccgggctgcggctgctgctcggtgtgcgcccggctggagggcgaggcgtgcggcgtctacaccccgcgctgcggccaggggctgcgctgctatccccacccgggctccgagctgcccctgcaggcgctggtcatgggcgagggcacttgtgagaagcgccgggacgccgagtatggcgccagcccggagcaggttgcagacaatggcgatgaccactcagaaggaggcctggtggagaaccacgtggacagcaccatgaacatgttgggcgggggaggcagtgctggccggaagcccctcaagtcgggtatgaaggagctggccgtgttccgggagaaggtcactgagcagcaccggcagatgggcaagggtggcaagcatcaccttggcctggaggagcccaagaagctgcgaccaccccctgccaggactccctgccaacaggaactggaccaggtcctggagcggatctccaccatgcgccttccggatgagcggggccctctggagcacctctactccctgcacatccccaactgtgacaagcatggcctgtacaacctcaaacagtgctggtgtgtgaaccccaacaccgggaagctgatccagggagcccccaccatccggggggaccccgagtgtcatctcttctacaatgagcagcaggaggctcgcggggtgcacacccagcggatgcagtagaccgcagccagccggtgcctggcgcccctgccccccgcccctctccaaacaccggcagaaaacggagagtgcttgggtggtgggtgctggaggattttccagttctgacacacgtatttatatttggaaagagaccagcaccgagctcggcacctccccggcctctctcttcccagctgcagatgccacacctgctccttcttgctttccccgggggaggaagggggttgtggtcggggagctggggtacaggtttggggagggggaagagaaatttttatttttgaacccctgtgtcccttttgcataagattaaaggaaggaaaagtaaa

SEQ ID NO: 308637 - DNA, 1595 bp, Homo sapiens
gaggaagaagcggaggaggcggctcccgcgctcgcagggccgtgccacctgcccgcccgcccgctcgctcgctcgcccgccgcgccgcgctgccgaccgccagcatgctgccgagagtgggctgccccgcgctgccgctgccgccgccgccgctgctgccgctgctgccgctgctgctgctgctactgggcgcgagtggcggcggcggcggggcgcgcgcggaggtgctgttccgctgcccgccctgcacacccgagcgcctggccgcctgcgggcccccgccggttgcgccgcccgccgcggtggccgcagtggccggaggcgcccgcatgccatgcgcggagctcgtccgggagccgggctgcggctgctgctcggtgtgcgcccggctggagggcgaggcgtgcggcgtctacaccccgcgctgcggccaggggctgcgctgctatccccacccgggctccgagctgcccctgcaggcgctggtcatgggcgagggcacttgtgagaagcgccgggacgccgagtatggcgccagcccggagcaggttgcagacaatggcgatgaccactcagaaggaggcctggtggagaaccacgtggacagcaccatgaacatgttgggcgggggaggcagtgctggccggaagcccctcaagtcgggtatgaaggagctggccgtgttccgggagaaggtcactgagcagcaccggcagatgggcaagggtggcaagcatcaccttggcctggaggagcccaagaagctgcgaccaccccctgccaggactccctgccaacaggaactggaccaggtcctggagcggatctccaccatgcgccttccggatgagcggggccctctggagcacctctactccctgcacatccccaactgtgacaagcatggcctgtacaacctcaaacagtgcaagatgtctctgaacgggcagcgtggggagtgctggtgtgtgaaccccaacaccgggaagctgatccagggagcccccaccatccggggggaccccgagtgtcatctcttctacaatgagcagcaggaggctcgcggggtgcacacccagcggatgcagtagaccgcagccagccggtgcctggcgcccctgccccccgcccctctccaaacaccggcagaaaacggagagtgcttgggtggtgggtgctggaggattttccagttctgacacacgtatttatatttggaaagagaccagcaccgagctcggcacctccccggacatctctctacccagctgctgatgccaacaactgtccttctgctttccacgggggaggaacggagtggcggacgcggaagcggggacaggatgggggcagggggacgagaaatttacaacatagaaccgtgaccttgccatcgatcaagaggcgagtaacaccaacaacacacaccacgggccacacaaatacacaggacagaacgcacgtcggaccggacctagagcaacaacagcagacaagcgcaatcacagaaaggaacccccgctgaggcaacacataaaagcagtcaacacaccacacccacaaacacaaaacaacaacacagaacacacacacaa

SEQ ID NO: 308638 - DNA, 1362 bp, Homo sapiens
gaggaagaagcggaggaggcggctcccgcgctcgcagggccgtgccacctgcccgcccgcccgctcgctcgctcgcccgccgcgccgcgctgccgaccgccagcatgctgccgagagtgggctgccccgcgctgccgctgccgccgccgccgctgctgccgctgctgccgctgctgctgctgctactgggcgcgagtggcggcggcggcggggcgcgcgcggaggtgctgttccgctgcccgccctgcacacccgagcgcctggccgcctgcgggcccccgccggttgcgccgcccgccgcggtggccgcagtggccggaggcgcccgcatgccatgcgcggagctcgtccgggagccgggctgcggctgctgctcggtgtgcgcccggctggagggcgaggcgtgcggcgtctacaccccgcgctgcggccaggggctgcgctgctatccccacccgggctccgagctgcccctgcaggcgctggtcatgggcgagggcacttgtgagaagcgccgggacgccgagtatggcgccagcccggagcaggttgcagacaatggcgatgaccactcagaaggaggcctggtggagaaccacgtggacagcaccatgaacatgttgggcgggggaggcagtgctggccggaagcccctcaagtcgggtatgaaggagctggccgtgttccgggagaaggtcactgagcagcaccggcagatgggcaagggtggcaagcatcaccttggcctggaggagcccaagaagctgcgaccaccccctgccaggactccctgccaacaggaactggaccaggtcctggagcggatctccaccatgcgccttccggatgagcggggccctctggagcacctctactccctgcacatccccaactgtgacaagcatggcctgtacaacctcaaacagtgcaagatgtctctgaacgggcagcgtggggagtgctggtgtgtgaaccccaacaccgggaagctgatccagggagcccccaccatccggggggaccccgagtgtcatctcttctacaatgagcagcaggaggctcgcggggtgcacacccagcggatgcagtagaccgcagccagccggtgcctggcgcccctgccccccgcccctctccaaacaccggcctctctcttcccagctgcagatgccacacctgctccttcttgctttccccgggggaggaagggggttgtggtcggggagctggggtacaggtttggggagggggaagagaaatttttatttttgaacccctgtgtcccttttgcataagattaaaggaaggaaaagtaaagtcccttttgcataagattaaaggaaggaaaagtaaagtgtgtgt

SEQ ID NO: 308639 - DNA, 1435 bp, Homo sapiens
gaggaagaagcggaggaggcggctcccgcgctcgcagggccgtgccacctgcccgcccgcccgctcgctcgctcgcccgccgcgccgcgctgccgaccgccagcatgctgccgagagtgggctgccccgcgctgccgctgccgccgccgccgctgctgccgctgctgccgctgctgctgctgctactgggcgcgagtggcggcggcggcggggcgcgcgcggaggtgctgttccgctgcccgccctgcacacccgagcgcctggccgcctgcgggcccccgccggttgcgccgcccgccgcggtggccgcagtggccggaggcgcccgcatgccatgcgcggagctcgtccgggagccgggctgcggctgctgctcggtgtgcgcccggctggagggcgaggcgtgcggcgtctacaccccgcgctgcggccaggggctgcgctgctatccccacccgggctccgagctgcccctgcaggcgctggtcatgggcgagggcacttgtgagaagcgccgggacgccgagtatggcgccagcccggagcaggttgcagacaatggcgatgaccactcagaaggaggcctggtggagaaccacgtggacagcaccatgaacatgttgggcgggggaggcagtgctggccggaagcccctcaagtcgggtatgaaggagctggccgtgttccgggagaaggtcactgagcagcaccggcagatgggcaagggtggcaagcatcaccttggcctggaggagcccaagaagctgcgaccaccccctgccaggactccctgccaacaggaactggaccaggtcctggagcggatctccaccatgcgccttccggatgagcggggccctctggagcacctctactccctgcacatccccaactgtgacaagcatggcctgtacaacctcaaacagtgctggtgtgtgaaccccaacaccgggaagctgatccagggagcccccaccatccggggggaccccgagtgtcatctcttctacaatgagcagcaggaggctcgcggggtgcacacccagcggatgcagtagaccgcagccagccggtgcctggcgcccctgccccccgcccctctccaaacaccggcagaaaacggagagtgcttgggtggtgggtgctggaggattttccagttctgacacacgtatttatatttggaaagagaccagcaccgagctcggcacctccccggcctctctcttcccagctgcagatgccacacctgctccttcttgctttccccgggggaggaagggggttgtggtcggggagctggggtacaggtttggggagggggaagagaaatttttatttttgaacccctgtgtcccttttgcataagattaaaggaaggaaaagtaaagtcccttttgcataagattaaaggaaggaaaagtaaagtgtgtgt

SEQ ID NO: 308640 - DNA, 946 bp, Homo sapiens
gaggaagaagcggaggaggcggctcccgcgctcgcagggccgtgccacctgcccgcccgcccgctcgctcgctcgcccgccgcgccgcgctgccgaccgccagcatgctgccgagagtgggctgccccgcgctgccgctgccgccgccgccgctgctgccgctgctgccgctgctgctgctgctactgggcgcgagtggcggcggcggcggggcgcgcgcggaggtgctgttccgctgcccgccctgcacacccgagcgcctggccgcctgcgggcccccgccggttgcgccgcccgccgcggtggccgcagtggccggaggcgcccgcatgccatgcgcggagctcgtccgggagccgggctgcggctgctgctcggtgtgcgcccggctggagggcgaggcgtgcggcgtctacaccccgcgctgcggccaggggctgcgctgctatccccacccgggctccgagctgcccctgcaggcgctggtcatgggcgagggcacttgtgagaagcgccgggacgccgagtatggcgccagcccggagcaggttgcagacaatggcgatgaccactcagaaggaggcctggtggagaaccacgtggacagcaccatgaacatgttgggcgggggaggcagtgctggccggaagcccctcaagtcgggtatgaaggagctggccgtgttccgggagaaggtcactgagcagcaccggcagatgggcaagggtggcaagcatcaccttggcctggaggagcccaagaagctgcgaccaccccctgccaggactccctgccaacaggaactggaccaggtcctggagcggatctccaccatgcgccttccggatgagcggggccctctggagcacctctactccctgcacatccccaactgtgacaagcatggcctgtacaacctcaaacaggtgagcatggtgccagcctg

SEQ ID NO: 308641 - DNA, 891 bp, Homo sapiens
gactgtggcaggctggagctgttttcaaggcctccttcacctaggctgtgcatacaaaaggttgaagaaagtataaggagacttaatggacgcttgttggacagacatcacgaagcttcatgccctgcaacaatggcgatgaccactcagaaggaggcctggtggagaaccacgtggacagcaccatgaacatgttgggcgggggaggcagtgctggccggaagcccctcaagtcgggtatgaaggagctggccgtgttccgggagaaggtcactgagcagcaccggcagatgggcaagggtggcaagcatcaccttggcctggaggagcccaagaagctgcgaccaccccctgccaggactccctgccaacaggaactggaccaggtcctggagcggatctccaccatgcgccttccggatgagcggggccctctggagcacctctactccctgcacatccccaactgtgacaagcatggcctgtacaacctcaaacagtgcaagatgtctctgaacgggcagcgtggggagtgctggtgtgtgaaccccaacaccgggaagctgatccagggagcccccaccatccggggggaccccgagtgtcatctcttctacaatgagcagcaggaggctcgcggggtgcacacccagcggatgcagtagaccgcagccagccggtgcctggcgcccctgccccccgcccctctccaaacaccggcctctctcttcccagctgcagatgccacacctgctccttcttgctttccccgggggaggaagggggttgtggtcggggagctggggtacaggtttggggagggggaagagaaatttttatttttgaacccctgtgtcccttttgcataagattaaaggaaggaaaagtaaa

SEQ ID NO: 308642 - DNA, 627 bp, Homo sapiens
tctgcttttaataagcttcccaatcagctctcgagtgcaaagcgctctccctccctcgcccagccttcgtcctcctggcccgctcctctcatccctcccattctccatttcccttccgttccctccctgtcagggcgtaattgagtcaaaggcaggatcaggttccccgccttccagtccaaaaatcccgccaagagagccccagagcagaggaaaatccaaagtggagagaggggaagaaagagaccagtgagtcatccgtccagaaggcggggagagcagcagcggcccaagcaggagctgcagcgagccgggtacctggactcagcggtagcaacctcgccccttgcaacaaaggcagactgagcgccagagaggacgtttccaactcaaaaatgcaggctcaacagtaccagcagcagcgtcgaaaatttgcagctgccttcttggcattcattttcatactggcagctgtggatactgctgaagcagggaagaaagagaaaccagggaaccagaaaaaaaaggtgagagttctactttgggaatgcatggattttttttcccaccatggatcttggtcggcacagggggctatggctggactgatccaaccaccttggccca

SEQ ID NO: 308643 - DNA, 435 bp, Homo sapiens
tctgcttttaataagcttcccaatcagctctcgagtgcaaagcgctctccctccctcgcccagccttcgtcctcctggcccgctcctctcatccctcccattctccatttcccttccgttccctccctgtcagggcgtaattgagtcaaaggcaggatcaggttccccgccttccagtccaaaaatcccgccaagagagccccagagcagaggaaaatccaaagtggagagaggggaagaaagagaccagtgagtcatccgtccagaaggcggggagagcagcagcggcccaagcaggagctgcagcgagccgggtacctggactcagcggtagcaacctcgccccttgcaacaaaggcagactgagcgccagagaggacgtttccaactcaaagtatcataggactatggatgagcatcccatggcttgggcag

SEQ ID NO: 308644 - DNA, 1584 bp, Homo sapiens
tctgcttttaataagcttcccaatcagctctcgagtgcaaagcgctctccctccctcgcccagccttcgtcctcctggcccgctcctctcatccctcccattctccatttcccttccgttccctccctgtcagggcgtaattgagtcaaaggcaggatcaggttccccgccttccagtccaaaaatcccgccaagagagccccagagcagaggaaaatccaaagtggagagaggggaagaaagagaccagtgagtcatccgtccagaaggcggggagagcagcagcggcccaagcaggagctgcagcgagccgggtacctggactcagcggtagcaacctcgccccttgcaacaaaggcagactgagcgccagagaggacgtttccaactcaaaaatgcaggctcaacagtaccagcagcagcgtcgaaaatttgcagctgccttcttggcattcattttcatactggcagctgtggatactgctgaagcagggaagaaagagaaaccagaaaaaaaagtgaagaagtctgactgtggagaatggcagtggagtgtgtgtgtgcccaccagtggagactgtgggctgggcacacgggagggcactcggactggagctgagtgcaagcaaaccatgaagacccagagatgtaagatcccctgcaactggaagaagcaatttggcgcggagtgcaaataccagttccaggcctggggagaatgtgacctgaacacagccctgaagaccagaactggaagtctgaagcgagccctgcacaatgccgaatgccagaagactgtcaccatctccaagccctgtggcaaactgaccaagcccaaacctcaagcagaatctaagaagaagaaaaaggaaggcaagaaacaggagaagatgctggattaaaagatgtcacctgtggaacataaaaaggacatcagcaaacaggatcagttaactattgcatttatatgtaccgtaggctttgtattcaaaaattatctatagctaagtacacaataagcaaaaacaaaaagaaaagaaaatttttgtagtagcgttttttaaatgtatactatagtaccagtaggggcttataataaaggactgtaatcttatttaggaagttgacttatagtacatgataaatgatagacaattgaggtaagttttttgaaattatgtgacattttacattaaattttttttacattttttgggcagcaatttaaatgttatgactatgtaaactacttctcttgttaggtaatttttttcacctagatttttttcccaattgagaaaaatatatactaaacaaaatagcaataaaacataatcactctatttgaagaaaatatcttgttttctgccaatagattttttaaaatgtagtcagcaaaatgggggtggggaagcagagcatgtcctagttcaatgttgactttttttttttttaaagaaaagcattaagacataaaattctttcactttggcagaagcatttgttttcttgatgaaattatttttccatctgaggaaaaaaatactaggaaaataaatcaaggtgatgctgaaaaaaaaaaaa

SEQ ID NO: 308645 - DNA, 1620 bp, Homo sapiens
ggctgcaggattcggcacgagtaaacaccagcttgttgttgagcagcagctggaagccctcccgcttgccttgctcatcacccctgtgcagctcgtcggcctgctgcaggaggggcagcacatcctccaagcctgaggaacctccagcctccagggcactggaggcacctgaagctgcctcttcctccaagtcaagagaatcctttctccccatcttcacagtctcacagctcacttcatcttccccgtcctcactttctttgtcagagtcccgctcattgtcagactccgcattggctgttgtgtaaccctcgtgccgaattcggcacgagggagctgcagcgagccgggtacctggactcagcggtagcaacctcgccccttgcaacaaaggcagactgagcgccagagaggacgtttccaactcaaaaatgcaggctcaacagtaccagcagcagcgtcgaaaatttgcagctgccttcttggcattcattttcatactggcagctgtggatactgctgaagcagggaagaaagagaaaccagaaaaaaaagtgaagaagtctgactgtggagaatggcagtggagtgtgtgtgtgcccaccagtggagactgtgggctgggcacacgggagggcactcggactggagctgagtgcaagcaaaccatgaagacccagagatgtaagatcccctgcaactggaagaagcaatttggcgcggagtgcaaataccagttccaggcctggggagaatgtgacctgaacacagccctgaagaccagaactggaagtctgaagcgagccctgcacaatgccgaatgccagaagactgtcaccatctccaagccctgtggcaaactgaccaagcccaaacctcaagcagaatctaagaagaagaaaaaggaaggcaagaaacaggagaagatgctggattaaaagatgtcacctgtggaacataaaaaggacatcagcaaacaggatcagttaactattgcatttatatgtaccgtaggctttgtattcaaaaattatctatagctaagtacacaataagcaaaaacaaaaagaaaagaaaatttttgtagtagcgttttttaaatgtatactatagtaccagtaggggcttataataaaggactgtaatcttatttaggaagttgacttatagtacatgataaatgatagacaattgaggtaagttttttgaaattatgtgacattttacattaaattttttttacattttttgggcagcaatttaaatgttatgactatgtaaactacttctcttgttaggtaatttttttcacctagatttttttcccaattgagaaaaatatatactaaacaaaatagcaataaaacataatcactctatttgaagaaaatatcttgttttctgccaatagattttttaaaatgtagtcagcaaaatgggggtggggaagcagagcatgtcctagttcaatgttgactttttttttttttaaagaaaagcattaagacataaaattctttcactttggcagaagcatttgttttcttgatgaaattatttttccatctgaggaaaaaaatactaggaaaataaatcaaggtgatgctgaaaaaaaaaaaa

SEQ ID NO: 308646 - DNA, 2146 bp, Homo sapiens
agcaacaatagaaacaaaagagaaagagaaagactagataaaagtaagaagagaacagaacgtgaaaatctcagaaagttagataccatgtttccaccattatatgaaagaacagaagaacagattttgtgaaattagaaaagctatgtgaacataaatatgaacaagagaaatgtattgaggtcaaatctcatacaaagtaacttaaaaggagagaatgaacagaaaaaggggaagaccattatttatatggccaattcaagaatttctgaatatgctcaagaaacagaacaacaaaaatctttgtaacctacagtttcaaaacgagttacaaaacactaagaaaacaatataaaatgtaaaagagcatcacaaattataattagaaaactcagcaatgaggtgacagaactaggaaagaattaaggggaaataagggacaagagagaccctctcatattgttttatattatttcatactcagaaaaggaaagagaagccaaacaaaaggcaggtaacccagcgcctaggaaccagacccgaaaccaaggaaccagatctgaaaccaggcctgggcctgcctgacctaagcctggtagtaaaaattccacccctgacctgacctggcaactgttgttatctacagattccagacattgtatggaaggacactgtgaaacctcccgttctgttctgtttcactctgaccatcggtgctcacagcccctatcacgtaccccctggcttgctcagtcgatcacgaccctctcacgtggacccccttagagttgttagcccttaaaagggacagaagttgagcacctgaggagctcagattttaagacgctaggctgctgatgctcccagctgattaaagccactcccttcactatctcggtgtctcctgtccgcggctcgtcctgctacatttcttggttccctgaccggcaagcgagaatgcaggctcaacagtaccagcagcagcgtcgaaaatttgcagctgccttcttggcattcattttcatactggcagctgtggatactgctgaagcagggaagaaagagaaaccagaaaaaaaagtgaagaagtctgactgtggagaatggcagtggagtgtgtgtgtgcccaccagtggagactgtgggctgggcacacgggagggcactcggactggagctgagtgcaagcaaaccatgaagacccagagatgtaagatcccctgcaactggaagaagcaatttggcgcggagtgcaaataccagttccaggcctggggagaatgtgacctgaacacagccctgaagaccagaactggaagtctgaagcgagccctgcacaatgccgaatgccagaagactgtcaccatctccaagccctgtggcaaactgaccaagcccaaacctcaagcagaatctaagaagaagaaaaaggaaggcaagaaacaggagaagatgctggattaaaagatgtcacctgtggaacataaaaaggacatcagcaaacaggatcagttaactattgcatttatatgtaccgtaggctttgtattcaaaaattatctatagctaagtacacaataagcaaaaacaaaaagaaaagaaaatttttgtagtagcgttttttaaatgtatactatagtaccagtaggggcttataataaaggactgtaatcttatttaggaagttgacttatagtacatgataaatgatagacaattgaggtaagttttttgaaattatgtgacattttacattaaattttttttacattttttgggcagcaatttaaatgttatgactatgtaaactacttctcttgttaggtaatttttttcacctagatttttttcccaattgagaaaaatatatactaaacaaaatagcaataaaacataatcactctatttgaagaaaatatcttgttttctgccaatagattttttaaaatgtagtcagcaaaatgggggtggggaagcagagcatgtcctagttcaatgttgactttttttttttttaaagaaaagcattaagacataaaattctttcactttggcagaagcatttgttttcttgatgaaattatttttccatctgaggaaaaaaatactaggaaaataaatcaaggtgatgctgaaaaaaaaaaaa

SEQ ID NO: 308647 - DNA, 1562 bp, Homo sapiens
ggctgcaggattcggcacgagtaaacaccagcttgttgttgagcagcagctggaagccctcccgcttgccttgctcatcacccctgtgcagctcgtcggcctgctgcaggaggggcagcacatcctccaagcctgaggaacctccagcctccagggcactggaggcacctgaagctgcctcttcctccaagtcaagagaatcctttctccccatcttcacagtctcacagctcacttcatcttccccgtcctcactttctttgtcagagtcccgctcattgtcagactccgcattggctgttgtgtaaccctcgtgccgaattcggcacgagggagctgcagcgagccgggtacctggactcagcggtagcaacctcgccccttgcaacaaaggcagactgagcgccagagaggacgtttccaactcaaaaatgcaggctcaacagtaccagcagcagcgtcgaaaatttgcagctgccttcttggcattcattttcatactggcagctgtggatactgctgaagcagggaagaaagagaaaccagcagtggagactgtgggctgggcacacgggagggcactcggactggagctgagtgcaagcaaaccatgaagacccagagatgtaagatcccctgcaactggaagaagcaatttggcgcggagtgcaaataccagttccaggcctggggagaatgtgacctgaacacagccctgaagaccagaactggaagtctgaagcgagccctgcacaatgccgaatgccagaagactgtcaccatctccaagccctgtggcaaactgaccaagcccaaacctcaagcagaatctaagaagaagaaaaaggaaggcaagaaacaggagaagatgctggattaaaagatgtcacctgtggaacataaaaaggacatcagcaaacaggatcagttaactattgcatttatatgtaccgtaggctttgtattcaaaaattatctatagctaagtacacaataagcaaaaacaaaaagaaaagaaaatttttgtagtagcgttttttaaatgtatactatagtaccagtaggggcttataataaaggactgtaatcttatttaggaagttgacttatagtacatgataaatgatagacaattgaggtaagttttttgaaattatgtgacattttacattaaattttttttacattttttgggcagcaatttaaatgttatgactatgtaaactacttctcttgttaggtaatttttttcacctagatttttttcccaattgagaaaaatatatactaaacaaaatagcaataaaacataatcactctatttgaagaaaatatcttgttttctgccaatagattttttaaaatgtagtcagcaaaatgggggtggggaagcagagcatgtcctagttcaatgttgactttttttttttttaaagaaaagcattaagacataaaattctttcactttggcagaagcatttgttttcttgatgaaattatttttccatctgaggaaaaaaatactaggaaaataaatcaaggtgatgctgaaaaaaaaaaaa

SEQ ID NO: 308648 - DNA, 1569 bp, Homo sapiens
tctgcttttaataagcttcccaatcagctctcgagtgcaaagcgctctccctccctcgcccagccttcgtcctcctggcccgctcctctcatccctcccattctccatttcccttccgttccctccctgtcagggcgtaattgagtcaaaggcaggatcaggttccccgccttccagtccaaaaatcccgccaagagagccccagagcagaggaaaatccaaagtggagagaggggaagaaagagaccagtgagtcatccgtccagaaggcggggagagcagcagcggcccaagcaggagctgcagcgagccgggtacctggactcagcggtagcaacctcgccccttgcaacaaaggcagactgagcgccagagaggacgtttccaactcaaaaatgcaggctcaacagtaccagcagcagcgtcgaaaatttgcagctgccttcttggcattcattttcatactggcagctgtggatactgctgaagcagggaagaaagagaaaccagaaaaaaaagtgaagaagtctgactgtggagaatggcagtggagtgtgtgtgtgcccaccagtggagactgtgggctgggcacacgggagggcactcggactggagctgagtgcaagcaaaccatgaagacccagagatgtaagatcccctgcaactggaagaagcaatttggcgcggagtgcaaataccagttccaggcctggggagaatgcctgaagaccagaactggaagtctgaagcgagccctgcacaatgccgaatgccagaagactgtcaccatctccaagccctgtggcaaactgaccaagcccaaacctcaagcagaatctaagaagaagaaaaaggaaggcaagaaacaggagaagatgctggattaaaagatgtcacctgtggaacataaaaaggacatcagcaaacaggatcagttaactattgcatttatatgtaccgtaggctttgtattcaaaaattatctatagctaagtacacaataagcaaaaacaaaaagaaaagaaaatttttgtagtagcgttttttaaatgtatactatagtaccagtaggggcttataataaaggactgtaatcttatttaggaagttgacttatagtacatgataaatgatagacaattgaggtaagttttttgaaattatgtgacattttacattaaattttttttacattttttgggcagcaatttaaatgttatgactatgtaaactacttctcttgttaggtaatttttttcacctagatttttttcccaattgagaaaaatatatactaaacaaaatagcaataaaacataatcactctatttgaagaaaatatcttgttttctgccaatagattttttaaaatgtagtcagcaaaatgggggtggggaagcagagcatgtcctagttcaatgttgactttttttttttttaaagaaaagcattaagacataaaattctttcactttggcagaagcatttgttttcttgatgaaattatttttccatctgaggaaaaaaatactaggaaaataaatcaaggtgatgctgaaaaaaaaaaaa

SEQ ID NO: 308649 - DNA, 910 bp, Homo sapiens
ttggatagtcaatgagaggaacatattacaggcttatttcctttaaatgacctgaacacagccctgaagaccagaactggaagtctgaagcgagccctgcacaatgccgaatgccagaagactgtcaccatctccaagccctgtggcaaactgaccaagcccaaacctcaagcagaatctaagaagaagaaaaaggaaggcaagaaacaggagaagatgctggattaaaagatgtcacctgtggaacataaaaaggacatcagcaaacaggatcagttaactattgcatttatatgtaccgtaggctttgtattcaaaaattatctatagctaagtacacaataagcaaaaacaaaaagaaaagaaaatttttgtagtagcgttttttaaatgtatactatagtaccagtaggggcttataataaaggactgtaatcttatttaggaagttgacttatagtacatgataaatgatagacaattgaggtaagttttttgaaattatgtgacattttacattaaattttttttacattttttgggcagcaatttaaatgttatgactatgtaaactacttctcttgttaggtaatttttttcacctagatttttttcccaattgagaaaaatatatactaaacaaaatagcaataaaacataatcactctatttgaagaaaatatcttgttttctgccaatagattttttaaaatgtagtcagcaaaatgggggtggggaagcagagcatgtcctagttcaatgttgactttttttttttttaaagaaaagcattaagacataaaattctttcactttggcagaagcatttgttttcttgatgaaattatttttccatctgaggaaaaaaatactaggaaaataaatcaaggtgatgctgaaaaaaaaaaaa

SEQ ID NO: 308650 - DNA, 1004 bp, Homo sapiens
  misc_feature (104)..(106): n is a, c, g, or t
agctctgtatatttgaactgctccttatgtgacaaaataggtagctcttgggctcatatactgggatgattatatctgtatatgtatttactccaggccagcannnagtcgtttgagaattgtagcctgttgttttcgctgtgacctgaacacagccctgaagaccagaactggaagtctgaagcgagccctgcacaatgccgaatgccagaagactgtcaccatctccaagccctgtggcaaactgaccaagcccaaacctcaagcagaatctaagaagaagaaaaaggaaggcaagaaacaggagaagatgctggattaaaagatgtcacctgtggaacataaaaaggacatcagcaaacaggatcagttaactattgcatttatatgtaccgtaggctttgtattcaaaaattatctatagctaagtacacaataagcaaaaacaaaaagaaaagaaaatttttgtagtagcgttttttaaatgtatactatagtaccagtaggggcttataataaaggactgtaatcttatttaggaagttgacttatagtacatgataaatgatagacaattgaggtaagttttttgaaattatgtgacattttacattaaattttttttacattttttgggcagcaatttaaatgttatgactatgtaaactacttctcttgttaggtaatttttttcacctagatttttttcccaattgagaaaaatatatactaaacaaaatagcaataaaacataatcactctatttgaagaaaatatcttgttttctgccaatagattttttaaaatgtagtcagcaaaatgggggtggggaagcagagcatgtcctagttcaatgttgactttttttttttttaaagaaaagcattaagacataaaattctttcactttggcagaagcatttgttttcttgatgaaattatttttccatctgaggaaaaaaatactaggaaaataaatcaaggtgatgctgaaaaaaaaaaaa

SEQ ID NO: 308651 - DNA, 1055 bp, Homo sapiens
ctaagtgaaaatgagcaacatcaggacagcatgacattaaagtatgtactatagagatctgatgagaaacagttcttaccctaaatattttgttatattgtcgccattatgaatttataaagacaggaaaatatagttgcctatgttttagggaccactattaaagcttataaatatttgtgtattttcatttagaagtaccatctacgagagtagtttatactgcactgtgtacatgaatggctaatgaatctattttccaactttcccgtgttttatagatatttcttttcactttgggctagcccaaagtgaaacagaatctaagaagaagaaaaaggaaggcaagaaacaggagaagatgctggattaaaagatgtcacctgtggaacataaaaaggacatcagcaaacaggatcagttaactattgcatttatatgtaccgtaggctttgtattcaaaaattatctatagctaagtacacaataagcaaaaacaaaaagaaaagaaaatttttgtagtagcgttttttaaatgtatactatagtaccagtaggggcttataataaaggactgtaatcttatttaggaagttgacttatagtacatgataaatgatagacaattgaggtaagttttttgaaattatgtgacattttacattaaattttttttacattttttgggcagcaatttaaatgttatgactatgtaaactacttctcttgttaggtaatttttttcacctagatttttttcccaattgagaaaaatatatactaaacaaaatagcaataaaacataatcactctatttgaagaaaatatcttgttttctgccaatagattttttaaaatgtagtcagcaaaatgggggtggggaagcagagcatgtcctagttcaatgttgactttttttttttttaaagaaaagcattaagacataaaattctttcactttggcagaagcatttgttttcttgatgaaattatttttccatctgaggaaaaaaatactaggaaaataaatcaaggtgatgctgaaaaaaaaaaaa

SEQ ID NO: 308652 - DNA, 806 bp, Homo sapiens
  misc_feature (64)..(64): n is a, c, g, or t
  misc_feature (66)..(67): n is a, c, g, or t
gtgatagtgataaatgctgtaaaatatagaggagggaagagaatctagcgggaactagagcagntnngcagaatctaagaagaagaaaaaggaaggcaagaaacaggagaagatgctggattaaaagatgtcacctgtggaacataaaaaggacatcagcaaacaggatcagttaactattgcatttatatgtaccgtaggctttgtattcaaaaattatctatagctaagtacacaataagcaaaaacaaaaagaaaagaaaatttttgtagtagcgttttttaaatgtatactatagtaccagtaggggcttataataaaggactgtaatcttatttaggaagttgacttatagtacatgataaatgatagacaattgaggtaagttttttgaaattatgtgacattttacattaaattttttttacattttttgggcagcaatttaaatgttatgactatgtaaactacttctcttgttaggtaatttttttcacctagatttttttcccaattgagaaaaatatatactaaacaaaatagcaataaaacataatcactctatttgaagaaaatatcttgttttctgccaatagattttttaaaatgtagtcagcaaaatgggggtggggaagcagagcatgtcctagttcaatgttgactttttttttttttaaagaaaagcattaagacataaaattctttcactttggcagaagcatttgttttcttgatgaaattatttttccatctgaggaaaaaaatactaggaaaataaatcaaggtgatgctgaaaaaaaaaaaa

SEQ ID NO: 308653 - DNA, 810 bp, Homo sapiens
aataataacgttgcgacttctgcgacagacacagcgacgaggggcccttacgggaaacaaggagcagactagcagaatctaagaagaagaaaaaggaaggcaagaaacaggagaagatgctggattaaaagatgtcacctgtggaacataaaaaggacatcagcaaacaggatcagttaactattgcatttatatgtaccgtaggctttgtattcaaaaattatctatagctaagtacacaataagcaaaaacaaaaagaaaagaaaatttttgtagtagcgttttttaaatgtatactatagtaccagtaggggcttataataaaggactgtaatcttatttaggaagttgacttatagtacatgataaatgatagacaattgaggtaagttttttgaaattatgtgacattttacattaaattttttttacattttttgggcagcaatttaaatgttatgactatgtaaactacttctcttgttaggtaatttttttcacctagatttttttcccaattgagaaaaatatatactaaacaaaatagcaataaaacataatcactctatttgaagaaaatatcttgttttctgccaatagattttttaaaatgtagtcagcaaaatgggggtggggaagcagagcatgtcctagttcaatgttgactttttttttttttaaagaaaagcattaagacataaaattctttcactttggcagaagcatttgttttcttgatgaaattatttttccatctgaggaaaaaaatactaggaaaataaatcaaggtgatgctgaaaaaaaaaaaa

SEQ ID NO: 308654 - DNA, 824 bp, Homo sapiens
acactgtttactacatcggtcacccatatccaacatcagacgcgacacagcggcctgactcggataacaagcagcagcaccttggccagaatctaagaagaagaaaaaggaaggcaagaaacaggagaagatgctggattaaaagatgtcacctgtggaacataaaaaggacatcagcaaacaggatcagttaactattgcatttatatgtaccgtaggctttgtattcaaaaattatctatagctaagtacacaataagcaaaaacaaaaagaaaagaaaatttttgtagtagcgttttttaaatgtatactatagtaccagtaggggcttataataaaggactgtaatcttatttaggaagttgacttatagtacatgataaatgatagacaattgaggtaagttttttgaaattatgtgacattttacattaaattttttttacattttttgggcagcaatttaaatgttatgactatgtaaactacttctcttgttaggtaatttttttcacctagatttttttcccaattgagaaaaatatatactaaacaaaatagcaataaaacataatcactctatttgaagaaaatatcttgttttctgccaatagattttttaaaatgtagtcagcaaaatgggggtggggaagcagagcatgtcctagttcaatgttgactttttttttttttaaagaaaagcattaagacataaaattctttcactttggcagaagcatttgttttcttgatgaaattatttttccatctgaggaaaaaaatactaggaaaataaatcaaggtgatgctgaaaaaaaaaaaa

SEQ ID NO: 308655 - DNA, 822 bp, Homo sapiens
  misc_feature (18)..(18): n is a, c, g, or t
atcactatactccaacantcatcattggtcatcgaccgcgcaggaataacggcggttaccgagcatactaagcagcagcatttgcagaatctaagaagaagaaaaaggaaggcaagaaacaggagaagatgctggattaaaagatgtcacctgtggaacataaaaaggacatcagcaaacaggatcagttaactattgcatttatatgtaccgtaggctttgtattcaaaaattatctatagctaagtacacaataagcaaaaacaaaaagaaaagaaaatttttgtagtagcgttttttaaatgtatactatagtaccagtaggggcttataataaaggactgtaatcttatttaggaagttgacttatagtacatgataaatgatagacaattgaggtaagttttttgaaattatgtgacattttacattaaattttttttacattttttgggcagcaatttaaatgttatgactatgtaaactacttctcttgttaggtaatttttttcacctagatttttttcccaattgagaaaaatatatactaaacaaaatagcaataaaacataatcactctatttgaagaaaatatcttgttttctgccaatagattttttaaaatgtagtcagcaaaatgggggtggggaagcagagcatgtcctagttcaatgttgactttttttttttttaaagaaaagcattaagacataaaattctttcactttggcagaagcatttgttttcttgatgaaattatttttccatctgaggaaaaaaatactaggaaaataaatcaaggtgatgctgaaaaaaaaaaaa

SEQ ID NO: 308656 - DNA, 818 bp, Homo sapiens
tctatgtaggtatatgtagacaatcacggtcagaccaaccaacgaggcggcgcttgcacggaaaccaacaagagcactagcagaatctaagaagaagaaaaaggaaggcaagaaacaggagaagatgctggattaaaagatgtcacctgtggaacataaaaaggacatcagcaaacaggatcagttaactattgcatttatatgtaccgtaggctttgtattcaaaaattatctatagctaagtacacaataagcaaaaacaaaaagaaaagaaaatttttgtagtagcgttttttaaatgtatactatagtaccagtaggggcttataataaaggactgtaatcttatttaggaagttgacttatagtacatgataaatgatagacaattgaggtaagttttttgaaattatgtgacattttacattaaattttttttacattttttgggcagcaatttaaatgttatgactatgtaaactacttctcttgttaggtaatttttttcacctagatttttttcccaattgagaaaaatatatactaaacaaaatagcaataaaacataatcactctatttgaagaaaatatcttgttttctgccaatagattttttaaaatgtagtcagcaaaatgggggtggggaagcagagcatgtcctagttcaatgttgactttttttttttttaaagaaaagcattaagacataaaattctttcactttggcagaagcatttgttttcttgatgaaattatttttccatctgaggaaaaaaatactaggaaaataaatcaaggtgatgctgaaaaaaaaaaaa

SEQ ID NO: 308657 - DNA, 812 bp, Homo sapiens
  misc_feature (42)..(43): n is a, c, g, or t
ataattgaaaaaataagaatcacacataaattaattgtccanncctcgttagaagcaactaatagtagcatttgcagaatctaagaagaagaaaaaggaaggcaagaaacaggagaagatgctggattaaaagatgtcacctgtggaacataaaaaggacatcagcaaacaggatcagttaactattgcatttatatgtaccgtaggctttgtattcaaaaattatctatagctaagtacacaataagcaaaaacaaaaagaaaagaaaatttttgtagtagcgttttttaaatgtatactatagtaccagtaggggcttataataaaggactgtaatcttatttaggaagttgacttatagtacatgataaatgatagacaattgaggtaagttttttgaaattatgtgacattttacattaaattttttttacattttttgggcagcaatttaaatgttatgactatgtaaactacttctcttgttaggtaatttttttcacctagatttttttcccaattgagaaaaatatatactaaacaaaatagcaataaaacataatcactctatttgaagaaaatatcttgttttctgccaatagattttttaaaatgtagtcagcaaaatgggggtggggaagcagagcatgtcctagttcaatgttgactttttttttttttaaagaaaagcattaagacataaaattctttcactttggcagaagcatttgttttcttgatgaaattatttttccatctgaggaaaaaaatactaggaaaataaatcaaggtgatgctgaaaaaaaaaaaa

SEQ ID NO: 308658 - DNA, 807 bp, Homo sapiens
ttatgtgcatcaaatacgccgatcctgcacgcaagcagcggcgcttgcgggatactaacagcagaattgcagaatctaagaagaagaaaaaggaaggcaagaaacaggagaagatgctggattaaaagatgtcacctgtggaacataaaaaggacatcagcaaacaggatcagttaactattgcatttatatgtaccgtaggctttgtattcaaaaattatctatagctaagtacacaataagcaaaaacaaaaagaaaagaaaatttttgtagtagcgttttttaaatgtatactatagtaccagtaggggcttataataaaggactgtaatcttatttaggaagttgacttatagtacatgataaatgatagacaattgaggtaagttttttgaaattatgtgacattttacattaaattttttttacattttttgggcagcaatttaaatgttatgactatgtaaactacttctcttgttaggtaatttttttcacctagatttttttcccaattgagaaaaatatatactaaacaaaatagcaataaaacataatcactctatttgaagaaaatatcttgttttctgccaatagattttttaaaatgtagtcagcaaaatgggggtggggaagcagagcatgtcctagttcaatgttgactttttttttttttaaagaaaagcattaagacataaaattctttcactttggcagaagcatttgttttcttgatgaaattatttttccatctgaggaaaaaaatactaggaaaataaatcaaggtgatgctgaaaaaaaaaaaa

SEQ ID NO: 308659 - DNA, 806 bp, Homo sapiens
  misc_feature (55)..(55): n is a, c, g, or t
tcgtttagagttttttcgcgcaggtgtacgaggcgcagacgcgcgcccctcacanggatactagcagacagaatctaagaagaagaaaaaggaaggcaagaaacaggagaagatgctggattaaaagatgtcacctgtggaacataaaaaggacatcagcaaacaggatcagttaactattgcatttatatgtaccgtaggctttgtattcaaaaattatctatagctaagtacacaataagcaaaaacaaaaagaaaagaaaatttttgtagtagcgttttttaaatgtatactatagtaccagtaggggcttataataaaggactgtaatcttatttaggaagttgacttatagtacatgataaatgatagacaattgaggtaagttttttgaaattatgtgacattttacattaaattttttttacattttttgggcagcaatttaaatgttatgactatgtaaactacttctcttgttaggtaatttttttcacctagatttttttcccaattgagaaaaatatatactaaacaaaatagcaataaaacataatcactctatttgaagaaaatatcttgttttctgccaatagattttttaaaatgtagtcagcaaaatgggggtggggaagcagagcatgtcctagttcaatgttgactttttttttttttaaagaaaagcattaagacataaaattctttcactttggcagaagcatttgttttcttgatgaaattatttttccatctgaggaaaaaaatactaggaaaataaatcaaggtgatgctgaaaaaaaaaaaa

SEQ ID NO: 308660 - DNA, 804 bp, Homo sapiens
  misc_feature (8)..(8): n is a, c, g, or t
  misc_feature (53)..(53): n is a, c, g, or t
tcaattantctagtaagtctatatatcactaaggcgggcacggccactttacngggatgacaagagcagaatctaagaagaagaaaaaggaaggcaagaaacaggagaagatgctggattaaaagatgtcacctgtggaacataaaaaggacatcagcaaacaggatcagttaactattgcatttatatgtaccgtaggctttgtattcaaaaattatctatagctaagtacacaataagcaaaaacaaaaagaaaagaaaatttttgtagtagcgttttttaaatgtatactatagtaccagtaggggcttataataaaggactgtaatcttatttaggaagttgacttatagtacatgataaatgatagacaattgaggtaagttttttgaaattatgtgacattttacattaaattttttttacattttttgggcagcaatttaaatgttatgactatgtaaactacttctcttgttaggtaatttttttcacctagatttttttcccaattgagaaaaatatatactaaacaaaatagcaataaaacataatcactctatttgaagaaaatatcttgttttctgccaatagattttttaaaatgtagtcagcaaaatgggggtggggaagcagagcatgtcctagttcaatgttgactttttttttttttaaagaaaagcattaagacataaaattctttcactttggcagaagcatttgttttcttgatgaaattatttttccatctgaggaaaaaaatactaggaaaataaatcaaggtgatgctgaaaaaaaaaaaa

SEQ ID NO: 308661 - DNA, 796 bp, Homo sapiens
aagaagatacaatgtaaatataaataacacagcaccccgggcctacatggataacaaccagaatctaagaagaagaaaaaggaaggcaagaaacaggagaagatgctggattaaaagatgtcacctgtggaacataaaaaggacatcagcaaacaggatcagttaactattgcatttatatgtaccgtaggctttgtattcaaaaattatctatagctaagtacacaataagcaaaaacaaaaagaaaagaaaatttttgtagtagcgttttttaaatgtatactatagtaccagtaggggcttataataaaggactgtaatcttatttaggaagttgacttatagtacatgataaatgatagacaattgaggtaagttttttgaaattatgtgacattttacattaaattttttttacattttttgggcagcaatttaaatgttatgactatgtaaactacttctcttgttaggtaatttttttcacctagatttttttcccaattgagaaaaatatatactaaacaaaatagcaataaaacataatcactctatttgaagaaaatatcttgttttctgccaatagattttttaaaatgtagtcagcaaaatgggggtggggaagcagagcatgtcctagttcaatgttgactttttttttttttaaagaaaagcattaagacataaaattctttcactttggcagaagcatttgttttcttgatgaaattatttttccatctgaggaaaaaaatactaggaaaataaatcaaggtgatgctgaaaaaaaaaaaa

SEQ ID NO: 308662 - DNA, 794 bp, Homo sapiens
gagtggcaatagagaagtaccgccataccccaaaggcgggggcttgccggatacaacagaatctaagaagaagaaaaaggaaggcaagaaacaggagaagatgctggattaaaagatgtcacctgtggaacataaaaaggacatcagcaaacaggatcagttaactattgcatttatatgtaccgtaggctttgtattcaaaaattatctatagctaagtacacaataagcaaaaacaaaaagaaaagaaaatttttgtagtagcgttttttaaatgtatactatagtaccagtaggggcttataataaaggactgtaatcttatttaggaagttgacttatagtacatgataaatgatagacaattgaggtaagttttttgaaattatgtgacattttacattaaattttttttacattttttgggcagcaatttaaatgttatgactatgtaaactacttctcttgttaggtaatttttttcacctagatttttttcccaattgagaaaaatatatactaaacaaaatagcaataaaacataatcactctatttgaagaaaatatcttgttttctgccaatagattttttaaaatgtagtcagcaaaatgggggtggggaagcagagcatgtcctagttcaatgttgactttttttttttttaaagaaaagcattaagacataaaattctttcactttggcagaagcatttgttttcttgatgaaattatttttccatctgaggaaaaaaatactaggaaaataaatcaaggtgatgctgaaaaaaaaaaaa

SEQ ID NO: 308663 - DNA, 793 bp, Homo sapiens
atctaataatgtagctcatctctttatcaaacaacttaattcccttagaagtaaccagaatctaagaagaagaaaaaggaaggcaagaaacaggagaagatgctggattaaaagatgtcacctgtggaacataaaaaggacatcagcaaacaggatcagttaactattgcatttatatgtaccgtaggctttgtattcaaaaattatctatagctaagtacacaataagcaaaaacaaaaagaaaagaaaatttttgtagtagcgttttttaaatgtatactatagtaccagtaggggcttataataaaggactgtaatcttatttaggaagttgacttatagtacatgataaatgatagacaattgaggtaagttttttgaaattatgtgacattttacattaaattttttttacattttttgggcagcaatttaaatgttatgactatgtaaactacttctcttgttaggtaatttttttcacctagatttttttcccaattgagaaaaatatatactaaacaaaatagcaataaaacataatcactctatttgaagaaaatatcttgttttctgccaatagattttttaaaatgtagtcagcaaaatgggggtggggaagcagagcatgtcctagttcaatgttgactttttttttttttaaagaaaagcattaagacataaaattctttcactttggcagaagcatttgttttcttgatgaaattatttttccatctgaggaaaaaaatactaggaaaataaatcaaggtgatgctgaaaaaaaaaaaa

SEQ ID NO: 308664 - DNA, 855 bp, Homo sapiens
tgcctccctttcctcctctaagatcctgcttgaggtttgggcttggtcagtttgccacagggcttggagatggtgacagtcttctggcattcggcattgtgcagggctcaaacctcacagaatctaagaagaagaaaaaggaaggcaagaaacaggagaagatgctggattaaaagatgtcacctgtggaacataaaaaggacatcagcaaacaggatcagttaactattgcatttatatgtaccgtaggctttgtattcaaaaattatctatagctaagtacacaataagcaaaaacaaaaagaaaagaaaatttttgtagtagcgttttttaaatgtatactatagtaccagtaggggcttataataaaggactgtaatcttatttaggaagttgacttatagtacatgataaatgatagacaattgaggtaagttttttgaaattatgtgacattttacattaaattttttttacattttttgggcagcaatttaaatgttatgactatgtaaactacttctcttgttaggtaatttttttcacctagatttttttcccaattgagaaaaatatatactaaacaaaatagcaataaaacataatcactctatttgaagaaaatatcttgttttctgccaatagattttttaaaatgtagtcagcaaaatgggggtggggaagcagagcatgtcctagttcaatgttgactttttttttttttaaagaaaagcattaagacataaaattctttcactttggcagaagcatttgttttcttgatgaaattatttttccatctgaggaaaaaaatactaggaaaataaatcaaggtgatgctgaaaaaaaaaaaa

SEQ ID NO: 308665 - DNA, 880 bp, Homo sapiens
cttctttcagtgggagagaactattgagaggaacaaagagcttataaatacattaggacctggaattcagttgtcgagccaggacggtgacagcgtttaacaaagcttagagaaacctccaggagactgctatcatggcagagaagcccaagctccactacttcaatgcacggggcagaatggagtccacccggtggctcctggctgcagctggagtagagtttgaagagaaatttataaaatctgcagaagatttggacaagttaagaaatgatggatatttgatgttccagcaagtgccaatggttgagattgatgggatgaagctggtgcagaccagagccattctcaactacattgccagcaaatacaacctctatgggaaagacataaaggagagagccctgattgatatgtatatagaaggtatagcagatttgggtgaaatgatcctccttctgcccgtatgtccacctgaggaaaaagatgccaagcttgccttgatcaaagagaaaataaaaaatcgctacttccctgcctttgaaaaagtcttaaagagccatggacaagactaccttgttggcaacaagctgagccgggctgacattcatctggtggaacttctctactacgtcgaggagcttgactccagtcttatctccagcttccctctgctgaaggccctgaaaaccagaatcagcaacctgcccacagtgaagaagtttctacagcctggcagcccaaggaagcctcccatggatgagaaatctttagaagaagcaaggaagattttcaggttttaataacgcagtcatggaggccaagaacttgcaataccaatgttctaaagttttgcaacaataaagtactttacctaagt

SEQ ID NO: 308666 - DNA, 1082 bp, Homo sapiens
cttctttcagtgggagagaactattgagaggaacaaagagcttataaatacattaggacctggaattcagttgtcgagccaggacggtgacagcgtttaacaaagcttagagaaacctccaggagactgctatcatggcagagaagcccaagctccactacttcaatgcacggggcagaatggagtccacccggtggctcctggctgcagctggagtagagtttgaagagaaatttataaaatctgcagaagatttggacaagttaagaaatgatggatatttgatgttccagcaagtgccaatggttgagattgatgggatgaagctggtgcagaccagagccattctcaactacattgccagcaaatacaacctctatgggaaagacataaaggagagagccctgattgatatgtatatagaaggtatagcagatttgggtgaaatgatcctccttctgcccgtatgtccacctgaggaaaaagatgccaagcttgccttgatcaaagagaaaataaaaaatcgctacttccctgcctttgaaaaagtcttaaagagccatggacaagactaccttgttggcaacaagctgagccgggctgacattcatctggtggaacttctctactacgtcgaggagcttgactccagtcttatctccagcttccctctgctgaaggccctgaaaaccagaatcagcaacctgcccacagtgaagaagtttctacagcctggcagcccaaggaagcctcccatggatgagaaatctttagaagaagcaaggaagattttcaggttttaataacgcagtcatggaggccaagaacttgcaataccaatgttctaaagttttgcaacaataaagtactttacctaagtgttgattgtgcctgttgtgaagctaatgaactctttcaaattatatgctaattaaataatacaactcctattcgctgacttagttaaaattgatttgttttcattaggatctgatgtgaattcagatttccaatcttctcctagccaaccattttcctggaattaaaaattcagtaaaaaaggaaactatagattatgtggt

SEQ ID NO: 308667 - DNA, 950 bp, Homo sapiens
cttctttcagtgggagagaactattgagaggaacaaagagcttataaatacattaggacctggaattcagttgtcgagccaggacggtgacagcgtttaacaaagcttagagaaacctccaggagactgctatcatggcagagaagcccaagctccactacttcaatgcacggggcagaatggagtccacccggtggctcctggctgcagctggagtagagtttgaagagaaatttataaaatctgcagaagatttggacaagttaagaaatgatggatatttgatgttccagcaagtgccaatggttgagattgatgggatgaagctggtgcagaccagagccattctcaactacattgccagcaaatacaacctctatgggaaagacataaaggagagagccctgattgatatgtatatagaaggtatagcagatttgggtgaaatgatcctccttctgcccgtatgtccacctgaggaaaaagatgccaagcttgccttgatcaaagagaaaataaaaaatcgctacttccctgcctttgaaaaagtcttaaagagccatggacaagactaccttgttggcaacaagctgagccgggctgacattcatctggtggaacttctctactacgtcgaggagcttgactccagtcttatctccagcttccctctgctgaaggccctgaaaaccagaatcagcaacctgcccacagtgaagaagtttctacagcctggcagcccaaggaagcctcccatggatgagaaatctttagaagaagcaaggaagattttcaggttttaataacgcagtcatggaggccaagaacttgcaataccaatgttctaaagttttgcaacaataaagtactttacctaagtgttgattgtgcctgttgtgaagctaatgaactctttcaaattatatgctaattaaataatacaactccta

SEQ ID NO: 308668 - DNA, 830 bp, Homo sapiens
cttctttcagtgggagagaactattgagaggaacaaagagcttataaatacattaggacctggaattcagttgtcgagccaggacggtgacagcgtttaacaaagcttagagaaacctccaggagactgctatcatggcagagaagcccaagctccactacttcaatgcacggggcagaatggagtccacccggtggctcctggctgcagctggagtagagtttgaagagaaatttataaaatctgcagaagatttggacaagttaagaaatgatggatatttgatgttccagcaagtgccaatggttgagattgatgggatgaagctggtgcagaccagagccattctcaactacattgccagcaaatacaacctctatgggaaagacataaaggagagagccctgattgatatgtatatagaaggtatagcagatttgggtgaaatgatcctccttctgcccgtatgtccacctgaggaaaaagatgccaagcttgccttgatcaaagagaaaataaaaaatcgctacttccctgcctttgaaaaagtcttaaagagccatggacaagactaccttgttggcaacaagctgagccgggctgacattcatctggtggaacttctctactacgtcgaggagcttgactccagtcttatctccagcttccctctgctgaaggcctggcagcccaaggaagcctcccatggatgagaaatctttagaagaagcaaggaagattttcaggttttaataacgcagtcatggaggccaagaacttgcaataccaatgttctaaagttttgcaacaataaagtactttacctaagt

SEQ ID NO: 308669 - DNA, 676 bp, Homo sapiens
cttctttcagtgggagagaactattgagaggaacaaagagcttataaatacattaggacctggaattcagttgtcgagccaggacggtgacagcgtttaacaaagcttagagaaacctccaggagactgctatcatggcagagaagcccaagctccactacttcaatgcacggggcagaatggagtccacccggtggctcctggctgcagctggagtagagtttgaagagaaatttataaaatctgcagaagatttggacaagttaagaaatgatggatatttgatgttccagcaagtgccaatggttgagattgatgggatgaagctggtgcagaccagagccattctcaactacattgccagcaaatacaacctctatgggaaagacataaaggagagagccctgattgatatgtatatagaaggtatagcagatttgggtgaaatgatcctccttctgcccgtatgtccacctgaggaaaaagatgccaagcttgccttgatcaaagagaaaataaaaaatcgctacttccctgcctttgaaaaaggctgacattcatctggtggaacttctctactacgtcgaggagcttgactccagtcttatctccagcttccctctgctgaaggtgacccatttcacagcccagagaggcagccccacatctcccatct

SEQ ID NO: 308670 - DNA, 716 bp, Homo sapiens
  misc_feature (654)..(655): n is a, c, g, or t
  misc_feature (716)..(716): n is a, c, g, or t
cacgagcagcgtttaacaaagcttagagaaacctccaggagactgctatcatggcagagaagcccaagctccactacttcaatgcacggggcagaatggagtccacccggtggctcctggctgcagctggagtagagtttgaagagaaatttataaaatctgcagaagatttggacaagttaagaaatgatggatatttgatgttccagcaagtgccaatggttgagattgatgggatgaagctggtgcagaccagagccattctcaactacattgccagcaaatacaacctctatgggaaagacataaaggagagagccctgattgatatgtatatagaaggtatagcagatttgggtgaaatgatcctccttctgcccgtatgtccacctgaggaaaaagatgccaagcttgccttgatcaaagagaaaataaaaaatcgctacttccctgcctttgaaaaaggctgacattcatctggtggaacttctctactacgtcgaggagcttgactccagtcttatctccagcttccctctgctgaaggccctgaaaaccagaatcagcaacctgcccacagtgaagaagtttctacagcctggcagcccaaggaagcctcccatggatgagaaatctttagaagaagcaaggacnnggttatacgagcatgaggcagacttgatacatgtctaagttcgacataagactactaggtn

SEQ ID NO: 308671 - DNA, 1199 bp, Homo sapiens
  misc_feature (986)..(986): n is a, c, g, or t
  misc_feature (991)..(991): n is a, c, g, or t
cttctttcagtgggagagaactattgagaggaacaaagagcttataaatacattaggacctggaattcagttgtcgagccaggacggtgacagcgtttaacaaagcttagagaaacctccaggagactgctatcatggcagagaagcccaagctccactacttcaatgcacggggcagaatggagtccacccggtggctcctggctgcagctggagtagagtttgaagagaaatttataaaatctgcagaagatttggacaagttaagaaatgatggatatttgatgttccagcaagtgccaatggttgagattgatgggatgaagctggtgcagaccagagccattctcaactacattgccagcaaatacaacctctatgggaaagacataaaggagagagccctgattgatatgtatatagaaggtatagcagatttgggtgaaatgatcctccttctgcccgtatgtccacctgaggaaaaagatgccaagcttgccttgatcaaagagaaaataaaaaatcgctacttccctgcctttgaaaaagtcttaaagagccatggacaagactaccttgttggcaacaagctgagccgggctgacattcatctggtggaacttctctactacgtcgaggagcttgactccagtcttatctccagcttccctctgctgaaggccctgaaaaccagaatcagcaacctgcccacagtgaagaagtttctacagcctggcagcccaaggaagcctcccatggatgagaaatctttagaagaagcaaggaagattttcaggttttaataacgcagtcatggaggccaagaacttgcaataccaatgttctaaagttttgcaacaataaagtactttacctaagtaaaaaaaaaaaaaaaaaaaaaaaaaaaaaaaaaaaaaaaaaaaaaaaaaaaaaaaaaaaaaaaaaaaaaaaaaaaaaaaaaaaaaataaaaaaaaaaaaaaaaaanaaaanaaaaaaaaataaaaaaaaataaaaaaaaaatttgagagggggcccatgcccaatacccccttatgggagcgttttcacatttaagtgcccggtgttcaccacgcaggcattgggaaaaccctggggtatccaaattaaagcgtttgaagaaattccccttttgccaagtggggaaaaacgaaaaaggcccccccagagggcctttcaa

SEQ ID NO: 308672 - DNA, 1032 bp, Homo sapiens
cttctttcagtgggagagaactattgagaggaacaaagagcttataaatacattaggacctggaattcagttgtcgagccaggacggtgacagcgtttaacaaagcttagagaaacctccaggagactgctatcatggcagagaagcccaagctccactacttcaatgcacggggcagaatggagtccacccggtggctcctggctgcagctggagtagagtttgaagagaaatttataaaatctgcagaagatttggacaagttaagaaatgatggatatttgatgttccagcaagtgccaatggttgagattgatgggatgaagctggtgcagaccagagccattctcaactacattgccagcaaatacaacctctatgggaaagacataaaggagagagccctgattgatatgtatatagaaggtatagcagatttgggtgaaatgatcctccttctgcccgtatgtccacctgaggaaaaagatgccaagcttgccttgatcaaagagaaaataaaaaatcgctacttccctgcctttgaaaaaggctgacattcatctggtggaacttctctactacgtcgaggagcttgactccagtcttatctccagcttccctctgctgaaggccctgaaaaccagaatcagcaacctgcccacagtgaagaagtttctacagcctggcagcccaaggaagcctcccatggatgagaaatctttagaagaagcaaggaagattttcaggttttaataacgcagtcatggaggccaagaacttgcaataccaatgttctaaagttttgcaacaataaagtactttacctaagtgttgattgtgcctgttgtgaagctaatgaactctttcaaattatatgctaattaaataatacaactcctattcgctgacttagttaaaattgatttgttttcattaggatctgatgtgaattcagatttccaatcttctcctagccaaccattttcctggaattaaaaattcagtaaaaaaggaaactatagattatgtggt

SEQ ID NO: 308673 - DNA, 824 bp, Homo sapiens
cttctttcagtgggagagaactattgagaggaacaaagagcttataaatacattaggacctggaattcagttgtcgagccaggacggtgacagcgtttaacaaagcttagagaaacctccaggagactgctatcatggcagagaagcccaagctccactacttcaatgcacggggcagaatggagtccacccggtggctcctggctgcagctggagtagagtttgaagagaaatttataaaatctgcagaagatttggacaagttaagaaatgatggatatttgatgttccagcaagtgccaatggttgagattgatgggatgaagctggtgcagaccagagccattctcaactacattgccagcaaatacaacctctatgggaaagacataaaggagagagccctgattgatatgtatatagaaggtatagcagatttgggtgaaatgatcctccttctgcccgtatgtccacctgaggaaaaagatgccaagcttgccttgatcaaagagaaaataaaaaatcgctacttccctgcctttgaaaaagtcttaaagagccatggacaagactaccttgttggcaacaagctgagccgggctgacattcatctggtggaacttctctactacgtcgaggagcttgactccagtcttatctccagcttccctctgctgaaggccctgaaaaccagaatcagcaacctgcccacagtgaagaagtttctacaagattttcaggttttaataacgcagtcatggaggccaagaacttgcaataccaatgttctaaagttttgcaacaataaagtactttacctaagt

SEQ ID NO: 308674 - DNA, 1140 bp, Homo sapiens
cttctttcagtgggagagaactattgagaggaacaaagagcttataaatacattaggacctggaattcagttgtcgagccaggacggtgacagcgtttaacaaagcttagagaaacctccaggagactgctatcatggcagagaagcccaagctccactacttcaatgcacggggcagaatggagtccacccggtggctcctggctgcagctggagtagagtttgaagagaaatttataaaatctgcagaagatttggacaagttaagaaatgatggatatttgatgttccagcaagtgccaatggttgagattgatgggatgaagctggtgcagaccagagccattctcaactacattgccagcaaatacaacctctatgggaaagacataaaggagagagccctgattgatatgtatatagaaggtatagcagatttgggtgaaatgatcctccttctgcccgtatgtccacctgaggaaaaagatgccaagcttgccttgatcaaagagaaaataaaaaatcgctacttccctgcctttgaaaaagtcttaaagagccatggacaagactaccttgttggcaacaagctgagccgggctgacattcatctggtggaacttctctactacgtcgaggagcttgactccagtcttatctccagcttccctctgctgaagctctccagaacactggccccccacactgtatctctcactgagaaaaggtggtcccatggccctgaaaaccagaatcagcaacctgcccacagtgaagaagtttctacagcctggcagcccaaggaagcctcccatggatgagaaatctttagaagaagcaaggaagattttcaggttttaataacgcagtcatggaggccaagaacttgcaataccaatgttctaaagttttgcaacaataaagtactttacctaagtgttgattgtgcctgttgtgaagctaatgaactctttcaaattatatgctaattaaataatacaactcctattcgctgacttagttaaaattgatttgttttcattaggatctgatgtgaattcagatttccaatcttctcctagccaaccattttcctggaattaaaaattcagtaaaaaaggaaactatagattatgtggt

SEQ ID NO: 308675 - DNA, 1030 bp, Homo sapiens
cttctttcagtgggagagaactattgagaggaacaaagagcttataaatacattaggacctggaattcagttgtcgagccaggacggtgacagcgtttaacaaagcttagagaaacctccaggagactgctatcatggcagagaagcccaagctccactacttcaatgcacggggcagaatggagtccacccggtggctcctggctgcagctggagtagagatggatatttgatgttccagcaagtgccaatggttgagattgatgggatgaagctggtgcagaccagagccattctcaactacattgccagcaaatacaacctctatgggaaagacataaaggagagagccctgattgatatgtatatagaaggtatagcagatttgggtgaaatgatcctccttctgcccgtatgtccacctgaggaaaaagatgccaagcttgccttgatcaaagagaaaataaaaaatcgctacttccctgcctttgaaaaagtcttaaagagccatggacaagactaccttgttggcaacaagctgagccgggctgacattcatctggtggaacttctctactacgtcgaggagcttgactccagtcttatctccagcttccctctgctgaaggccctgaaaaccagaatcagcaacctgcccacagtgaagaagtttctacagcctggcagcccaaggaagcctcccatggatgagaaatctttagaagaagcaaggaagattttcaggttttaataacgcagtcatggaggccaagaacttgcaataccaatgttctaaagttttgcaacaataaagtactttacctaagtgttgattgtgcctgttgtgaagctaatgaactctttcaaattatatgctaattaaataatacaactcctattcgctgacttagttaaaattgatttgttttcattaggatctgatgtgaattcagatttccaatcttctcctagccaaccattttcctggaattaaaaattcagtaaaaaaggaaactatagattatgtggt

SEQ ID NO: 308676 - DNA, 949 bp, Homo sapiens
cttctttcagtgggagagaactattgagaggaacaaagagcttataaatacattaggacctggaattcagttgtcgagccaggacggtgacagcgtttaacaaagcttagagaaacctccaggagactgctatcatggcagagaagcccaagctccactacttcaatgcacggggcagaatggagtccacccggtggctcctggctgcagctggagtagagtttgaagagaaatttataaaatctgcagaagatttggacaagttaagaaatggattgatatgtatatagaaggtatagcagatttgggtgaaatgatcctccttctgcccgtatgtccacctgaggaaaaagatgccaagcttgccttgatcaaagagaaaataaaaaatcgctacttccctgcctttgaaaaagtcttaaagagccatggacaagactaccttgttggcaacaagctgagccgggctgacattcatctggtggaacttctctactacgtcgaggagcttgactccagtcttatctccagcttccctctgctgaaggccctgaaaaccagaatcagcaacctgcccacagtgaagaagtttctacagcctggcagcccaaggaagcctcccatggatgagaaatctttagaagaagcaaggaagattttcaggttttaataacgcagtcatggaggccaagaacttgcaataccaatgttctaaagttttgcaacaataaagtactttacctaagtgttgattgtgcctgttgtgaagctaatgaactctttcaaattatatgctaattaaataatacaactcctattcgctgacttagttaaaattgatttgttttcattaggatctgatgtgaattcagatttccaatcttctcctagccaaccattttcctggaattaaaaattcagtaaaaaaggaaactatagattatgtggt

SEQ ID NO: 308677 - DNA, 948 bp, Homo sapiens
cacgagcagcgtttaacaaagcttagagaaacctccaggagactgctatcatggcagagaagcccaagctccactacttcaatgcacggggcagaatggagtccacccggtggctcctggctgcagctggagtagagtttgaagagaaatttataaaatctgcagaagatttggacaagttaagaaatgatggatatttgatgttccagcaagtgccaatggttgagattgatgggatgaagctggtgcagaccagagccattctcaactacattgccagcaaatacaacctctatgggaaagacataaaggagagagccctgattgatatgtatatagaaggtatagcagatttgggtgaaatgatcctccttctgcccgtatgtccacctgaggaaaaagatgccaagcttgccttgatcaaagagaaaataaaaaatcgctacttccctgcctttgaaaaaggctgacattcatctggtggaacttctctactacgtcgaggagcttgactccagtcttatctccagcttccctctgctgaaggccctgaaaaccagaatcagcaacctgcccacagtgaagaagtttctacagcctggcagcccaaggaagcctcccatggatgagaaatctttagaagaagcaaggaagattttcaggttttaataacgcagtcatggaggccaagaacttgcaataccaatgttctaaagttttgcaacaataaagtactttacctaagtgttgattgtgcctgttgtgaagctaatgaactctttcaaattatatgctaattaaataatacaactcctattcgctgacttagttaaaattgatttgttttcattaggatctgatgtgaattcagatttccaatcttctcctagccaaccattttcctggaattaaaaattcagtaaaaaaggaaactatagattatgtggt

SEQ ID NO: 308678 - DNA, 821 bp, Homo sapiens
cacgagcagcgtttaacaaagcttagagaaacctccaggagactgctatcatggcagagaagcccaagctccactacttcaatgcacggggcagaatggagtccacccggtggctcctggctgcagctggagtagagtttgaagagaaatttataaaatctgcagaagatttggacaagttaagaaatggattgatatgtatatagaaggtatagcagatttgggtgaaatgatcctccttctgcccgtatgtccacctgaggaaaaagatgccaagcttgccttgatcaaagagaaaataaaaaatcgctacttccctgcctttgaaaaagtcttaaagagccatggacaagactaccttgttggcaacaagctgagccgggctgacattcatctggtggaacttctctactacgtcgaggagcttgactccagtcttatctccagcttccctctgctgaaggccctgaaaaccagaatcagcaacctgcccacagtgaagaagtttctacagcctggcagcccaaggaagcctcccatggatgagaaatctttagaagaagcaaggagcaataccaatgttctaaagttttgcaacaataaagtactttacctaagtgttgattgtgcctgttgtgaagctaatgaactctttcaaattatatgctaattaaataatacaactcctattcgctgacttagttaaaattgatttgttttcattaggatctgatgtgaattcagatttccaatcttctcctagccaaccattttcctggaattaaaaattcagtaaaaaaggaaactatagattatgtggt

SEQ ID NO: 308679 - DNA, 432 bp, Homo sapiens
agatagagatgactgaactgattaaaacttcaagacatctttggggaaaataaagtgagctacatgtccttccccttatcttcatttctcactgggtgtctgtttctgcctccatgcttgtgctgatggagcagactcacttggtctttgcaggaggggctcagattccctgggtcatgttaatggtggtgtcagcccttggcttcactctgaggctgtgctttatgaattacaggccctgaaaaccagaatcagcaacctgcccacagtgaagaagtttctacagcctggcagcccaaggaagcctcccatggatgagaaatctttagaagaagcaaggaagattttcaggttttaataacgcagtcatggaggccaagaacttgcaataccaatgttctaaagttttgcaacaataaagtactttaccta

SEQ ID NO: 308680 - DNA, 249 bp, Homo sapiens
caagaacgtatttactgtttctgcttccagtttgaagagaaatttataaaatctgcagaagatttggacaagttaagaaatggtaagatcaatctctaagttcctctgatgagggtatctagtagaaggtacacggggaggtttgcgcagccggcaatgtctatgggtgtggggcatggtatttgtacatggtgcagagggagaaagtggttaaaatggaagggatgtggctccttgagcaagtctggc

SEQ ID NO: 308681 - DNA, 597 bp, Homo sapiens
gtgcctcagcctcccgattagctagaattacaggctcccaccaccacacccggctaatttttgtatttttagtagagacagggtttcaccatgttggccaggctggtctcaaaactcctgacctcagctgatccacccgccttagcctcccaaagtgctgggattacaggcatgagctgccgcgcccggcctgcttcattattttcctgaagagttgcatcagctcacactcctcccagcagcatatggatgggcccttgcccttgcatcctcttcgctcagctcattttctctttgttttattgtcttgtggttaggctgtagactggaccttaagcagtggaattcttgtctcctgttcaggtgaagtgatctgtgaacctcccaacaacaaactggacaaattcagctgccattttcttcttagccacctcctcacaccattttaaatggacaggtgtgtgtaggggcccgtcctgggccagccagctgctcggcctgcaactttggactagaaatcgacactctgccccatgccgcagttttctcctctatattttttctgaaatttttttttgtagagactgcctcgccaag

SEQ ID NO: 308682 - DNA, 5300 bp, Homo sapiens
tccagcgagaccaacatgaaagtacgtcaggcgattccagtcacctcagaattgggagacatcagtaagcttgccaagtttgacggtgaagtgatctgtgaacctcccaacaacaaactggacaaattcagcggaaccctctactggaaggaaaataagttccctctgagcaaccagaacatgctgctgcggggctgtgtgctgcgaaacaccgagtggtgcttcgggctggtcatctttgcaggtcccgacactaagctgatgcaaaacagcggcagaacaaagttcaaaagaacgagtatcgatcgcctaatgaataccctggtgctctggatttttggattcctggtttgcatgggggtgatcctggccattggcaatgccatctgggagcacgaggtggggatgcgtttccaggtctacctgccgtgggatgaggcagtggacagtgccttcttctctggcttcctctccttctggtcctacatcatcatcctcaacaccgttgtgcccatttcactctatgtcagtgtggaggtcatccgtctgggccacagctacttcatcaactgggataagaagatgttctgcatgaagaagcggacgcctgcagaagcccgcaccaccaccctaaacgaggagctgggccaggtggagtacatcttctccgacaagacgggcaccctcacccagaacatcatggttttcaacaagtgctccatcaatggccacagctatggtgatgtgtttgacgtcctgggacacaaagctgaattgggagagaggcctgaacctgttgacttctccttcaatcctctggctgacaagaagttcttattttgggaccccagcctgctggaggctgtcaagatcggggacccccacacgcatgagttcttccgcctcctttccctgtgtcatactgtcatgtcagaagaaaagaacgaaggagagctgtactacaaagctcagtccccagatgagggggccctggtcaccgcagccaggaactttggttttgttttccgctctcgcacccccaaaacaatcaccgtccatgagatgggcacagccatcacctaccagctgctggccatcctggacttcaacaacatccgcaagcggatgtcggtcatagtgcggaatccagaggggaagatccgactctactgcaaaggggctgacactatcctactggacagactgcaccactccactcaagagctgctcaacaccaccatggaccaccttaatgagtacgcaggggaagggctgaggaccctggtgctggcctacaaggatctggatgaagagtactacgaggagtgggctgagcgacgcctccaggccagcctggcccaggacagccgggaggacaggctggctagcatctatgaggaggttgagaacaacatgatgctgctgggtgcaacggccattgaggacaaacttcagcaaggggttccagagaccattgccctcctgacactggccaacatcaagatttgggtgctaaccggagacaagcaagagacggctgtgaacatcggctattcctgcaagatgctgacggatgacatgactgaggttttcatagtcactggccatactgtcctggaggtgcgggaggagctcaggaaagcccgggagaagatgatggactcatcccgctccgtaggcaacggcttcacctatcaggacaagctttcttcttccaagctaacttctgtcctggaggccgttgctggggagtacgccctggtcataaatggtcacagcctggcccacgcactggaggcagacatggagctggagtttctggagacagcgtgtgcctgcaaagctgtcatctgctgccgggtgacccccttgcagaaggcacaggtggtagaactggtcaagaagtacaagaaggctgtgacgcttgccattggagacggagccaatgatgtcagcatgatcaaaacggctcacattggtgtggggatcagtgggcaggaagggatccaggctgtcttggcctccgattactccttctcccagttcaagttcctgcagcgcctcctgctggtgcatgggcgctggtcctacctgcgaatgtgcaagtttctttgctatttcttctacaaaaactttgctttcaccatggtccacttctggtttggcttcttctgtggcttctcagcccagaccgtctatgaccagtatttcatcaccctgtataacatcgtgtacacctccctgccagtcctggctatgggggtctttgatcaggatgtccccgagcagcggagcatggagtaccctaagctgtatgagccgggccagctgaaccttctcttcaacaagcgggagttcttcatctgcatcgcccagggcatctacacctccgtgctcatgttcttcattccctatggggtgtttgctgatgccacccgggatgatggcactcagctggctgactaccagtcctttgcagtcactgtggccacatccttggtcattgtggttagcgtgcagattgggctcgacacaggctactggacggccatcaaccacttcttcatctggggaagccttgctgtttactttgccatcctctttgccatgcacagcaatgggctcttcgacatgtttcccaaccagttccggtttgtggggaatgcccagaacaccttggcccagcccacggtgtggctgaccattgtgctcaccacagtcgtctgcatcatgcccgtggttgccttccgattcctcaggctcaacctgaagccggatctctccgacacggtccgctacacacagctcgtgaggaagaagcagaaggcccagcaccgctgcatgcggcgggttggccgcactggctcccggcgctccggctatgccttctcccatcaggagggcttcggggagctcatcatgtctggcaagaacatgcggctgagctctctcgcgctctccagcttcaccacccgctccagctccagctggattgagagcctgcgcaggaagaagagtgacagtgccagtagccccagtggcggtgccgacaagcccctcaagggctgaaggccgaggatggatgccctgtgccagtgaccagagcacccagggctggccagtcactgagggaacagcgtctcggaactgctggtcctcattccttgcttcccgtccccccggtagactctgtcctgctggtcccaccacacatggctgggacatctgttcccagctgtaggcccttccaccagctggggagctagagggagcaggcccaagggcagagcagaggctgaggcacggggagccagccccactcggggaccagaagtggaaccaaaaacaagaaaaaactgtgagagattgtgtctgcccctgccctgcctgggacccacagggagactataatctccttatttttttactcctactccccagaggggccctagtgcctctgttcctgaattacataagaatgtaccatgccgggaagccagagacctgcaggggcctcggcccctcacatcgtgtatgtctctccttgatttgtgttgtgtccagtttggttttgtctttttttatttggcaagtggaggaggcttttatgtgacttttatgttgtggttggtgtcttaactctcctgggaaaaggaggctggcacacactgggatgccgcagcctggccggctgtggggtggtttgggaggatccatgtcggctctgcctgcagtgaccagtgctctgtggggcagaggagctgaccagggagggaggtacccatgagcagagggtagtgggagagtgtaaaggagggtttggtcctgtctgcttcctcaccttgagagtaaagtgctgccctctgcccccaacacacacacatatcaattcctggattccttagtcctgctggccttgggctggagcctaggaaagtggcccccaaatccttagtgagctaaagctgggtctgaaatttggtcagtggggaggggtagttttcttttcttttttctttttctttttttctttttttttttgagatggagtctcactcttgtcacctaggcaagagtgcaatggcacaatctcagctcactgcaacctccacctcctgggttcaagcgattctcctgcctcagcctcctgagtagctgggattacaggcacacaccaccacgcttggttaatttttgtatttttagtagagatgtttcaccatgttggccaggctagtcttgaattcctgacctcctgacctgcccacctcaacctcccaaagtgctgagattacaggcgtgagccaccacacccagctcagggaggcgtagttttctttaattttaaatttaaacccaagtttattggcagactcccttttgacctccctttgcctccccatctggtgctttcttgcatctacaccccagggccctgtggtggggctgcagggggaagctgtgcacctgagatgaggctggaacgggaattggcctctctgctcccttcttcagtaagcaaggagccccgcccctcaggcccagcctctggcaagaggtggtggaatccttgtgccgggtagtagaggaggataagggcaaaaccaggcccaggccagtgcctggcttggtctggatgggacactgtcagagtttggccacagcctgtcctttacttcatccacacctatgaagctattccctaaataaggcatttcccaagttagtcgctacctaatcagccttgagaagaatcctttcctcttctttgatagtgggtcgggggattcttcaggaatggtttggagctgggagtgggtagggggattttaaatgttccatatgggagccccaaaggaactggatgggctgcagtgaggtgggggcgggtgggcagggaatgggagaggggaagtcttggcagggaaatcccttttggccacacagtttacaaacccagtatcatgtctgtctgtgtgtctctcaaggtgagagtctgatttttataccaaagaggaaatgattttttttcatattttgtttgtctatattatataaatatatatatacagtatatatatatatatattattttttggttctctctcgttttttagggagggaagaaagtaccaagttgcattgagctgtaattaaggaacattataatttatgacacatttctatacttgcaaaaattatatcattttatggatataagagaaaaatgcctttttataaaatttcaatttctgagaaaaagtaatttgtctcttttctgatgtttaaccaagactggt

SEQ ID NO: 308683 - DNA, 5578 bp, Homo sapiens
gtgcctcagcctcccgattagctagaattacaggctcccaccaccacacccggctaatttttgtatttttagtagagacagggtttcaccatgttggccaggctggtctcaaaactcctgacctcagctgatccacccgccttagcctcccaaagtgctgggattacaggcatgagctgccgcgcccggcctgcttcattattttcctgaagagttgcatcagctcacactcctcccagcagcatatggatgggcccttgcccttgcatcctcttcgctcagctcattttctctttgttttattgtcttgtggttaggctgtagactggaccttaagcagtggaattcttgtctcctgttcaggtgaagtgatctgtgaacctcccaacaacaaactggacaaattcagcggaaccctctactggaaggaaaataagttccctctgagcaaccagaacatgctgctgcggggctgtgtgctgcgaaacaccgagtggtgcttcgggctggtcatctttgcaggtcccgacactaagctgatgcaaaacagcggcagaacaaagttcaaaagaacgagtatcgatcgcctaatgaataccctggtgctctggatttttggattcctggtttgcatgggggtgatcctggccattggcaatgccatctgggagcacgaggtggggatgcgtttccaggtctacctgccgtgggatgaggcagtggacagtgccttcttctctggcttcctctccttctggtcctacatcatcatcctcaacaccgttgtgcccatttcactctatgtcagtgtggaggtcatccgtctgggccacagctacttcatcaactgggataagaagatgttctgcatgaagaagcggacgcctgcagaagcccgcaccaccaccctaaacgaggagctgggccaggtggagtacatcttctccgacaagacgggcaccctcacccagaacatcatggttttcaacaagtgctccatcaatggccacagctatggtgatgtgtttgacgtcctgggacacaaagctgaattgggagagaggcctgaacctgttgacttctccttcaatcctctggctgacaagaagttcttattttgggaccccagcctgctggaggctgtcaagatcggggacccccacacgcatgagttcttccgcctcctttccctgtgtcatactgtcatgtcagaagaaaagaacgaaggagagctgtactacaaagctcagtccccagatgagggggccctggtcaccgcagccaggaactttggttttgttttccgctctcgcacccccaaaacaatcaccgtccatgagatgggcacagccatcacctaccagctgctggccatcctggacttcaacaacatccgcaagcggatgtcggtcatagtgcggaatccagaggggaagatccgactctactgcaaaggggctgacactatcctactggacagactgcaccactccactcaagagctgctcaacaccaccatggaccaccttaatgagtacgcaggggaagggctgaggaccctggtgctggcctacaaggatctggatgaagagtactacgaggagtgggctgagcgacgcctccaggccagcctggcccaggacagccgggaggacaggctggctagcatctatgaggaggttgagaacaacatgatgctgctgggtgcaacggccattgaggacaaacttcagcaaggggttccagagaccattgccctcctgacactggccaacatcaagatttgggtgctaaccggagacaagcaagagacggctgtgaacatcggctattcctgcaagatgctgacggatgacatgactgaggttttcatagtcactggccatactgtcctggaggtgcgggaggagctcaggaaagcccgggagaagatgatggactcatcccgctccgtaggcaacggcttcacctatcaggacaagctttcttcttccaagctaacttctgtcctggaggccgttgctggggagtacgccctggtcataaatggtcacagcctggcccacgcactggaggcagacatggagctggagtttctggagacagcgtgtgcctgcaaagctgtcatctgctgccgggtgacccccttgcagaaggcacaggtggtagaactggtcaagaagtacaagaaggctgtgacgcttgccattggagacggagccaatgatgtcagcatgatcaaaacggctcacattggtgtggggatcagtgggcaggaagggatccaggctgtcttggcctccgattactccttctcccagttcaagttcctgcagcgcctcctgctggtgcatgggcgctggtcctacctgcgaatgtgcaagtttctttgctatttcttctacaaaaactttgctttcaccatggtccacttctggtttggcttcttctgtggcttctcagcccagaccgtctatgaccagtatttcatcaccctgtataacatcgtgtacacctccctgccagtcctggctatgggggtctttgatcaggatgtccccgagcagcggagcatggagtaccctaagctgtatgagccgggccagctgaaccttctcttcaacaagcgggagttcttcatctgcatcgcccagggcatctacacctccgtgctcatgttcttcattccctatggggtgtttgctgatgccacccgggatgatggcactcagctggctgactaccagtcctttgcagtcactgtggccacatccttggtcattgtggttagcgtgcagattgggctcgacacaggctactggacggccatcaaccacttcttcatctggggaagccttgctgtttactttgccatcctctttgccatgcacagcaatgggctcttcgacatgtttcccaaccagttccggtttgtggggaatgcccagaacaccttggcccagcccacggtgtggctgaccattgtgctcaccacagtcgtctgcatcatgcccgtggttgccttccgattcctcaggctcaacctgaagccggatctctccgacacggtccgctacacacagctcgtgaggaagaagcagaaggcccagcaccgctgcatgcggcgggttggccgcactggctcccggcgctccggctatgccttctcccatcaggagggcttcggggagctcatcatgtctggcaagaacatgcggctgagctctctcgcgctctccagcttcaccacccgctccagctccagctggattgagagcctgcgcaggaagaagagtgacagtgccagtagccccagtggcggtgccgacaagcccctcaagggctgaaggccgaggatggatgccctgtgccagtgaccagagcacccagggctggccagtcactgagggaacagcgtctcggaactgctggtcctcattccttgcttcccgtccccccggtagactctgtcctgctggtcccaccacacatggctgggacatctgttcccagctgtaggcccttccaccagctggggagctagagggagcaggcccaagggcagagcagaggctgaggcacggggagccagccccactcggggaccagaagtggaaccaaaaacaagaaaaaactgtgagagattgtgtctgcccctgccctgcctgggacccacagggagactataatctccttatttttttactcctactccccagaggggccctagtgcctctgttcctgaattacataagaatgtaccatgccgggaagccagagacctgcaggggcctcggcccctcacatcgtgtatgtctctccttgatttgtgttgtgtccagtttggttttgtctttttttatttggcaagtggaggaggcttttatgtgacttttatgttgtggttggtgtcttaactctcctgggaaaaggaggctggcacacactgggatgccgcagcctggccggctgtggggtggtttgggaggatccatgtcggctctgcctgcagtgaccagtgctctgtggggcagaggagctgaccagggagggaggtacccatgagcagagggtagtgggagagtgtaaaggagggtttggtcctgtctgcttcctcaccttgagagtaaagtgctgccctctgcccccaacacacacacatatcaattcctggattccttagtcctgctggccttgggctggagcctaggaaagtggcccccaaatccttagtgagctaaagctgggtctgaaatttggtcagtggggaggggtagttttcttttcttttttctttttctttttttctttttttttttgagatggagtctcactcttgtcacctaggcaagagtgcaatggcacaatctcagctcactgcaacctccacctcctgggttcaagcgattctcctgcctcagcctcctgagtagctgggattacaggcacacaccaccacgcttggttaatttttgtatttttagtagagatgtttcaccatgttggccaggctagtcttgaattcctgacctcctgacctgcccacctcaacctcccaaagtgctgagattacaggcgtgagccaccacacccagctcagggaggcgtagttttctttaattttaaatttaaacccaagtttattggcagactcccttttgacctccctttgcctccccatctggtgctttcttgcatctacaccccagggccctgtggtggggctgcagggggaagctgtgcacctgagatgaggctggaacgggaattggcctctctgctcccttcttcagtaagcaaggagccccgcccctcaggcccagcctctggcaagaggtggtggaatccttgtgccgggtagtagaggaggataagggcaaaaccaggcccaggccagtgcctggcttggtctggatgggacactgtcagagtttggccacagcctgtcctttacttcatccacacctatgaagctattccctaaataaggcatttcccaagttagtcgctacctaatcagccttgagaagaatcctttcctcttctttgatagtgggtcgggggattcttcaggaatggtttggagctgggagtgggtagggggattttaaatgttccatatgggagccccaaaggaactggatgggctgcagtgaggtgggggcgggtgggcagggaatgggagaggggaagtcttggcagggaaatcccttttggccacacagtttacaaacccagtatcatgtctgtctgtgtgtctctcaaggtgagagtctgatttttataccaaagaggaaatgattttttttcatattttgtttgtctatattatataaatatatatatacagtatatatatatatatattattttttggttctctctcgttttttagggagggaagaaagtaccaagttgcattgagctgtaattaaggaacattataatttatgacacatttctatacttgcaaaaattatatcattttatggatataagagaaaaatgcctttttataaaatttcaatttctgagaaaaagtaatttgtctcttttctgatgtttaaccaagactggt

SEQ ID NO: 308684 - DNA, 5387 bp, Homo sapiens
  misc_feature (13)..(13): n is a, c, g, or t
tttttttttaaanttgggaaacaaacttatcttcataaacgtagatttcttttttgaaacagggtcttgctttgttgcccaggctggtctcaaactcctgacctcaggtgatccatccgcctcaacctcccaaaatgctgggattacaggcttgagccactgcgcccagcccataatagtttttttttttttttaattatttttcatttaacattcagctgttaccaaaatctcatagtgttttaagaaagtttatgaatctgtgttgggccacatgtggcccagagaccatgggttggacaagcttgcactagagcatctgagcttttgagggctcaagggatgaatacatcacagatgcacttggttttgagggcttcctacatgtcagcctcgcctgtgcttctcattcctccccagatttttggattcctggtttgcatgggggtgatcctggccattggcaatgccatctgggagcacgaggtggggatgcgtttccaggtctacctgccgtgggatgaggcagtggacagtgccttcttctctggcttcctctccttctggtcctacatcatcatcctcaacaccgttgtgcccatttcactctatgtcagtgtggaggtcatccgtctgggccacagctacttcatcaactgggataagaagatgttctgcatgaagaagcggacgcctgcagaagcccgcaccaccaccctaaacgaggagctgggccaggtggagtacatcttctccgacaagacgggcaccctcacccagaacatcatggttttcaacaagtgctccatcaatggccacagctatggtgatgtgtttgacgtcctgggacacaaagctgaattgggagagaggcctgaacctgttgacttctccttcaatcctctggctgacaagaagttcttattttgggaccccagcctgctggaggctgtcaagatcggggacccccacacgcatgagttcttccgcctcctttccctgtgtcatactgtcatgtcagaagaaaagaacgaaggagagctgtactacaaagctcagtccccagatgagggggccctggtcaccgcagccaggaactttggttttgttttccgctctcgcacccccaaaacaatcaccgtccatgagatgggcacagccatcacctaccagctgctggccatcctggacttcaacaacatccgcaagcggatgtcggtcatagtgcggaatccagaggggaagatccgactctactgcaaaggggctgacactatcctactggacagactgcaccactccactcaagagctgctcaacaccaccatggaccaccttaatgagtacgcaggggaagggctgaggaccctggtgctggcctacaaggatctggatgaagagtactacgaggagtgggctgagcgacgcctccaggccagcctggcccaggacagccgggaggacaggctggctagcatctatgaggaggttgagaacaacatgatgctgctgggtgcaacggccattgaggacaaacttcagcaaggggttccagagaccattgccctcctgacactggccaacatcaagatttgggtgctaaccggagacaagcaagagacggctgtgaacatcggctattcctgcaagatgctgacggatgacatgactgaggttttcatagtcactggccatactgtcctggaggtgcgggaggagctcaggaaagcccgggagaagatgatggactcatcccgctccgtaggcaacggcttcacctatcaggacaagctttcttcttccaagctaacttctgtcctggaggccgttgctggggagtacgccctggtcataaatggtcacagcctggcccacgcactggaggcagacatggagctggagtttctggagacagcgtgtgcctgcaaagctgtcatctgctgccgggtgacccccttgcagaaggcacaggtggtagaactggtcaagaagtacaagaaggctgtgacgcttgccattggagacggagccaatgatgtcagcatgatcaaaacggctcacattggtgtggggatcagtgggcaggaagggatccaggctgtcttggcctccgattactccttctcccagttcaagttcctgcagcgcctcctgctggtgcatgggcgctggtcctacctgcgaatgtgcaagtttctttgctatttcttctacaaaaactttgctttcaccatggtccacttctggtttggcttcttctgtggcttctcagcccagaccgtctatgaccagtatttcatcaccctgtataacatcgtgtacacctccctgccagtcctggctatgggggtctttgatcaggatgtccccgagcagcggagcatggagtaccctaagctgtatgagccgggccagctgaaccttctcttcaacaagcgggagttcttcatctgcatcgcccagggcatctacacctccgtgctcatgttcttcattccctatggggtgtttgctgatgccacccgggatgatggcactcagctggctgactaccagtcctttgcagtcactgtggccacatccttggtcattgtggttagcgtgcagattgggctcgacacaggctactggacggccatcaaccacttcttcatctggggaagccttgctgtttactttgccatcctctttgccatgcacagcaatgggctcttcgacatgtttcccaaccagttccggtttgtggggaatgcccagaacaccttggcccagcccacggtgtggctgaccattgtgctcaccacagtcgtctgcatcatgcccgtggttgccttccgattcctcaggctcaacctgaagccggatctctccgacacggtccgctacacacagctcgtgaggaagaagcagaaggcccagcaccgctgcatgcggcgggttggccgcactggctcccggcgctccggctatgccttctcccatcaggagggcttcggggagctcatcatgtctggcaagaacatgcggctgagctctctcgcgctctccagcttcaccacccgctccagctccagctggattgagagcctgcgcaggaagaagagtgacagtgccagtagccccagtggcggtgccgacaagcccctcaagggctgaaggccgaggatggatgccctgtgccagtgaccagagcacccagggctggccagtcactgagggaacagcgtctcggaactgctggtcctcattccttgcttcccgtccccccggtagactctgtcctgctggtcccaccacacatggctgggacatctgttcccagctgtaggcccttccaccagctggggagctagagggagcaggcccaagggcagagcagaggctgaggcacggggagccagccccactcggggaccagaagtggaaccaaaaacaagaaaaaactgtgagagattgtgtctgcccctgccctgcctgggacccacagggagactataatctccttatttttttactcctactccccagaggggccctagtgcctctgttcctgaattacataagaatgtaccatgccgggaagccagagacctgcaggggcctcggcccctcacatcgtgtatgtctctccttgatttgtgttgtgtccagtttggttttgtctttttttatttggcaagtggaggaggcttttatgtgacttttatgttgtggttggtgtcttaactctcctgggaaaaggaggctggcacacactgggatgccgcagcctggccggctgtggggtggtttgggaggatccatgtcggctctgcctgcagtgaccagtgctctgtggggcagaggagctgaccagggagggaggtacccatgagcagagggtagtgggagagtgtaaaggagggtttggtcctgtctgcttcctcaccttgagagtaaagtgctgccctctgcccccaacacacacacatatcaattcctggattccttagtcctgctggccttgggctggagcctaggaaagtggcccccaaatccttagtgagctaaagctgggtctgaaatttggtcagtggggaggggtagttttcttttcttttttctttttctttttttctttttttttttgagatggagtctcactcttgtcacctaggcaagagtgcaatggcacaatctcagctcactgcaacctccacctcctgggttcaagcgattctcctgcctcagcctcctgagtagctgggattacaggcacacaccaccacgcttggttaatttttgtatttttagtagagatgtttcaccatgttggccaggctagtcttgaattcctgacctcctgacctgcccacctcaacctcccaaagtgctgagattacaggcgtgagccaccacacccagctcagggaggcgtagttttctttaattttaaatttaaacccaagtttattggcagactcccttttgacctccctttgcctccccatctggtgctttcttgcatctacaccccagggccctgtggtggggctgcagggggaagctgtgcacctgagatgaggctggaacgggaattggcctctctgctcccttcttcagtaagcaaggagccccgcccctcaggcccagcctctggcaagaggtggtggaatccttgtgccgggtagtagaggaggataagggcaaaaccaggcccaggccagtgcctggcttggtctggatgggacactgtcagagtttggccacagcctgtcctttacttcatccacacctatgaagctattccctaaataaggcatttcccaagttagtcgctacctaatcagccttgagaagaatcctttcctcttctttgatagtgggtcgggggattcttcaggaatggtttggagctgggagtgggtagggggattttaaatgttccatatgggagccccaaaggaactggatgggctgcagtgaggtgggggcgggtgggcagggaatgggagaggggaagtcttggcagggaaatcccttttggccacacagtttacaaacccagtatcatgtctgtctgtgtgtctctcaaggtgagagtctgatttttataccaaagaggaaatgattttttttcatattttgtttgtctatattatataaatatatatatacagtatatatatatatatattattttttggttctctctcgttttttagggagggaagaaagtaccaagttgcattgagctgtaattaaggaacattataatttatgacacatttctatacttgcaaaaattatatcattttatggatataagagaaaaatgcctttttataaaatttcaatttctgagaaaaagtaatttgtctcttttctgatgtttaaccaagactggt

SEQ ID NO: 308685 - DNA, 4867 bp, Homo sapiens
gtctctccccaggcggagggcctgcagcgaaggcccatgtgggtggggcacctcctcttcttcccgacccaagcctcacctcttgtcccctgtgcagtgtggaggtcatccgtctgggccacagctacttcatcaactgggataagaagatgttctgcatgaagaagcggacgcctgcagaagcccgcaccaccaccctaaacgaggagctgggccaggtggagtacatcttctccgacaagacgggcaccctcacccagaacatcatggttttcaacaagtgctccatcaatggccacagctatggtgatgtgtttgacgtcctgggacacaaagctgaattgggagagaggcctgaacctgttgacttctccttcaatcctctggctgacaagaagttcttattttgggaccccagcctgctggaggctgtcaagatcggggacccccacacgcatgagttcttccgcctcctttccctgtgtcatactgtcatgtcagaagaaaagaacgaaggagagctgtactacaaagctcagtccccagatgagggggccctggtcaccgcagccaggaactttggttttgttttccgctctcgcacccccaaaacaatcaccgtccatgagatgggcacagccatcacctaccagctgctggccatcctggacttcaacaacatccgcaagcggatgtcggtcatagtgcggaatccagaggggaagatccgactctactgcaaaggggctgacactatcctactggacagactgcaccactccactcaagagctgctcaacaccaccatggaccaccttaatgagtacgcaggggaagggctgaggaccctggtgctggcctacaaggatctggatgaagagtactacgaggagtgggctgagcgacgcctccaggccagcctggcccaggacagccgggaggacaggctggctagcatctatgaggaggttgagaacaacatgatgctgctgggtgcaacggccattgaggacaaacttcagcaaggggttccagagaccattgccctcctgacactggccaacatcaagatttgggtgctaaccggagacaagcaagagacggctgtgaacatcggctattcctgcaagatgctgacggatgacatgactgaggttttcatagtcactggccatactgtcctggaggtgcgggaggagctcaggaaagcccgggagaagatgatggactcatcccgctccgtaggcaacggcttcacctatcaggacaagctttcttcttccaagctaacttctgtcctggaggccgttgctggggagtacgccctggtcataaatggtcacagcctggcccacgcactggaggcagacatggagctggagtttctggagacagcgtgtgcctgcaaagctgtcatctgctgccgggtgacccccttgcagaaggcacaggtggtagaactggtcaagaagtacaagaaggctgtgacgcttgccattggagacggagccaatgatgtcagcatgatcaaaacggctcacattggtgtggggatcagtgggcaggaagggatccaggctgtcttggcctccgattactccttctcccagttcaagttcctgcagcgcctcctgctggtgcatgggcgctggtcctacctgcgaatgtgcaagtttctttgctatttcttctacaaaaactttgctttcaccatggtccacttctggtttggcttcttctgtggcttctcagcccagaccgtctatgaccagtatttcatcaccctgtataacatcgtgtacacctccctgccagtcctggctatgggggtctttgatcaggatgtccccgagcagcggagcatggagtaccctaagctgtatgagccgggccagctgaaccttctcttcaacaagcgggagttcttcatctgcatcgcccagggcatctacacctccgtgctcatgttcttcattccctatggggtgtttgctgatgccacccgggatgatggcactcagctggctgactaccagtcctttgcagtcactgtggccacatccttggtcattgtggttagcgtgcagattgggctcgacacaggctactggacggccatcaaccacttcttcatctggggaagccttgctgtttactttgccatcctctttgccatgcacagcaatgggctcttcgacatgtttcccaaccagttccggtttgtggggaatgcccagaacaccttggcccagcccacggtgtggctgaccattgtgctcaccacagtcgtctgcatcatgcccgtggttgccttccgattcctcaggctcaacctgaagccggatctctccgacacggtccgctacacacagctcgtgaggaagaagcagaaggcccagcaccgctgcatgcggcgggttggccgcactggctcccggcgctccggctatgccttctcccatcaggagggcttcggggagctcatcatgtctggcaagaacatgcggctgagctctctcgcgctctccagcttcaccacccgctccagctccagctggattgagagcctgcgcaggaagaagagtgacagtgccagtagccccagtggcggtgccgacaagcccctcaagggctgaaggccgaggatggatgccctgtgccagtgaccagagcacccagggctggccagtcactgagggaacagcgtctcggaactgctggtcctcattccttgcttcccgtccccccggtagactctgtcctgctggtcccaccacacatggctgggacatctgttcccagctgtaggcccttccaccagctggggagctagagggagcaggcccaagggcagagcagaggctgaggcacggggagccagccccactcggggaccagaagtggaaccaaaaacaagaaaaaactgtgagagattgtgtctgcccctgccctgcctgggacccacagggagactataatctccttatttttttactcctactccccagaggggccctagtgcctctgttcctgaattacataagaatgtaccatgccgggaagccagagacctgcaggggcctcggcccctcacatcgtgtatgtctctccttgatttgtgttgtgtccagtttggttttgtctttttttatttggcaagtggaggaggcttttatgtgacttttatgttgtggttggtgtcttaactctcctgggaaaaggaggctggcacacactgggatgccgcagcctggccggctgtggggtggtttgggaggatccatgtcggctctgcctgcagtgaccagtgctctgtggggcagaggagctgaccagggagggaggtacccatgagcagagggtagtgggagagtgtaaaggagggtttggtcctgtctgcttcctcaccttgagagtaaagtgctgccctctgcccccaacacacacacatatcaattcctggattccttagtcctgctggccttgggctggagcctaggaaagtggcccccaaatccttagtgagctaaagctgggtctgaaatttggtcagtggggaggggtagttttcttttcttttttctttttctttttttctttttttttttgagatggagtctcactcttgtcacctaggcaagagtgcaatggcacaatctcagctcactgcaacctccacctcctgggttcaagcgattctcctgcctcagcctcctgagtagctgggattacaggcacacaccaccacgcttggttaatttttgtatttttagtagagatgtttcaccatgttggccaggctagtcttgaattcctgacctcctgacctgcccacctcaacctcccaaagtgctgagattacaggcgtgagccaccacacccagctcagggaggcgtagttttctttaattttaaatttaaacccaagtttattggcagactcccttttgacctccctttgcctccccatctggtgctttcttgcatctacaccccagggccctgtggtggggctgcagggggaagctgtgcacctgagatgaggctggaacgggaattggcctctctgctcccttcttcagtaagcaaggagccccgcccctcaggcccagcctctggcaagaggtggtggaatccttgtgccgggtagtagaggaggataagggcaaaaccaggcccaggccagtgcctggcttggtctggatgggacactgtcagagtttggccacagcctgtcctttacttcatccacacctatgaagctattccctaaataaggcatttcccaagttagtcgctacctaatcagccttgagaagaatcctttcctcttctttgatagtgggtcgggggattcttcaggaatggtttggagctgggagtgggtagggggattttaaatgttccatatgggagccccaaaggaactggatgggctgcagtgaggtgggggcgggtgggcagggaatgggagaggggaagtcttggcagggaaatcccttttggccacacagtttacaaacccagtatcatgtctgtctgtgtgtctctcaaggtgagagtctgatttttataccaaagaggaaatgattttttttcatattttgtttgtctatattatataaatatatatatacagtatatatatatatatattattttttggttctctctcgttttttagggagggaagaaagtaccaagttgcattgagctgtaattaaggaacattataatttatgacacatttctatacttgcaaaaattatatcattttatggatataagagaaaaatgcctttttataaaatttcaatttctgagaaaaagtaatttgtctcttttctgatgtttaaccaagactggt

SEQ ID NO: 308686 - DNA, 947 bp, Homo sapiens
  misc_feature (13)..(13): n is a, c, g, or t
tttttttttaaanttgggaaacaaacttatcttcataaacgtagatttcttttttgaaacagggtcttgctttgttgcccaggctggtctcaaactcctgacctcaggtgatccatccgcctcaacctcccaaaatgctgggattacaggcttgagccactgcgcccagcccataatagtttttttttttttttaattatttttcatttaacattcagctgttaccaaaatctcatagtgttttaagaaagtttatgaatctgtgttgggccacatgtggcccagagaccatgggttggacaagcttgcactagagcatctgagcttttgagggctcaagggatgaatacatcacagatgcacttggttttgagggcttcctacatgtcagcctcgcctgtgcttctcattcctccccagatttttggattcctggtttgcatgggggtgatcctggccattggcaatgccatctgggagcacgaggtggggatgcgtttccaggtctacctgccgtgggatgaggcagtggacagtgccttcttctctggcttcctctccttctggtcctacatcatcatcctcaacaccgttgtgcccatttcactctatgtcaggtatgtgccttctctgacctggggtctctccagggagtcaggcggtcccatagaacttttcttttctatgaagatgaagtccttgagaagtaacgagaagtcctcttcttcctgtactgtaaacatttgatgttatctgtttatctttgtgggcagagcaaactttttaccacagtttcctggtacttgggactgtattagagaaaaaaaaatattgatttattcagcacctatttattacatgcctactgtgtacaaagaagtgtgctaggtgccatcacaaataaaagatgaattaggaatggatctccttccttctaggagcttacg

SEQ ID NO: 308687 - DNA, 1138 bp, Homo sapiens
gtgcctcagcctcccgattagctagaattacaggctcccaccaccacacccggctaatttttgtatttttagtagagacagggtttcaccatgttggccaggctggtctcaaaactcctgacctcagctgatccacccgccttagcctcccaaagtgctgggattacaggcatgagctgccgcgcccggcctgcttcattattttcctgaagagttgcatcagctcacactcctcccagcagcatatggatgggcccttgcccttgcatcctcttcgctcagctcattttctctttgttttattgtcttgtggttaggctgtagactggaccttaagcagtggaattcttgtctcctgttcaggtgaagtgatctgtgaacctcccaacaacaaactggacaaattcagcggaaccctctactggaaggaaaataagttccctctgagcaaccagaacatgctgctgcggggctgtgtgctgcgaaacaccgagtggtgcttcgggctggtcatctttgcaggtcccgacactaagctgatgcaaaacagcggcagaacaaagttcaaaagaacgagtatcgatcgcctaatgaataccctggtgctctggatttttggattcctggtttgcatgggggtgatcctggccattggcaatgccatctgggagcacgaggtggggatgcgtttccaggtctacctgccgtgggatgaggcagtggacagtgccttcttctctggcttcctctccttctggtcctacatcatcatcctcaacaccgttgtgcccatttcactctatgtcaggtatgtgccttctctgacctggggtctctccagggagtcaggcggtcccatagaacttttcttttctatgaagatgaagtccttgagaagtaacgagaagtcctcttcttcctgtactgtaaacatttgatgttatctgtttatctttgtgggcagagcaaactttttaccacagtttcctggtacttgggactgtattagagaaaaaaaaatattgatttattcagcacctatttattacatgcctactgtgtacaaagaagtgtgctaggtgccatcacaaataaaagatgaattaggaatggatctccttccttctaggagcttacg

SEQ ID NO: 308688 - DNA, 3255 bp, Homo sapiens
gctaaatgacgttgccgtttccgggtcacccaggcagcttgtggcggcgaagccatcggtgttcgctgatgtccagtctatggagtcagttggtaccggtggcggcgcggaggcagaaggcggtgtccgagtaggggcctctgccccaccaggatgttaccgggcttggccgccgccgcggcccacagatgtagctggtcctccctgtgccggctccgtctgcgatgcagggcggcggcctgtaatcccagcgaccgccaggagtggcagaatttagtgacatttggaagcttttcaaacgtggttccctgtagtcatccatatattggtaccctgagtcaagtaaagttgtactccacaaatgttcagaaagaaggacagggatcacaaacactcagagtggaaaaagtaccatcatttgaaacagcagaaggtataggcgcagaactcaaagctccacttaagcaagaacctctccaagtaagagttaaagcagtccttaagaaaagggagtatggatcaaagtacactcagaataatttcatcactggagtcagagcgataaatgagttctgcctcaaatccagtgatctagaacaacttcgaaaaatcagacgacgaagtccccatgaagatactgagtcttttactgtatacttgagatcagatgtggaagcaaaatctttggaagtttggggaagccctgaagctcttgccagagagaaaaaattgcgtaaggaagcagaaatagaatacagagaaaggctatttagaaaccaaaaaatattaagagaatacagagatttcttgggaaataccaagccacgctccagaacagcatcagtgttttttaagggaccaggaaaagtggtgatggttgcaatttgcatcaatggattaaactgcttctttaaatttcttgcctggatttataccggttcagcaagtatgttctcagaagctatacactcattatctgatacttgtaatcagggtttactagcattgggcatcagtaagtctgttcaaacaccagatccttctcatccgtacggattttcaaatatgcgctatatttcttcgctaattagtggtgttggtattttcatgatgggtgcaggactatcttggtaccatggagtcatgggattgcttcatcctcaaccaatagaatcccttctatgggcatattgtattttagcaggatcattagtatctgaaggagcaacacttcttgttgctgtaaatgaacttcgtaggaatgctcgggctaaaggaatgtcattttacaagtatgtaatggaaagtcgtgatcctagtacaaatgtgatattattggaggatactgctgcagtcttgggagttataatagcagccacttgcatgggccttacttctataacaggcaatccactgtatgacagcctaggttctttgggtgtgggcaccttattaggcatggtctcagcattcctcatctacactaacacagaagcactcttagggcggtccatccagccagaacaagtacaacggctcactgaactcctggagaatgacccatcagtaagggcaattcatgatgttaaagccacagatctgggattaggtaaagtaagatttaaggcagaagtagattttgatgggcgagttgttacaagatcatatttggaaaaacaagattttgaccaaatgttacaagaaattcaagaagtgaaaactcctgaagaactagagacctttatgcttaaacatggagaaaatattattgatactttaggagctgaagtagatagacttgagaaggaactgaaaaaacgaaatcctgaagttcgacatgtagatttggagatactgtgagtttgatggaatgaatcacctgggtggggaccttggaaacaagtttgtccgtccactctacaaagtttcctcctctcctacactgaaagactcagtgccatgcagaagccttttttttaagatgaaggaaatattttatgtaaagagcaactcagcaggacacagaactaaaactactacttacatctaacagacacactacaagttgaatcaatttgaaaatcatgtttttatgcttccatagggaacattttggttatttaaattgttcataatgtcccatatttcacctgttcagtgtatactgtactttgcaatcatctttccttttttcacattggtaaaaataagtggcatccataggatcatgatttttaatttgttgcctctgaagatttcactccatcaagatctgccaatcttcaatattctggctaaatcttggtatgtggtttttaaacagtcactccgtttcaaagtctgtctttccttatagaatgtggaaattatttctccataccttgtgattttgacctgagtgctaagagaatcactctccttacctagttatctacaaatgttcattccagaaatgtttagttactgaattgaatgaagacatctcagtacactcttttaggtcatagtagttgccattttgtaaaatttcttttttcttctttgcttttttccccttatttggtttaatttttctaatgttaggagatatagtcctagatatttccatgggccagtgtgatgacttttttttaaatgaggttcagtaccataatgtttatttactggaagataatgcatttataagcattttaaaattctgtaaagtgggttagaaatatttataattttacaggcaggacagcatttgacttttatttaaaaggcggcactacttatgtaaatctgagctgtgggatatttcttgctttaagagagagacagaatctctcactgaaactcatggtcatgattttgtataatatagttcatactgtgtctgtgagtttcttcaattacaaatgggcatttagtatagttatattgactataacatgtaagtaaatagctttctactgaccctaagttatcaaggtggaaaaaaaacatgcaattcagtaattgaaaatgtggtgaaaagctgcagctgtcatcatcaaaacaactcataacatactttaaaatgttcaggtagcagtgagcattgttcatatgagaatggcggctgggtgatctctttgctgaattaatgagttcttaacatgtggacccaactgcctgtgtgagatctgtgtcttaaaacttactggaatggaaatctatgaattattgcaaattgtaatgctggaaacaaaaaataaatccttggttaaaggg

SEQ ID NO: 308689 - DNA, 848 bp, Homo sapiens
gctaaatgacgttgccgtttccgggtcacccaggcagcttgtggcggcgaagccatcggtgttcgctgatgtccagtctatggagtcagttggtaccggtggcggcgcggaggcagaaggcggtgtccgagtaggggcctctgccccaccaggatgttaccgggcttggccgccgccgcggcccacagatgtagctggtcctccctgtgccggctccgtctgcgatgcagggcggcggcctgtaatcccagcgaccgccaggagtggcagaatttagtgacatttggaagcttttcaaacgtggttccctgtagtcatccatatattggtaccctgagtcaagtaaagttgtactccacaaatgttcagaaagaaggacagggatcacaaacactcagagtggaaaaagtaccatcatttgaaacagcagaaggtataggcgcagaactcaaagctccacttaagcaagaacctctccaagtaagagttaaagcagtccttaagaaaagggagtatggatcaaagtacactcagaataatttcatcactggagtcagagcgataaatgagttctgcctcaaatccaggtaatttttttaaaaaatgtagccgtgtgtcatatctaaataatctaaataactattcctttcttagagtgtgttacctgctaccatccatatatggaaaatttgctactggctccttaaaatgaagagatattgttattcagtcaaaaatgttaaaaattgttagcaaactaaactgaatcctgcccagcattagcaattctagtctttcttagtttcttaaacccacaatggtaaattcttcaaaacctttccatcaca

SEQ ID NO: 308690 - DNA, 799 bp, Homo sapiens
gctaaatgacgttgccgtttccgggtcacccaggcagcttgtggcggcgaagccatcggtgttcgctgatgtccagtctatggagtcagttggtaccggtggcggcgcggaggcagaaggcggtgtccgagtaggggcctctgccccaccaggatgttaccgggcttggccgccgccgcggcccacagatgtagctggtcctccctgtgccggctccgtctgcgatgcagggcggcggcctgtaatcccagcgaccgccagggtgagtgtcccgcgctggccgctggctccgtagaagccgaactggagggccaggctgggctcggcgcctcgcctggggcaattcgcccacttgcctttcgccaacctcagaaccttcctttctggcctccgcctttccagttcagcctgcgcagcccgcgggggtcctgacaggtctctgactctgatgccttctgcagccctagcatggcccccgcgggaacttgtgggcacctcgcgggccggattgcacctctgaagcctaccgctttgtaccaaacaaaatgttacgtgcgcatcgcggtgtcccgcggttactcacctccgcggttggaaattgcggactccgcaaagttccagggtctttggagctttccagcgcaccttcatttagcacttggttgagattttcttggccttctttttcttactctcccaacttattttcttaaattttctaaaaggaaggaggggtgctactcactacggatcttttggaagaagtacaaagtatccgacaatcattgaatgaacccag

SEQ ID NO: 308691 - DNA, 692 bp, Homo sapiens
  misc_feature (662)..(662): n is a, c, g, or t
  misc_feature (684)..(684): n is a, c, g, or t
  misc_feature (691)..(691): n is a, c, g, or t
gctaaatgacgttgccgtttccgggtcacccaggcagcttgtggcggcgaagccatcggtgttcgctgatgtccagtctatggagtcagttggtaccggtggcggcgcggaggcagaaggcggtgtccgagtaggggcctctgccccaccaggatgttaccgggcttggccgccgccgcggcccacagatgtagctggtcctccctgtgccggctccgtctgcgatgcagggcggcggcctgtaatcccagcgaccgccagggtgagtgtcccgcgctggccgctggctccgtagaagccgaactggagggccaggctgggctcggcgcctcgcctggggcaattcgcccacttgcctttcgccaacctcagaaccttcctttctggcctccgcctttccagttcagcctgcgcagcccgcgggggtcctgacaggtctctgactctgatgccttctgcagccctagcatggcccccgcgggaacttgtgggcacctcgcgggccggattgcacctctgaagcctaccgctttgtaccaaacaaaatgttacgtgcgcatcgcggtgtcccgcggttactcacctccgcggttggaaattgcggactccgcaaagttccagggtctttggagctttccagcgcaaacccccctttttttttnccccaaaatttttttttttttnaaaaaang

SEQ ID NO: 308692 - DNA, 3320 bp, Homo sapiens
gctaaatgacgttgccgtttccgggtcacccaggcagcttgtggcggcgaagccatcggtgttcgctgatgtccagtctatggagtcagttggtaccggtggcggcgcggaggcagaaggcggtgtccgagtaggggcctctgccccaccaggatgttaccgggcttggccgccgccgcggcccacagatgtagctggtcctccctgtgccggctccgtctgcgatgcagggcggcggcctgtaatcccagcgaccgccaggagtggcagaatttagtgacatttggaagcttttcaaacgtggttccctgtagtcatccatatattggtaccctgagtcaagtaaagttgtactccacaaatgttcagaaagaaggacagggatcacaaacactcagagtggaaaaagtaccatcatttgaaacagcagaaggtataggcgcagaactcaaagctccacttaagcaagaacctctccaagtaagagttaaagcagtccttaagaaaagggagtatggatcaaagtacactcagaataatttcatcactggagtcagagcgataaatgagttctgcctcaaatccagtgatctagaacaacttcgaaaaatcagacgacgaagtccccatgaagatactgagtcttttactgtatacttgagatcagatgtggaagcaaaatctttggaagtttggggaagccctgaagctcttgccagagagaaaaaattgcgtaaggaagcagaaatagaatacagagaaaggctatttagaaaccaaaaaatattaagagaatacagagatttcttgggaaataccaagccacgctccagaacagcatcagtgttttttaagggaccaggaaaagtggtgatggttgcaatttgcatcaatggattaaactgcttctttaaatttcttgcctggatttataccggttcagcaagtatgttctcagaagctatacactcattatctgatacttgtaatcagggtttactagcattgggcatcagtaagtctgttcaaacaccagatccttctcatccgtacggattttcaaatatgcgctatatttcttcgctaattagtggtgttggtattttcatgatgggtgcaggactatcttggtaccatggagtcatgggattgcttcatcctcaaccaatagaatcccttctatgggcatattgtattttagcaggatcattagtatctgaaggagcaacacttcttgttgctgtaaatgaacttcgtaggaatgctcgggctaaaggaatgtcattttacaagtatgtaatggaaagtcgtgatcctagtacaaatgtgatattattggaggatactgctgcagtcttgggagttataatagcagccacttgcatgggccttacttctataacaggcaatccactgtatgacagcctaggttctttgggtgtgggcaccttattaggcatggtctcagcattcctcatctacactaacacagaagcactcttagggcggtccatccagccagaacaagtacaacggctcactgaactcctggagaatgacccatcagtaagggcaattcatgatgttaaagccacagatctgggattaggtaaagtaagatttaaggcagaagtagattttgatgggcgagttgttacaagatcatatttggaaaaacaagattttgaccaaatgttacaagaaattcaagaagtgaaaactcctgaagaactagagacctttatgcttaaacatggagaaaatattattgatactttaggagctgaagtagatagacttgagaaggaactgaaaaaacgaaatcctgaagttcgacatgtagatttggagatactgtgagtttgatggaatgaatcacctgggtggggaccttggaaacaagtttgtccgtccactctacaaagtttcctcctctcctacactgaaagactcagtgccatgcagaagccttttttttaagatgaaggaaatattttatgtaaagagcaactcagcaggacacagaactaaaactactacttacatctaacagacacactacaagttgaatcaatttgaaaatcatgtttttatgcttccatagggaacattttggttatttaaattgttcataatgtcccatatttcacctgttcagtgtatactgtactttgcaatcatctttccttttttcacattggtaaaaataagtggcatccataggatcatgatttttaatttgttgcctctgaagatttcactccatcaagatctgccaatcttcaatattctggctaaatcttggtatgtggtttttaaacagtcactccgtttcaaagtctgtctttccttatagaatgtggaaattatttctccataccttgtgattttgacctgagtgctaagagaatcactctccttacctagttatctacaaatgttcattccagaaatgtttagttactgaattgaatgaagacatctcagtacactcttttaggtcatagtagttgccattttgtaaaatttcttttttcttctttgcttttttccccttatttggtttaatttttctaatgttaggagatatagtcctagatatttccatgggccagtgtgatgacttttttttaaatgaggttcagtaccataatgtttatttactggaagataatgcatttataagcattttaaaattctgtaaagtgggttagaaatatttataattttacaggcaggacagcatttgacttttatttaaaaggcggcactacttatgtaaatctgagctgtgggatatttcttgctttaagagagagacagaatctctcactgaaactcatggtcatgattttgtataatatagttcatactgtgtctgtgagtttcttcaattacaaatgggcatttagtatagttatattgactataacatgtaagtaaatagctttctactgaccctaagttatcaaggtggaaaaaaaacatgcaattcagtaattgaaaatgtggtgaaaagctgcagctgtcatcatcaaaacaactcataacatactttaaaatgttcaggtagcagtgagcattgttcatatgagaatggcggctgggtgatctctttgctgaattaatgagttcttaacatgtggacccaactgcctgtgtgagatctgtgtcttaaaacttactggaatggaaatctatgaattattgcaaattgtaatgctggaaacaaaaaataaatccttggttaaagggaaaaaaaaattatttaaaaaattattaaaatataatattattttaaaaataaaaaaaaacctcaa

SEQ ID NO: 308693 - DNA, 3279 bp, Homo sapiens
gctaaatgacgttgccgtttccgggtcacccaggcagcttgtggcggcgaagccatcggtgttcgctgatgtccagtctatggagtcagttggtaccggtggcggcgcggaggcagaaggcggtgtccgagtaggggcctctgccccaccaggatgttaccgggcttggccgccgccgcggcccacagatgtagctggtcctccctgtgccggctccgtctgcgatgcagggcggcggcctgtaatcccagcgaccgccaggagtggcagaatttagtgacatttggaagcttttcaaacgtggttccctgtagtcatccatatattggtaccctgagtcaagtaaagttgtactccacaaatgttcagaaagaaggacagggatcacaaacactcagagtggaaaaagtaccatcatttgaaacagcagaaggtataggcgcagaactcaaagctccacttaagcaagaacctctccaagtaagagttaaagcagtccttaagaaaagggagtatggatcaaagtacactcagaataatttcatcactggagtcagagcgataaatgagttctgcctcaaatccagtgatctagaacaacttcgaaaaatcagacgacgaagtccccatgaagatactgagtcttttactgtatacttgagatcagatgtggaagcaaaatctttggaagtttggggaagccctgaagctcttgccagagagaaaaaattgcgtaaggaagcagaaatagaatacagagaaaggctatttagaaaccaaaaaatattaagagaatacagagatttcttgggaaataccaagccacgctccagaacagcatcagtgttttttaagggaccaggaaaagtggtgatggttgcaatttgcatcaatggattaaactgcttctttaaatttcttgcctggatttataccggttcagcaagtatgttctcagaagctatacactcattatctgatacttgtaatcagggtttactagcattgggcatcagtaagtctgttcaaacaccagatccttctcatccgtacggattttcaaatatgcgctatatttcttcgctaattagtggtgttggtattttcatgatgggtgcaggactatcttggtaccatggagtcatgggattgcttcatcctcaaccaatagaatcccttctatgggcatattgtattttagcaggatcattagtatctgaaggagcaacacttcttgttgctgtaaatgaacttcgtaggaatgctcgggctaaaggaatgtcattttacaagtatgtaatggaaagtcgtgatcctagtacaaatgtgatattattggaggatactgctgcagtcttgggagttataatagcagccacttgcatgggccttacttctataacaggcaatccactgtatgacagcctaggttctttgggtgtgggcaccttattaggcatggtctcagcattcctcatctacactaacacagaagcactcttagggcggtccatccagccagaacaagtacaacggctcactgaactcctggagaatgacccatcagtaagggcaattcatgatgttaaagccacagatctgggattaggtaaagtaagatttaaggcagaagtagattttgatgggcgagttgttacaagatcatatttggaaaaacaagattttgaccaaatgttacaagaaattcaagaagtgaaaactcctgaagaactagagacctttatgcttaaacatggagaaaatattattgatactttaggagctgaagtagatagacttgagaaggaactgaaaaaacgaaatcctgaagttcgacatgtagatttggagatactgtgagtttgatggaatgaatcacctgggtggggaccttggaaacaagtttgtccgtccactctacaaagtttcctcctctcctacactgaaagactcagtgccatgcagaagccttttttttaagatgaaggaaatattttatgtaaagagcaactcagcaggacacagaactaaaactactacttacatctaacagacacactacaagttgaatcaatttgaaaatcatgtttttatgcttccatagggaacattttggttatttaaattgttcataatgtcccatatttcacctgttcagtgtatactgtactttgcaatcatctttccttttttcacattggtaaaaataagtggcatccataggatcatgatttttaatttgttgcctctgaagatttcactccatcaagatctgccaatcttcaatattctggctaaatcttggtatgtggtttttaaacagtcactccgtttcaaagtctgtctttccttatagaatgtggaaattatttctccataccttgtgattttgacctgagtgctaagagaatcactctccttacctagttatctacaaatgttcattccagaaatgtttagttactgaattgaatgaagacatctcagtacactcttttaggtcatagtagttgccattttgtaaaatttcttttttcttctttgcttttttccccttatttggtttaatttttctaatgttaggagatatagtcctagatatttccatgggccagtgtgatgacttttttttaaatgaggttcagtaccataatgtttatttactggaagataatgcatttataagcattttaaaattctgtaaagtgggttagaaatatttataattttacaggcaggacagcatttgacttttatttaaaaggcggcactacttatgtaaatctgagctgtgggatatttcttgctttaagagagagacagaatctctcactgaaactcatggtcatgattttgtataatatagttcatactgtgtctgtgagtttcttcaattacaaatgggcatttagtatagttatattgactataacatgtaagtaaatagctttctactgaccctaagttatcaaggtggaaaaaaaacatgcaattcagtaattgaaaatgtggtgaaaagctgcagctgtcatcatcaaaacaactcataacatactttaaaatgttcaggtagcagtgagcattgttcatatgagaatggcggctgggtgatctctttgctgaattaatgagttcttaacatgtggacccaactgcctgtgtgagatctgtgtcttaaaacttactggaatggaaatctatgaattattgcaaattgtaatgctggaaacaaaaaataaatccttggttaaagggtttgtaatggtgaaaaaaaaaaca

SEQ ID NO: 308694 - DNA, 2912 bp, Homo sapiens
gctaaatgacgttgccgtttccgggtcacccaggcagcttgtggcggcgaagccatcggtgttcgctgatgtccagtctatggagtcagttggtaccggtggcggcgcggaggcagaaggcggtgtccgagtaggggcctctgccccaccaggatgttaccgggcttggccgccgccgcggcccacagatgtagctggtcctccctgtgccggctccgtctgcgatgcagggcggcggcctgtaatcccagcgaccgccaggagtggcagaatttagtgacatttggaagcttttcaaacgtggttccctgtagtcatccatatattggtaccctgagtcaagtaaagttgtactccacaaatgttcagaaagaaggacagggatcacaaacactcagagtggaaaaagtaccatcatttgaaacagcagaaggtataggcgcagaactcaaagctccacttaagcaagaacctctccaagtaagagttaaagcagtccttaagaaaagggagtatggatcaaagtacactcagaataatttcatcactggagtcagagcgataaatgagttctgcctcaaatccagtgatctagaacaacttcgaaaaatcagacgacgaagtccccatgaagatactgagtcttttactgtatacttgagatcagatgtggaagcaaaatctttggaagtttggggaagccctgaagctcttgccagagagaaaaaattgcgtaaggaagcagaaatagaatacagagaaaggctatttagaaaccaaaaaatattaagagaatacagagatttcttgggaaataccaagccacgctccagaacagcatcagtgttttttaagggaccaggaaaagtggtgatggttgcaatttgcatcaatggattaaactgcttctttaaatttcttgcctggatttataccggttcagcaagtatgttctcagaagctatacactcattatctgatacttgtaatcagggtttactagcattgggcatcagtaagtctgttcaaacaccagatccttctcatccgtacggattttcaaatatgcgctatatttcttcgctaattagtggtgttggtattttcatgatgggtgcaggactatcttggtaccatggagtcatgggattgcttcatcctcaaccaatagaatcccttctatgggcatattgtattttagcaggatcattagtatctgaaggagcaacacttcttgttgctgtaaatgaacttcgtaggaatgctcgggctaaaggaatgtcattttacaagtatgtaatggaaagtcgtgatcctagtacaaatgtgatattattggaggatactgctgcagtcttgggagttataatagcagccacttgcatgggccttacttctataacaggcaatccactgtatgacagcctaggttctttgggtgtgggcaccttattaggcatggtctcagcattcctcatctacactaacacagaagcactcttagggcggtccatccagccagaacaagtacaacggctcactgaactcctggagaatgacccatcagtaagggcaattcatgatgttaaagccacagatctgggattaggtaaagtaagatttaaggcagaagtagattttgatgggcgagttgttacaagatcatatttggaaaaacaagattttgaccaaatgttacaagaaattcaagaagtgaaaactcctgaagaactagagacctttatgcttaaacatggagaaaatattattgatactttaggagctgaagtagatagacttgagaaggaactgaaaaaacgaaatcctgaagttcgacatgtagatttggagatactgtgagtttgatggaatgaatcacctgggtggggaccttggaaacaagtttgtccgtccactctacaaagtttcctcctctcctacactgaaagactcagtgccatgcagaagccttttttttaagatgaaggaaatattttatgtaaagagcaactcagcaggacacagaactaaaactactacttacatgtttagttactgaattgaatgaagacatctcagtacactcttttaggtcatagtagttgccattttgtaaaatttcttttttcttctttgcttttttccccttatttggtttaatttttctaatgttaggagatatagtcctagatatttccatgggccagtgtgatgacttttttttaaatgaggttcagtaccataatgtttatttactggaagataatgcatttataagcattttaaaattctgtaaagtgggttagaaatatttataattttacaggcaggacagcatttgacttttatttaaaaggcggcactacttatgtaaatctgagctgtgggatatttcttgctttaagagagagacagaatctctcactgaaactcatggtcatgattttgtataatatagttcatactgtgtctgtgagtttcttcaattacaaatgggcatttagtatagttatattgactataacatgtaagtaaatagctttctactgaccctaagttatcaaggtggaaaaaaaacatgcaattcagtaattgaaaatgtggtgaaaagctgcagctgtcatcatcaaaacaactcataacatactttaaaatgttcaggtagcagtgagcattgttcatatgagaatggcggctgggtgatctctttgctgaattaatgagttcttaacatgtggacccaactgcctgtgtgagatctgtgtcttaaaacttactggaatggaaatctatgaattattgcaaattgtaatgctggaaacaaaaaataaatccttggttaaagggaaaaaaaaattatttaaaaaattattaaaatataatattattttaaaaataaaaaaaaacctcaa

SEQ ID NO: 308695 - DNA, 2189 bp, Homo sapiens
ctccagaggatcccctgtgcggaccatcctcaaccaatttaatcccttctatgggcatattgtattttagcaggatcattagtatctgaaggagcaacacttcttgttgctgtaaatgaacttcgtaggaatgctcgggctaaaggaatgtcattttacaagtatgtaatggaaagtcgtgatcctagtacaaatgtgatattattggaggatactgctgcagtcttgggagttataatagcagccacttgcatgggccttacttctataacaggcaatccactgtatgacagcctaggttctttgggtgtgggcaccttattaggcatggtctcagcattcctcatctacactaacacagaagcactcttagggcggtccatccagccagaacaagtacaacggctcactgaactcctggagaatgacccatcagtaagggcaattcatgatgttaaagccacagatctgggattaggtaaagtaagatttaaggcagaagtagattttgatgggcgagttgttacaagatcatatttggaaaaacaagattttgaccaaatgttacaagaaattcaagaagtgaaaactcctgaagaactagagacctttatgcttaaacatggagaaaatattattgatactttaggagctgaagtagatagacttgagaaggaactgaaaaaacgaaatcctgaagttcgacatgtagatttggagatactgtgagtttgatggaatgaatcacctgggtggggaccttggaaacaagtttgtccgtccactctacaaagtttcctcctctcctacactgaaagactcagtgccatgcagaagccttttttttaagatgaaggaaatattttatgtaaagagcaactcagcaggacacagaactaaaactactacttacatctaacagacacactacaagttgaatcaatttgaaaatcatgtttttatgcttccatagggaacattttggttatttaaattgttcataatgtcccatatttcacctgttcagtgtatactgtactttgcaatcatctttccttttttcacattggtaaaaataagtggcatccataggatcatgatttttaatttgttgcctctgaagatttcactccatcaagatctgccaatcttcaatattctggctaaatcttggtatgtggtttttaaacagtcactccgtttcaaagtctgtctttccttatagaatgtggaaattatttctccataccttgtgattttgacctgagtgctaagagaatcactctccttacctagttatctacaaatgttcattccagaaatgtttagttactgaattgaatgaagacatctcagtacactcttttaggtcatagtagttgccattttgtaaaatttcttttttcttctttgcttttttccccttatttggtttaatttttctaatgttaggagatatagtcctagatatttccatgggccagtgtgatgacttttttttaaatgaggttcagtaccataatgtttatttactggaagataatgcatttataagcattttaaaattctgtaaagtgggttagaaatatttataattttacaggcaggacagcatttgacttttatttaaaaggcggcactacttatgtaaatctgagctgtgggatatttcttgctttaagagagagacagaatctctcactgaaactcatggtcatgattttgtataatatagttcatactgtgtctgtgagtttcttcaattacaaatgggcatttagtatagttatattgactataacatgtaagtaaatagctttctactgaccctaagttatcaaggtggaaaaaaaacatgcaattcagtaattgaaaatgtggtgaaaagctgcagctgtcatcatcaaaacaactcataacatactttaaaatgttcaggtagcagtgagcattgttcatatgagaatggcggctgggtgatctctttgctgaattaatgagttcttaacatgtggacccaactgcctgtgtgagatctgtgtcttaaaacttactggaatggaaatctatgaattattgcaaattgtaatgctggaaacaaaaaataaatccttggttaaagggaaaaaaaaattatttaaaaaattattaaaatataatattattttaaaaataaaaaaaaacctcaa

SEQ ID NO: 308696 - DNA, 2757 bp, Homo sapiens
gctaaatgacgttgccgtttccgggtcacccaggcagcttgtggcggcgaagccatcggtgttcgctgatgtccagtctatggagtcagttggtaccggtggcggcgcggaggcagaaggcggtgtccgagtaggggcctctgccccaccaggatgttaccgggcttggccgccgccgcggcccacagatgtagctggtcctccctgtgccggctccgtctgcgatgcagggcggcggcctgtaatcccagcgaccgccaggagtggcagaatttagtgacatttggaagcttttcaaacgtggttccctgtagtcatccatatattggtaccctgagtcaagtaaagttgtactccacaaatgttcagaaagaaggacagggatcacaaacactcagagtggaaaaagtaccatcatttgaaacagcagaaggtataggcgcagaactcaaagctccacttaagcaagaacctctccaagtaagagttaaagcagtccttaagaaaagggagtatggatcaaagtacactcagaataatttcatcactggagtcagagcgataaatgagttctgcctcaaatccagtgatctagaacaacttcgaaaaatcagacgacgaagtccccatgaagatactgagtcttttactgtatacttgagatcagatgtggaagcaaaatctttggaagtttggggaagccctgaagctcttgccagagagaaaaaattgcgtaaggaagcagaaatagaatacagagaaaggctatttagaaaccaaaaaatattaagagaatacagagatttcttgggaaataccaagccacgctccagaacagcatcagtgttttttaagggaccaggaaaagtggtgatggttgcaatttgcatcaatggattaaactgcttctttaaatttcttgcctggatttataccggttcagcaagtatgttctcagaagctatacactcattatctgatacttgtaatcagggtttactagcattgggcatcagtaagtctgttcaaacaccagatccttctcatccgtacggattttcaaatatgcgctatatttcttcgctaattagtggtgttggtattttcatgatgggtgcaggactatcttggtaccatggagtcatgggattgcttcatcctcaaccaatagaatcccttctatgggcatattgtattttagcaggatcattagtatctgaaggagcaacacttcttgttgctgtaaatgaacttcgtaggaatgctcgggctaaaggaatgtcattttacaagtatgtaatggaaagtcgtgatcctagtacaaatgtgatattattggaggatactgctgcagtcttgggagttataatagcagccacttgcatgggccttacttctataacaggcaatccactgtatgacagcctaggttctttgggtgtgggcaccttattaggcatggtctcagcattcctcatctacactaacacagaagcactcttagggcggtccatccagccagaacaagtacaacggctcactgaactcctggagaatgacccatcagtaagggcaattcatgatgttaaagccacagatctgggattaggtaaagtaagatttaaggcagaagtagattttgatgggcgagttgttacaagatcatatttggaaaaacaagattttgaccaaatgttacaaatcaagatctgccaatcttcaatattctggctaaatcttggtatgtggtttttaaacagtcactccgtttcaaagtctgtctttccttatagaatgtggaaattatttctccataccttgtgattttgacctgagtgctaagagaatcactctccttacctagttatctacaaatgttcattccagaaatgtttagttactgaattgaatgaagacatctcagtacactcttttaggtcatagtagttgccattttgtaaaatttcttttttcttctttgcttttttccccttatttggtttaatttttctaatgttaggagatatagtcctagatatttccatgggccagtgtgatgacttttttttaaatgaggttcagtaccataatgtttatttactggaagataatgcatttataagcattttaaaattctgtaaagtgggttagaaatatttataattttacaggcaggacagcatttgacttttatttaaaaggcggcactacttatgtaaatctgagctgtgggatatttcttgctttaagagagagacagaatctctcactgaaactcatggtcatgattttgtataatatagttcatactgtgtctgtgagtttcttcaattacaaatgggcatttagtatagttatattgactataacatgtaagtaaatagctttctactgaccctaagttatcaaggtggaaaaaaaacatgcaattcagtaattgaaaatgtggtgaaaagctgcagctgtcatcatcaaaacaactcataacatactttaaaatgttcaggtagcagtgagcattgttcatatgagaatggcggctgggtgatctctttgctgaattaatgagttcttaacatgtggacccaactgcctgtgtgagatctgtgtcttaaaacttactggaatggaaatctatgaattattgcaaattgtaatgctggaaacaaaaaataaatccttggttaaagggaaaaaaaaattatttaaaaaattattaaaatataatattattttaaaaataaaaaaaaacctcaa

SEQ ID NO: 308697 - DNA, 2019 bp, Homo sapiens
tgctatggatatagctaaaagaaatggactcttcattatgtcatttttttgtattggtgtctctaatctaaatgtgctcagaaacttcacatatgtaatgacaggcaatccactgtatgacagcctaggttctttgggtgtgggcaccttattaggcatggtctcagcattcctcatctacactaacacagaagcactcttagggcggtccatccagccagaacaagtacaacggctcactgaactcctggagaatgacccatcagtaagggcaattcatgatgttaaagccacagatctgggattaggtaaagtaagatttaaggcagaagtagattttgatgggcgagttgttacaagatcatatttggaaaaacaagattttgaccaaatgttacaagaaattcaagaagtgaaaactcctgaagaactagagacctttatgcttaaacatggagaaaatattattgatactttaggagctgaagtagatagacttgagaaggaactgaaaaaacgaaatcctgaagttcgacatgtagatttggagatactgtgagtttgatggaatgaatcacctgggtggggaccttggaaacaagtttgtccgtccactctacaaagtttcctcctctcctacactgaaagactcagtgccatgcagaagccttttttttaagatgaaggaaatattttatgtaaagagcaactcagcaggacacagaactaaaactactacttacatctaacagacacactacaagttgaatcaatttgaaaatcatgtttttatgcttccatagggaacattttggttatttaaattgttcataatgtcccatatttcacctgttcagtgtatactgtactttgcaatcatctttccttttttcacattggtaaaaataagtggcatccataggatcatgatttttaatttgttgcctctgaagatttcactccatcaagatctgccaatcttcaatattctggctaaatcttggtatgtggtttttaaacagtcactccgtttcaaagtctgtctttccttatagaatgtggaaattatttctccataccttgtgattttgacctgagtgctaagagaatcactctccttacctagttatctacaaatgttcattccagaaatgtttagttactgaattgaatgaagacatctcagtacactcttttaggtcatagtagttgccattttgtaaaatttcttttttcttctttgcttttttccccttatttggtttaatttttctaatgttaggagatatagtcctagatatttccatgggccagtgtgatgacttttttttaaatgaggttcagtaccataatgtttatttactggaagataatgcatttataagcattttaaaattctgtaaagtgggttagaaatatttataattttacaggcaggacagcatttgacttttatttaaaaggcggcactacttatgtaaatctgagctgtgggatatttcttgctttaagagagagacagaatctctcactgaaactcatggtcatgattttgtataatatagttcatactgtgtctgtgagtttcttcaattacaaatgggcatttagtatagttatattgactataacatgtaagtaaatagctttctactgaccctaagttatcaaggtggaaaaaaaacatgcaattcagtaattgaaaatgtggtgaaaagctgcagctgtcatcatcaaaacaactcataacatactttaaaatgttcaggtagcagtgagcattgttcatatgagaatggcggctgggtgatctctttgctgaattaatgagttcttaacatgtggacccaactgcctgtgtgagatctgtgtcttaaaacttactggaatggaaatctatgaattattgcaaattgtaatgctggaaacaaaaaataaatccttggttaaagggaaaaaaaaattatttaaaaaattattaaaatataatattattttaaaaataaaaaaaaacctcaa

SEQ ID NO: 308698 - DNA, 2409 bp, Homo sapiens
gctaaatgacgttgccgtttccgggtcacccaggcagcttgtggcggcgaagccatcggtgttcgctgatgtccagtctatggagtcagttggtaccggtggcggcgcggaggcagaaggcggtgtccgagtaggggcctctgccccaccaggatgttaccgggcttggccgccgccgcggcccacagatgtagctggtcctccctgtgccggctccgtctgcgatgcagggcggcggcctgtaatcccagcgaccgccaggagtggcagaatttagtgacatttggaagcttttcaaacgtggttccctgtagtcatccatatattggtaccctgagtcaagtaaagttgtactccacaaatgttcagaaagaaggacagggatcacaaacactcagagtggaaaaagtaccatcatttgaaacagcagaaggtataggcgcagaactcaaagctccacttaagcaagaacctctccaagtaagagttaaagcagtccttaagaaaagggagtatggatcaaagtacactcagaataatttcatcactggagtcagagcgataaatgagttctgcctcaaatccagtgatctagaacaacttcgaaaaatcagacgacgaagtccccatgaagatactgagtcttttactgtatacttgagatcagatgtggaagcaaaatctttggaagtttggggaagccctgaagctcttgccagagagaaaaaattgcgtaaggaagcagaaatagaatacagagaaaggctatttagaaaccaaaaaatattaagagaatacagagatttcttgggaaataccaagccacgctccagaacagcatcagtgttttttaagggaccaggaaaagtggtgatggttgcaatttgcatcaatggattaaactgcttctttaaatttcttgcctggatttataccggttcagcaagtatgttctcagaagctatacactcattatctgatacttgtaatcagggtttactagcattgggcatcagtaagtctgttcaaacaccagatccttctcatccgtacggattttcaaatatgcgctatatttcttcgctaattagtggtgttggtattttcatgatgggtgcaggactatcttggtaccatggagtcatgggattgcttcatcctcaaccaatagaatcccttctatgggcatattgtattttagcaggatcattagtatctgaaggagcaacacttcttgttgctgtaaatgaacttcgtaggaatgctcgggctaaaggaatgtcattttacaagtatgtaatggaaagtcgtgatcctagtacaaatgtgatattattggaggatactgctgcagtcttgggagttataatagcagccacttgcatgggccttacttctataacaggcaatccactgtatgacagcctaggttctttgggtgtgggcaccttattaggcatggtctcagcattcctcatctacactaacacagaagcactcttagggcggtccatccagccagaacaagtacaacggctcactgaactcctggagaatgacccatcagtaagggcaattcatgatgttaaagccacagatctgggattaggtaaagtaagatttaaggcagaagtagattttgatgggcgagttgttacaagatcatatttggaaaaacaagattttgaccaaatgttacaagaaattcaagaagtgaaaactcctgaagaactagagacctttatgcttaaacatggagaaaatattattgatactttaggagctgaagtagatagacttgagaaggaactgaaaaagtaagatgtattcataaaaataacataatgataatggcagctatttttttgagtacttactctacagcagacactaagtgcatccatcacatgcatgctttaacccactcataactccacagtgtgtaggtatttataagcaagaaaatgactgggttagataagttgaataatttacccaaggaaatagggaaattgtgatttgaaccagattctttacttttaaacactattttatgcagcctgcttagtttctaaaatagtcaaagggggtttttttgtttgttaataaataagcattttgaaagttcctagagaaagatgaaaaggaaactttagactgtggtcaaaagttagaaaaaatagaatgtatatcttgcttttagcccatttgaaattattttctgtttttgtttgtttctattcagttggatgttattgtaatttattgattatgttactgaaatattacctgatcctgatcaggttgtcttttaaaatgtctcagtgttctcaaattgccatttattgacatttgaattctgtttgcaatgaataaaaacttgtaaatgatctttaatgtaaaaaattt

SEQ ID NO: 308699 - DNA, 2269 bp, Homo sapiens
gctaaatgacgttgccgtttccgggtcacccaggcagcttgtggcggcgaagccatcggtgttcgctgatgtccagtctatggagtcagttggtaccggtggcggcgcggaggcagaaggcggtgtccgagtaggggcctctgccccaccaggatgttaccgggcttggccgccgccgcggcccacagatgtagctggtcctccctgtgccggctccgtctgcgatgcagggcggcggcctgtaatcccagcgaccgccaggagtggcagaatttagtgacatttggaagcttttcaaacgtggttccctgtagtcatccatatattggtaccctgagtcaagtaaagttgtactccacaaatgttcagaaagaaggacagggatcacaaacactcagagtggaaaaagtaccatcatttgaaacagcagaaggtataggcgcagaactcaaagctccacttaagcaagaacctctccaagtaagagttaaagcagtccttaagaaaagggagtatggatcaaagtacactcagaataatttcatcactggagtcagagcgataaatgagttctgcctcaaatccagtgatctagaacaacttcgaaaaatcagacgacgaagtccccatgaagatactgagtcttttactgtatacttgagatcagatgtggaagcaaaatctttggaagtttggggaagccctgaagctcttgccagagagaaaaaattgcgtaaggaagcagaaatagaatacagagaaaggctatttagaaaccaaaaaatattaagagaatacagagatttcttgggaaataccaagccacgctccagaacagcatcagtgttttttaagggaccaggaaaagtggtgatggttgcaatttgcatcaatggattaaactgcttctttaaatttcttgcctggatttataccggttcagcaagtatgttctcagaagctatacactcattatctgatacttgtaatcagggtttactagcattgggcatcagtaagtctgttcaaacaccagatccttctcatccgtacggattttcaaatatgcgctatatttcttcgctaattagtggtgttggtattttcatgatgggtgcaggactatcttggtaccatggagtcatgggattgcttcatcctcaaccaatagaatcccttctatgggcatattgtattttagcaggatcattagtatctgaaggagcaacacttcttgttgctgtaaatgaacttcgtaggaatgctcgggctaaaggaatgtcattttacaagtatgtaatggaaagtcgtgatcctagtacaaatgtgatattattggaggatactgctgcagtcttgggagttataatagcagccacttgcatgggccttacttctataacaggcaatccactgtatgacagcctaggttctttgggtgtgggcaccttattaggcatggtctcagcattcctcatctacactaacacagaagcactcttagggcggtccatccagccagaacaagtacaacggctcactgaactcctggagaatgacccatcagtaagggcaattcatgatgttaaagccacagatctgggattaggtaaagtaagatttaaggcagaagtagattttgatgggcgagttgttacaagatcatatttggaaaaacaagattttgaccaaatgttacaagaaattcaagaagtgaaaactcctgaagaactagagacctttatgcttaaacatggagaaaatattattgatactttaggagctgaagtagatagacttgagaaggaactgaaattcatactgtgtctgtgagtttcttcaattacaaatgggcatttagtatagttatattgactataacatgtaagtaaatagctttctactgaccctaagttatcaaggtggaaaaaaaacatgcaattcagtaattgaaaatgtggtgaaaagctgcagctgtcatcatcaaaacaactcataacatactttaaaatgttcaggtagcagtgagcattgttcatatgagaatggcggctgggtgatctctttgctgaattaatgagttcttaacatgtggacccaactgcctgtgtgagatctgtgtcttaaaacttactggaatggaaatctatgaattattgcaaattgtaatgctggaaacaaaaaataaatccttggttaaagggaaaaaaaaattatttaaaaaattattaaaatataatattattttaaaaataaaaaaaaacctcaa

SEQ ID NO: 308700 - DNA, 1744 bp, Homo sapiens
aaagttttaaaaatgttcattaaacttaatggcgtttgttataggtttgtttttttttaaggagtcataagtgtaccactatggttttttaaaaatttattttcctgttttcattttctttataggaaattcaagaagtgaaaactcctgaagaactagagacctttatgcttaaacatggagaaaatattattgatactttaggagctgaagtagatagacttgagaaggaactgaaaaaacgaaatcctgaagttcgacatgtagatttggagatactgtgagtttgatggaatgaatcacctgggtggggaccttggaaacaagtttgtccgtccactctacaaagtttcctcctctcctacactgaaagactcagtgccatgcagaagccttttttttaagatgaaggaaatattttatgtaaagagcaactcagcaggacacagaactaaaactactacttacatctaacagacacactacaagttgaatcaatttgaaaatcatgtttttatgcttccatagggaacattttggttatttaaattgttcataatgtcccatatttcacctgttcagtgtatactgtactttgcaatcatctttccttttttcacattggtaaaaataagtggcatccataggatcatgatttttaatttgttgcctctgaagatttcactccatcaagatctgccaatcttcaatattctggctaaatcttggtatgtggtttttaaacagtcactccgtttcaaagtctgtctttccttatagaatgtggaaattatttctccataccttgtgattttgacctgagtgctaagagaatcactctccttacctagttatctacaaatgttcattccagaaatgtttagttactgaattgaatgaagacatctcagtacactcttttaggtcatagtagttgccattttgtaaaatttcttttttcttctttgcttttttccccttatttggtttaatttttctaatgttaggagatatagtcctagatatttccatgggccagtgtgatgacttttttttaaatgaggttcagtaccataatgtttatttactggaagataatgcatttataagcattttaaaattctgtaaagtgggttagaaatatttataattttacaggcaggacagcatttgacttttatttaaaaggcggcactacttatgtaaatctgagctgtgggatatttcttgctttaagagagagacagaatctctcactgaaactcatggtcatgattttgtataatatagttcatactgtgtctgtgagtttcttcaattacaaatgggcatttagtatagttatattgactataacatgtaagtaaatagctttctactgaccctaagttatcaaggtggaaaaaaaacatgcaattcagtaattgaaaatgtggtgaaaagctgcagctgtcatcatcaaaacaactcataacatactttaaaatgttcaggtagcagtgagcattgttcatatgagaatggcggctgggtgatctctttgctgaattaatgagttcttaacatgtggacccaactgcctgtgtgagatctgtgtcttaaaacttactggaatggaaatctatgaattattgcaaattgtaatgctggaaacaaaaaataaatccttggttaaagggaaaaaaaaattatttaaaaaattattaaaatataatattattttaaaaataaaaaaaaacctcaa

SEQ ID NO: 308701 - DNA, 1357 bp, Homo sapiens
gctaaatgacgttgccgtttccgggtcacccaggcagcttgtggcggcgaagccatcggtgttcgctgatgtccagtctatggagtcagttggtaccggtggcggcgcggaggcagaaggcggtgtccgagtaggggcctctgccccaccaggatgttaccgggcttggccgccgccgcggcccacagatgtagctggtcctccctgtgccggctccgtctgcgatgcagggcggcggcctgtaatcccagcgaccgccaggagtggcagaatttagtgacatttggaagcttttcaaacgtggttccctgtagtcatccatatattggtaccctgagtcaagtaaagttgtactccacaaatgttcagaaagaaggacagggatcacaaacactcagagtggaaaaagtaccatcatttgaaacagcagaaggtataggcgcagaactcaaagctccacttaagcaagaacctctccaagtaagagttaaagcagtccttaagaaaagggagtatggatcaaagtacactcagaataatttcatcactggagtcagagcgataaatgagttctgcctcaaatccagtgatctagaacaacttcgaaaaatcagacgacgaagtccccatgaagatactgagtcttttactgtatacttgagatcagatgtggaagcaaaatctttggaagtttggggaagccctgaagctcttgccagagagaaaaaattgcgtaaggaagcagaaatagaatacagagaaaggctatttagaaaccaaaaaatattaagagaatacagagatttcttgggaaataccaagccacgctccagaacagcatcagtgttttttaagggaccaggaaaagtggtgatggttgcaatttgcatcaatggattaaactgcttctttaaatttcttgcctggatttataccggttcagcaagtatgttctcagaagctatacactcattatctgatacttgtaatcagggtttactagcattgggcatcagtaagtctgttcaaacaccagatccttctcatccgtacggattttcaaatatgcgctatatttcttcgctaattagtggtgttggtattttcatgatgggtgcaggactatcttggtaccatggagtcatgggattgcttcatcctcaaccaatagaatcccttctatgggcatattgtattttagcaggatcattagtatctgaaggagcaacacttcttgttgctgtaaatgaacttcgtaggaatgctcgggctaaaggaatgtcattttacaagtatgttatagaagtaaggcccatgcaagtggctgctattataactcccaagaactgcagcagta

SEQ ID NO: 308702 - DNA, 1329 bp, Homo sapiens
gctaaatgacgttgccgtttccgggtcacccaggcagcttgtggcggcgaagccatcggtgttcgctgatgtccagtctatggagtcagttggtaccggtggcggcgcggaggcagaaggcggtgtccgagtaggggcctctgccccaccaggatgttaccgggcttggccgccgccgcggcccacagatgtagctggtcctccctgtgccggctccgtctgcgatgcagggcggcggcctgtaatcccagcgaccgccaggagtggcagaatttagtgacatttggaagcttttcaaacgtggttccctgtagtcatccatatattggtaccctgagtcaagtaaagttgtactccacaaatgttcagaaagaaggacagggatcacaaacactcagagtggaaaaagtaccatcatttgaaacagcagaaggtataggcgcagaactcaaagctccacttaagcaagaacctctccaagtaagagttaaagcagtccttaagaaaagggagtatggatcaaagtacactcagaataatttcatcactggagtcagagcgataaatgagttctgcctcaaatccagtgatctagaacaacttcgaaaaatcagacgacgaagtccccatgaagatactgagtcttttactgtatacttgagatcagatgtggaagcaaaatctttggaagtttggggaagccctgaagctcttgccagagagaaaaaattgcgtaaggaagcagaaatagaatacagagaaaggctatttagaaaccaaaaaatattaagagaatacagagatttcttgggaaataccaagccacgctccagaacagcatcagtgttttttaagggaccaggaaaagtggtgatggttgcaatttgcatcaatggattaaactgcttctttaaatttcttgcctggatttataccggttcagcaagtatgttctcagaagctatacactcattatctgatacttgtaatcagggtttactagcattgggcatcagtaagtctgttcaaacaccagatccttctcatccgtaaggacattgccttattttgtttttgtttgttttggcgataagtcattgaaataactaaatatcagaaatctcctgcaatttatgtacctgcagtttgttcaagatttggtcatttcttccactgtagtatctaaaatgcagaacttcccactgtgtcaaagtaaattcaaggtatcttttgaaaatggagttcaagttatttttatgctttgtagcacggcatggagatcttgttttctccatatttgataataataaagcacatattttgatctta

SEQ ID NO: 308703 - DNA, 1021 bp, Homo sapiens
gctaaatgacgttgccgtttccgggtcacccaggcagcttgtggcggcgaagccatcggtgttcgctgatgtccagtctatggagtcagttggtaccggtggcggcgcggaggcagaaggcggtgtccgagtaggggcctctgccccaccaggatgttaccgggcttggccgccgccgcggcccacagatgtagctggtcctccctgtgccggctccgtctgcgatgcagggcggcggcctgtaatcccagcgaccgccaggagtggcagaatttagtgacatttggaagcttttcaaacgtggttccctgtagtcatccatatattggtaccctgagtcaagtaaagttgtactccacaaatgttcagaaagaaggacagggatcacaaacactcagagtggaaaaagtaccatcatttgaaacagcagaaggtataggcgcagaactcaaagctccacttaagcaagaacctctccaagtaagagttaaagcagtccttaagaaaagggagtatggatcaaagtacactcagaataatttcatcactggagtcagagcgataaatgagttctgcctcaaatccagtgatctagaacaacttcgaaaaatcagacgacgaagtccccatgaagatactgagtcttttactgtatacttgagatcagatgtggaagcaaaatctttggaagtttggggaagccctgaagctcttgccagagagaaaaaattgcgtaaggaagcagaaatagaatacagagaaaggcctcagcaaaatggtgagacccatttctaaaaatgaaataaagacctttcccacgcccacagatatacaatcaccagtttggaaatgtctgcttcccaaaggtcatatggagaggcttctgggatgctggtaatgttctcttgatctggatggtggttacaggatatttgcctcgtaatattcattaagccagacattgccgtttcatgtacttgtctgactgcattttgtatttcataattttgaaaaaggcaaa

SEQ ID NO: 308704 - DNA, 749 bp, Homo sapiens
agagacatctcttgagctctctcccactgacttgtcattcacaggcattcaaactgtgatgtttgaaactgtctacctccgcagatccagggacagtccctccagtccaaaggctcactgcaattggccctcagcccccttcaaactggacttctggtttcttctttccttctgcccctgaattctgaagagcttcttcctgaggtccttctgccgcttcagcttctcctcctcctccttctgcttggctctgaagtgctctttattgtgcaggtgggtacgccacctgcaggctgtttgaccttcgtgctgaccaggagctcatgacttactcccatgacaacatcatctgcgggatcacctctgtctccttctccaagagcgggcgcctcctccttgctgggtacgacgacttcaactgcaacgtctgggatgcactcaaagccgaccgggcaggtacgtggccatggggcctttctgtgtcttgtggacatttacgtggtatctttagagcaaacacagagtggttgcataagctgcagtgttttagtatcggtgggactgtggcatggcgtagcaggagtgacagtcgcaaactgatggcccagctctgaccctccaggcaagtggactccgaggagtaccagcagatcttcccacatgcgtcggggagggctctggggagagtcagtgggcaggagagggtcagctgtgcaggctccagggcccagccccgtgctttcccctct

SEQ ID NO: 308705 - DNA, 356 bp, Homo sapiens
  misc_feature (2)..(2): n is a, c, g, or t
  misc_feature (83)..(83): n is a, c, g, or t
  misc_feature (128)..(128): n is a, c, g, or t
tnaaaaaggaataacaacgtggaacattatgccccgcgttaaccgcaaaggcagttgtaaggagcaccgcagcagcatgtaanctggctgtgccggaataaatgttgcacacaaggagccaagcaaancgagaagtggacagagccgcaatggttacaactgtaagaggttatttcttaaaagaaaaagaacacctaaggattgtttgccatattgggtgggtttactcttagaatcgcatgctgtagaaatgctcaaaagtgcatatgggactcagtcctagttcttgagcatttcacacgacgcgtgtacatatcccagatcgccgtaccagccgctttaaaaaaaaaccccgg

SEQ ID NO: 308706 - DNA, 1707 bp, Homo sapiens
aagatccaggctggtaccggcccggagatttacggatgaggcgtctgaggggcggacggaggcggcggcggcggcggcgggagcgggagcgggcggcgagtggggagcggggccgggagtggagcagccgccgcggcgggactggaccgagcctcgccggcgcgcacctgcccgcagcgcccgcggagcgcgcagcgcggcccgagcgcgacgacctgccgagcggcggccgaggcggcggtgtgggcgcgtcaggccgcgacgagggcgctgagacaaatttacatgtattggagaccagaccagaagcccttctgaattaagatctcacattcttgaaggtggcattgaagagcactaagatcggaagatgagtgagcttgaccagttacggcaggaggccgagcaacttaagaaccagattcgagacgccaggaaagcatgtgcagatgcaactctctctcagatcacaaacaacatcgacccagtgggaagaatccaaatgcgcacgaggaggacactgcgggggcacctggccaagatctacgccatgcactggggcacagactccaggcttctcgtcagtgcctcgcaggatggtaaacttatcatctgggacagctacaccaccaacaaggtccacgccatccctctgcgctcctcctgggtcatgacctgtgcatatgccccttctgggaactatgtggcctgcggtggcctggataacatttgctccatttacaatctgaaaactcgtgaggggaacgtgcgcgtgagtcgtgagctggcaggacacacaggttacctgtcctgctgccgattcctggatgacaatcagatcgtcaccagctctggagacaccacgtgtgccctgtgggacatcgagaccggccagcagacgaccacgtttaccggacacactggagatgtcatgagcctttctcttgctcctgacaccagactgttcgtctctggtgcttgtgatgcttcagccaaactctgggatgtgcgagaaggcatgtgccggcagaccttcactggccacgagtctgacatcaatgccatttgcttctttccaaatggcaatgcatttgccactggctcagacgacgccacctgcaggctgtttgaccttcgtgctgaccaggagctcatgacttactcccatgacaacatcatctgcgggatcacctctgtctccttctccaagagcgggcgcctcctccttgctgggtacgacgacttcaactgcaacgtctgggatgcactcaaagccgaccgggcaggtgtcttggctgggcatgacaaccgcgtcagctgcctgggcgtgactgacgatggcatggctgtggcgacagggtcctgggatagcttcctcaagatctggaactaacgccagtagcatgtggatgccatggagactggaagaccattccaacttggacgcgttaccatgagagcatatcctatccaaccgtactaacgtggacaccctacacctcccctcagaacttcaaaagggcaagatcttttttccttcacttattgctgaaaccaagagcacaattcccattgagagaaagatctctgtgctgtaaactaaaacaaattgtgcattccttccggggccatcgtctttgttttcttttttgtcttgaatgaattttaaaaggaaatatataataaaaatgttaaccagaaggtaaa

SEQ ID NO: 308707 - DNA, 318 bp, Homo sapiens
tggaagggaggcttgagtctgtgctgcaggagagctgggagggactgccagcaggtttggaaaggaaaggggtgctgaggcttgctttacactggtggaatctgaaaggattgaaccctcagagcgctgcagtgcgtagagctttctaggaactggggtacattcagggaaagggaataaggagtggatcctcgacttgagagaagaaccacaaaagaaccagttgagggttcagaagggggcgtgactgggtgtggcagatgtggagctgggttggtgagagcaggatgaggggctgttgctggctcctgagtgtag

SEQ ID NO: 308708 - DNA, 3152 bp, Homo sapiens
aggctggggcttgtggtttttgtgagctgggagctgggctggggagttgttggagctgttggtgcctggtgatgttgatgcatgccgccgcggcgggactggaccgagcctcgccggcgcgcacctgcccgcagcgcccgcggagcgcgcagcgcggcccgagcgcgacgacctgccgagcggcggccgaggcggcggtgtgggcgcgtcaggccgcgacgagggcgctgagacaaatttacatgtattggagaccagaccagaagcccttctgaattaagatctcacattcttgaaggtggcattgaagagcactaagatcggaagatgagtgagcttgaccagttacggcaggaggccgagcaacttaagaaccagattcgagacgccaggaaagcatgtgcagatgcaactctctctcagatcacaaacaacatcgacccagtgggaagaatccaaatgcgcacgaggaggacactgcgggggcacctggccaagatctacgccatgcactggggcacagactccaggcttctcgtcagtgcctcgcaggatggtaaacttatcatctgggacagctacaccaccaacaaggtccacgccatccctctgcgctcctcctgggtcatgacctgtgcatatgccccttctgggaactatgtggcctgcggtggcctggataacatttgctccatttacaatctgaaaactcgtgaggggaacgtgcgcgtgagtcgtgagctggcaggacacacaggttacctgtcctgctgccgattcctggatgacaatcagatcgtcaccagctctggagacaccacgtgtgccctgtgggacatcgagaccggccagcagacgaccacgtttaccggacacactggagatgtcatgagcctttctcttgctcctgacaccagactgttcgtctctggtgcttgtgatgcttcagccaaactctgggatgtgcgagaaggcatgtgccggcagaccttcactggccacgagtctgacatcaatgccatttgcttctttccaaatggcaatgcatttgccactggctcagacgacgccacctgcaggctgtttgaccttcgtgctgaccaggagctcatgacttactcccatgacaacatcatctgcgggatcacctctgtctccttctccaagagcgggcgcctcctccttgctgggtacgacgacttcaactgcaacgtctgggatgcactcaaagccgaccgggcaggtgtcttggctgggcatgacaaccgcgtcagctgcctgggcgtgactgacgatggcatggctgtggcgacagggtcctgggatagcttcctcaagatctggaactaacgccagtagcatgtggatgccatggagactggaagaccattccaacttggacgcgttaccatgagagcatatcctatccaaccgtactaacgtggacaccctacacctcccctcagaacttcaaaagggcaagatcttttttccttcacttattgctgaaaccaagagcacaattcccattgagagaaagatctctgtgctgtaaactaaaacaaattgtgcattccttccggggccatcgtctttgttttcttttttgtcttgaatgaattttaaaaggaaatatataataaaaatgttaaccagaaggtaaacttgagtgtaattgtcagacagacacacttttccaccagtgtatttgaattttagaccagtgaccctgttttgtggcattcatgcaaaacatgctgagggctttgttcatctggtcatcgtgtccaaatttcagtcatgtttgtagcaagattttggaagcattcatatttcctttttaaaatgtattcctttgtgttcaacagttaatcaaaaccagagagtctagggcagcctctctgatgttgtcaatgatgtaaattcagtccctggtttttaattttctgtctgatgtcacagatcattgttgcacacaaacgtggcatagaaaagaacatgttcagaagccatggggccaagcacatgcggggacggtctcaaatgcgtgatcagagaatccttcacctttgctgaaaagtgagctcagatccagcaccatgttcctcctgacccatcctgtctatcttctcagttgagtttttaatctcactttgggtttccttgtgaagttggagggaagtttataatagcctaacactaccccacccccaactaggaggaacctctgttttcaagagagatgcctgtcctgtgcttggatagtcagtcaattatttgtgtatgaaacaatgtacaaatcaatgttttgaaaataatgatctcagactttctaagttaaattttaaaaattttgattgtttgccatattgggtgggtttactcttagaatcgcatgctgtagaaatgctcaaaagtgcatatgggactcagtccttaggtgttctttttcttttaagaaataacctcttacagttgtaaccattgcggctctgtccacttctcgttgctgctctgtggcacatatcggaagcagtacagcgcgcggctctacacgcttgggtagcgggataagtcactgttttctttatttctttaaaaaaaaaaaagttctgttgcaaacgactgctgttggattctgagggtggggagggagagagagggagggagagggagtgaagagcctgccctcctatatggattcttcagggccctccacatctgaggtggctcattcccatcacacacagattgtcctggtgttcatttcaaggccagtgttcagcagcagcgtttggaaagcaggttctgtgggaccccccgccccgccccccgcactccttcatagcagcagtagtggcttctccatcctgttttctgcaacattctatacaaaactgtgctgtgaccttgcggtaggcctggatctggcaaagagaatacaaatgaaaccccttctttctctttccgtccaacaactctgtagagctctctgcacccttacccctttccaccttttgtatttaattttaaagtcagtgtactgcaaggaagctggatgcaagatagatactatattaaactgtactgttatttaagatgtaataaagcagtttgacatgagggaaaaaaaaaaaacaaaaaaaaaaaaa

SEQ ID NO: 308709 - DNA, 3267 bp, Homo sapiens
aggctggggcttgtggtttttgtgagctgggagctgggctggggagttgttggagctgttggtgcctggtgatgttgatgcatgccgccgcggcgggactggaccgagcctcgccggcgcgcacctgcccgcagcgcccgcggagcgcgcagcgcggcccgagcgcgacgacctgccgagcggcggccgaggcggcggtgtgggcgcgtcaggccgcgacgagggcgctgagacaaatttacatgtattggagaccagaccagaagcccttctgaattaagatctcacattcttgaaggtggcattgaagagcactaagatcggaagatgagtgagcttgaccagttacggcaggaggccgagcaacttaagaaccagattcgagacgccaggaaagcatgtgcagatgcaactctctctcagatcacaaacaacatcgacccagtgggaagaatccaaatgcgcacgaggaggacactgcgggggcacctggccaagatctacgccatgcactggggcacagactccaggcttctcgtcagtgcctcgcaggatggtaaacttatcatctgggacagctacaccaccaacaaggtccacgccatccctctgcgctcctcctgggtcatgacctgtgcatatgccccttctgggaactatgtggcctgcggtggcctggataacatttgctccatttacaatctgaaaactcgtgaggggaacgtgcgcgtgagtcgtgagctggcaggacacacaggttacctgtcctgctgccgattcctggatgacaatcagatcgtcaccagctctggagacaccacgtgtgccctgtgggacatcgagaccggccagcagacgaccacgtttaccggacacactggagatgtcatgagcctttctcttgctcctgacaccagactgttcgtctctggtgcttgtgatgcttcagccaaactctgggatgtgcgagaaggcatgtgccggcagaccttcactggccacgagtctgacatcaatgccatttgcttctttccaaatggcaatgcatttgccactggctcagacgacgccacctgcaggctgtttgaccttcgtgctgaccaggagctcatgacttactcccatgacaacatcatctgcgggatcacctctgtctccttctccaagagcgggcgcctcctccttgctgggtacgacgacttcaactgcaacgtctgggatgcactcaaagccgaccgggcaggtgtcttggctgggcatgacaaccgcgtcagctgcctgggcgtgactgacgatggcatggctgtggcgacagggtcctgggatagcttcctcaagatctggaactaacgccagtagcatgtggatgccatggagactggaagaccattccaacttggacgcgttaccatgagagcatatcctatccaaccgtactaacgtggacaccctacacctcccctcagaacttcaaaagggcaagatcttttttccttcacttattgctgaaaccaagagcacaattcccattgagagaaagatctctgtgctgtaaactaaaacaaattgtgcattccttccggggccatcgtctttgttttcttttttgtcttgaatgaattttaaaaggaaatatataataaaaatgttaaccagaaggtaaacttgagtgtaattgtcagacagacacacttttccaccagtgtatttgaattttagaccagtgaccctgttttgtggcattcatgcaaaacatgctgagggctttgttcatctggtcatcgtgtccaaatttcagtcatgtttgtagcaagattttggaagcattcatatttcctttttaaaatgtattcctttgtgttcaacagttaatcaaaaccagagagtctagggcagcctctctgatgttgtcaatgatgtaaattcagtccctggtttttaattttctgtctgatgtcacagatcattgttgcacacaaacgtggcatagaaaagaacatgttcagaagccatggggccaagcacatgcggggacggtctcaaatgcgtgatcagagaatccttcacctttgctgaaaagtgagctcagatccagcaccatgttcctcctgacccatcctgtctatcttctcagttgagtttttaatctcactttgggtttccttgtgaagttggagggaagtttataatagcctaacactaccccacccccaactaggaggaacctctgttttcaagagagatgcctgtcctgtgcttggatagtcagtcaattatttgtgtatgaaacaatgtacaaatcaatgttttgaaaataatgatctcagactttctaagttaaattttaaaaattttgattgtttgccatattgggtgggtttactcttagaatcgcatgctgtagaaatgctcaaaagtgcatatgggactcagtccttaggtgttctttttcttttaagaaataacctcttacagttgtaaccattgcggctctgtccacttctcgttgctgctctgtggcacatatcggaagcagtacagcgcgcggctctacacgcttgggtagcgggataagtcactgttttctttatttctttaaaaaaaaaaaagttctgttgcaaacgactgctgttggattctgagggtggggagggagagagagggagggagagggagtgaagagcctgccctcctatatggattcttcagggccctccacatctgaggtggctcattcccatcacacacagattgtcctggtgttcatttcaaggccagtgttcagcagcagcgtttggaaagcaggttctgtgggaccccccgccccgccccccgcactccttcatagcagcagtagtggcttctccatcctgttttctgcaacattctatacaaaactgtgctgtgaccttgcggtaggcctggatctggcaaagagaatacaaatgaaaccccttctttctctttccgtccaacaactctgtagagctctctgcacccttacccctttccaccttttgtatttaattttaaagtcagtgtactgcaaggaagctggatgcaagatagatactatattaaactgtactgttatttaagatgtaataaagcagtttgacatgagggaaaaaaaaactaagaaaaaaaaccggggaaaatataggggggggagacaggggtttgaacgggcccgggcaaaggttttcgaccagttttggtaaaggggaaagagggggccccaagagaggaaaattggaacgggaacgt

SEQ ID NO: 308710 - DNA, 3415 bp, Homo sapiens
  misc_feature (3415)..(3415): n is a, c, g, or t
aggctggggcttgtggtttttgtgagctgggagctgggctggggagttgttggagctgttggtgcctggtgatgttgatgcatgccgccgcggcgggactggaccgagcctcgccggcgcgcacctgcccgcagcgcccgcggagcgcgcagcgcggcccgagcgcgacgacctgccgagcggcggccgaggcggcggtgtgggcgcgtcaggccgcgacgagggcgctgagacaaatttacatgtattggagaccagaccagaagcccttctgaattaagatctcacattcttgaaggtggcattgaagagcactaagatcggaagatgagtgagcttgaccagttacggcaggaggccgagcaacttaagaaccagattcgagacgccaggaaagcatgtgcagatgcaactctctctcagatcacaaacaacatcgacccagtgggaagaatccaaatgcgcacgaggaggacactgcgggggcacctggccaagatctacgccatgcactggggcacagactccaggcttctcgtcagtgcctcgcaggatggtaaacttatcatctgggacagctacaccaccaacaaggtccacgccatccctctgcgctcctcctgggtcatgacctgtgcatatgccccttctgggaactatgtggcctgcggtggcctggataacatttgctccatttacaatctgaaaactcgtgaggggaacgtgcgcgtgagtcgtgagctggcaggacacacaggttacctgtcctgctgccgattcctggatgacaatcagatcgtcaccagctctggagacaccacgtgtgccctgtgggacatcgagaccggccagcagacgaccacgtttaccggacacactggagatgtcatgagcctttctcttgctcctgacaccagactgttcgtctctggtgcttgtgatgcttcagccaaactctgggatgtgcgagaaggcatgtgccggcagaccttcactggccacgagtctgacatcaatgccatttgcttctttccaaatggcaatgcatttgccactggctcagacgacgccacctgcaggctgtttgaccttcgtgctgaccaggagctcatgacttactcccatgacaacatcatctgcgggatcacctctgtctccttctccaagagcgggcgcctcctccttgctgggtacgacgacttcaactgcaacgtctgggatgcactcaaagccgaccgggcaggtgtcttggctgggcatgacaaccgcgtcagctgcctgggcgtgactgacgatggcatggctgtggcgacagggtcctgggatagcttcctcaagatctggaactaacgccagtagcatgtggatgccatggagactggaagaccattccaacttggacgcgttaccatgagagcatatcctatccaaccgtactaacgtggacaccctacacctcccctcagaacttcaaaagggcaagatcttttttccttcacttattgctgaaaccaagagcacaattcccattgagagaaagatctctgtgctgtaaactaaaacaaattgtgcattccttccggggccatcgtctttgttttcttttttgtcttgaatgaattttaaaaggaaatatataataaaaatgttaaccagaaggtaaacttgagtgtaattgtcagacagacacacttttccaccagtgtatttgaattttagaccagtgaccctgttttgtggcattcatgcaaaacatgctgagggctttgttcatctggtcatcgtgtccaaatttcagtcatgtttgtagcaagattttggaagcattcatatttcctttttaaaatgtattcctttgtgttcaacagttaatcaaaaccagagagtctagggcagcctctctgatgttgtcaatgatgtaaattcagtccctggtttttaattttctgtctgatgtcacagatcattgttgcacacaaacgtggcatagaaaagaacatgttcagaagccatggggccaagcacatgcggggacggtctcaaatgcgtgatcagagaatccttcacctttgctgaaaagtgagctcagatccagcaccatgttcctcctgacccatcctgtctatcttctcagttgagtttttaatctcactttgggtttccttgtgaagttggagggaagtttataatagcctaacactaccccacccccaactaggaggaacctctgttttcaagagagatgcctgtcctgtgcttggatagtcagtcaattatttgtgtatgaaacaatgtacaaatcaatgttttgaaaataatgatctcagactttctaagttaaattttaaaaattttgattgtttgccatattgggtgggtttactcttagaatcgcatgctgtagaaatgctcaaaagtgcatatgggactcagtccttaggtgttctttttcttttaagaaataacctcttacagttgtaaccattgcggctctgtccacttctcgttgctgctctgtggcacatatcggaagcagtacagcgcgcggctctacacgcttgggtagcgggataagtcactgttttctttatttctttaaaaaaaaaaaagttctgttgcaaacgactgctgttggattctgagggtggggagggagagagagggagggagagggagtgaagagcctgccctcctatatggattcttcagggccctccacatctgaggtggctcattcccatcacacacagattgtcctggtgttcatttcaaggccagtgttcagcagcagcgtttggaaagcaggttctgtgggaccccccgccccgccccccgcactccttcatagcagcagtagtggcttctccatcctgttttctgcaacattctatacaaaactgtgctgtgaccttgcggtaggcctggatctggcaaagagaatacaaatgaaaccccttctttctctttccgtccaacaactctgtagagctctctgcacccttacccctttccaccttttgtatttaattttaaagtcagtgtactgcaaggaagctggatgcaagatagatactatattaaactgtactgttatttaagatgtaataaagcagtttgacatgagggatacaacacaacaccacacacacaaaaaaaaaaaaaattttgggggcggcctgggcccaggaaaagttttaaaacacttcctggtggggcgccgcgggcgccccagagtactgcagaccttcggccaaacggtgcccccaagggaagtcggcggcaggacagggggtggtttctccacaaataaaaagccgcggcggacccgggggttctggacaatccagatggggtccgggggactagcggggtcttcacgggggtccaagagtcgtttacgcggcgcgggtgggan

SEQ ID NO: 308711 - DNA, 2917 bp, Homo sapiens
ctagaggatccccgatagtgcaacgtggtcgctgagacaaatttacatgtattggagaccagaccagaagcccttctgaattaagatctcacattcttgaaggtggcattgaagagcactaagatcggaagatgagtgagcttgaccagttacggcaggaggccgagcaacttaagaaccagattcgaatcacaaacaacatcgacccagtgggaagaatccaaatgcgcacgaggaggacactgcgggggcacctggccaagatctacgccatgcactggggcacagactccaggcttctcgtcagtgcctcgcaggatggtaaacttatcatctgggacagctacaccaccaacaaggtccacgccatccctctgcgctcctcctgggtcatgacctgtgcatatgccccttctgggaactatgtggcctgcggtggcctggataacatttgctccatttacaatctgaaaactcgtgaggggaacgtgcgcgtgagtcgtgagctggcaggacacacaggttacctgtcctgctgccgattcctggatgacaatcagatcgtcaccagctctggagacaccacgtgtgccctgtgggacatcgagaccggccagcagacgaccacgtttaccggacacactggagatgtcatgagcctttctcttgctcctgacaccagactgttcgtctctggtgcttgtgatgcttcagccaaactctgggatgtgcgagaaggcatgtgccggcagaccttcactggccacgagtctgacatcaatgccatttgcttctttccaaatggcaatgcatttgccactggctcagacgacgccacctgcaggctgtttgaccttcgtgctgaccaggagctcatgacttactcccatgacaacatcatctgcgggatcacctctgtctccttctccaagagcgggcgcctcctccttgctgggtacgacgacttcaactgcaacgtctgggatgcactcaaagccgaccgggcaggtgtcttggctgggcatgacaaccgcgtcagctgcctgggcgtgactgacgatggcatggctgtggcgacagggtcctgggatagcttcctcaagatctggaactaacgccagtagcatgtggatgccatggagactggaagaccattccaacttggacgcgttaccatgagagcatatcctatccaaccgtactaacgtggacaccctacacctcccctcagaacttcaaaagggcaagatcttttttccttcacttattgctgaaaccaagagcacaattcccattgagagaaagatctctgtgctgtaaactaaaacaaattgtgcattccttccggggccatcgtctttgttttcttttttgtcttgaatgaattttaaaaggaaatatataataaaaatgttaaccagaaggtaaacttgagtgtaattgtcagacagacacacttttccaccagtgtatttgaattttagaccagtgaccctgttttgtggcattcatgcaaaacatgctgagggctttgttcatctggtcatcgtgtccaaatttcagtcatgtttgtagcaagattttggaagcattcatatttcctttttaaaatgtattcctttgtgttcaacagttaatcaaaaccagagagtctagggcagcctctctgatgttgtcaatgatgtaaattcagtccctggtttttaattttctgtctgatgtcacagatcattgttgcacacaaacgtggcatagaaaagaacatgttcagaagccatggggccaagcacatgcggggacggtctcaaatgcgtgatcagagaatccttcacctttgctgaaaagtgagctcagatccagcaccatgttcctcctgacccatcctgtctatcttctcagttgagtttttaatctcactttgggtttccttgtgaagttggagggaagtttataatagcctaacactaccccacccccaactaggaggaacctctgttttcaagagagatgcctgtcctgtgcttggatagtcagtcaattatttgtgtatgaaacaatgtacaaatcaatgttttgaaaataatgatctcagactttctaagttaaattttaaaaattttgattgtttgccatattgggtgggtttactcttagaatcgcatgctgtagaaatgctcaaaagtgcatatgggactcagtccttaggtgttctttttcttttaagaaataacctcttacagttgtaaccattgcggctctgtccacttctcgttgctgctctgtggcacatatcggaagcagtacagcgcgcggctctacacgcttgggtagcgggataagtcactgttttctttatttctttaaaaaaaaaaaagttctgttgcaaacgactgctgttggattctgagggtggggagggagagagagggagggagagggagtgaagagcctgccctcctatatggattcttcagggccctccacatctgaggtggctcattcccatcacacacagattgtcctggtgttcatttcaaggccagtgttcagcagcagcgtttggaaagcaggttctgtgggaccccccgccccgccccccgcactccttcatagcagcagtagtggcttctccatcctgttttctgcaacattctatacaaaactgtgctgtgaccttgcggtaggcctggatctggcaaagagaatacaaatgaaaccccttctttctctttccgtccaacaactctgtagagctctctgcacccttacccctttccaccttttgtatttaattttaaagtcagtgtactgcaaggaagctggatgcaagatagatactatattaaactgtactgttatttaagatgtaataaagcagtttgacatgagggaaaaaaaaaaaacaaaaaaaaaaaaa

SEQ ID NO: 308712 - DNA, 3082 bp, Homo sapiens
ctagaggatccccgatagtgcaacgtggtcgctgagacaaatttacatgtattggagaccagaccagaagcccttctgaattaagatctcacattcttgaaggtggcattgaagagcactaagatcggaagatgagtgagcttgaccagttacggcaggaggccgagcaacttaagaaccagattcgagacgccaggaaagcatgtgcagatgcaactctctctcagatcacaaacaacatcgacccagtgggaagaatccaaatgcgcacgaggaggacactgcgggggcacctggccaagatctacgccatgcactggggcacagactccaggcttctcgtcagtgcctcgcaggatggtaaacttatcatctgggacagctacaccaccaacaagccacgccatccctctgcgctcctggccaagatctacgccatgcactggggcacagactccaggcttctcgtcagtgcctcgcaggatggtaaacttatcatctgggacagctacaccaccaacaaggtccacgccatccctctgcgctcctcctgggtcatgacctgtgcatatgccccttctgggaactatgtggcctgcggtggcctggataacatttgctccatttacaatctgaaaactcgtgaggggaacgtgcgcgtgagtcgtgagctggcaggacacacaggttacctgtcctgctgccgattcctggatgacaatcagatcgtcaccagctctggagacaccacgtgtgccctgtgggacatcgagaccggccagcagacgaccacgtttaccggacacactggagatgtcatgagcctttctcttgctcctgacaccagactgttcgtctctggtgcttgtgatgcttcagccaaactctgggatgtgcgagaaggcatgtgccggcagaccttcactggccacgagtctgacatcaatgccatttgcttctttccaaatggcaatgcatttgccactggctcagacgacgccacctgcaggctgtttgaccttcgtgctgaccaggagctcatgacttactcccatgacaacatcatctgcgggatcacctctgtctccttctccaagagcgggcgcctcctccttgctgggtacgacgacttcaactgcaacgtctgggatgcactcaaagccgaccgggcaggtgtcttggctgggcatgacaaccgcgtcagctgcctgggcgtgactgacgatggcatggctgtggcgacagggtcctgggatagcttcctcaagatctggaactaacgccagtagcatgtggatgccatggagactggaagaccattccaacttggacgcgttaccatgagagcatatcctatccaaccgtactaacgtggacaccctacacctcccctcagaacttcaaaagggcaagatcttttttccttcacttattgctgaaaccaagagcacaattcccattgagagaaagatctctgtgctgtaaactaaaacaaattgtgcattccttccggggccatcgtctttgttttcttttttgtcttgaatgaattttaaaaggaaatatataataaaaatgttaaccagaaggtaaacttgagtgtaattgtcagacagacacacttttccaccagtgtatttgaattttagaccagtgaccctgttttgtggcattcatgcaaaacatgctgagggctttgttcatctggtcatcgtgtccaaatttcagtcatgtttgtagcaagattttggaagcattcatatttcctttttaaaatgtattcctttgtgttcaacagttaatcaaaaccagagagtctagggcagcctctctgatgttgtcaatgatgtaaattcagtccctggtttttaattttctgtctgatgtcacagatcattgttgcacacaaacgtggcatagaaaagaacatgttcagaagccatggggccaagcacatgcggggacggtctcaaatgcgtgatcagagaatccttcacctttgctgaaaagtgagctcagatccagcaccatgttcctcctgacccatcctgtctatcttctcagttgagtttttaatctcactttgggtttccttgtgaagttggagggaagtttataatagcctaacactaccccacccccaactaggaggaacctctgttttcaagagagatgcctgtcctgtgcttggatagtcagtcaattatttgtgtatgaaacaatgtacaaatcaatgttttgaaaataatgatctcagactttctaagttaaattttaaaaattttgattgtttgccatattgggtgggtttactcttagaatcgcatgctgtagaaatgctcaaaagtgcatatgggactcagtccttaggtgttctttttcttttaagaaataacctcttacagttgtaaccattgcggctctgtccacttctcgttgctgctctgtggcacatatcggaagcagtacagcgcgcggctctacacgcttgggtagcgggataagtcactgttttctttatttctttaaaaaaaaaaaagttctgttgcaaacgactgctgttggattctgagggtggggagggagagagagggagggagagggagtgaagagcctgccctcctatatggattcttcagggccctccacatctgaggtggctcattcccatcacacacagattgtcctggtgttcatttcaaggccagtgttcagcagcagcgtttggaaagcaggttctgtgggaccccccgccccgccccccgcactccttcatagcagcagtagtggcttctccatcctgttttctgcaacattctatacaaaactgtgctgtgaccttgcggtaggcctggatctggcaaagagaatacaaatgaaaccccttctttctctttccgtccaacaactctgtagagctctctgcacccttacccctttccaccttttgtatttaattttaaagtcagtgtactgcaaggaagctggatgcaagatagatactatattaaactgtactgttatttaagatgtaataaagcagtttgacatgagggaaaaaaaaaaaacaaaaaaaaaaaaa

SEQ ID NO: 308713 - DNA, 3151 bp, Homo sapiens
  misc_feature (2672)..(2672): n is a, c, g, or t
aggctggggcttgtggtttttgtgagctgggagctgggctggggagttgttggagctgttggtgcctggtgatgttgatgcatgccgccgcggcgggactggaccgagcctcgccggcgcgcacctgcccgcagcgcccgcggagcgcgcagcgcggcccgagcgcgacgacctgccgagcggcggccgaggcggcggtgtgggcgcgtcaggccgcgacgagggcgctgagacaaatttacatgtattggagaccagaccagaagcccttctgaattaagatctcacattcttgaaggtggcattgaagagcactaagatcggaagatgagtgagcttgaccagttacggcaggaggccgagcaacttaagaaccagattcgagacgccaggaaagcatgtgcagatgcaactctctctcagatcacaaacaacatcgacccagtgggaagaatccaaatgcgcacgaggaggacactgcgggggcacctggccaagatctacgccatgcactggggcacagactccaggcttctcgtcagtgcctcgcaggatggtaaacttatcatctgggacagctacaccaccaacaaggtccacgccatccctctgcgctcctcctgggtcatgacctgtgcatatgccccttctgggaactatgtggcctgcggtggcctggataacatttgctccatttacaatctgaaaactcgtgaggggaacgtgcgcgtgagtcgtgagctggcaggacacacaggttacctgtcctgctgccgattcctggatgacaatcagatcgtcaccagctctggagacaccacgtgtgccctgtgggacatcgagaccggccagcagacgaccacgtttaccggacacactggagatgtcatgagcctttctcttgctcctgacaccagactgttcgtctctggtgcttgtgatgcttcagccaaactctgggatgtgcgagaaggcatgtgccggcagaccttcactggccacgagtctgacatcaatgccatttgcttctttccaaatggcaatgcatttgccactggctcagacgacgccacctgcaggctgtttgaccttcgtgctgaccaggagctcatgacttactcccatgacaacatcatctgcgggatcacctctgtctccttctccaagagcgggcgcctcctccttgctgggtacgacgacttcaactgcaacgtctgggatgcactcaaagccgaccgggcaggtgtcttggctgggcatgacaaccgcgtcagctgcctgggcgtgactgacgatggcatggctgtggcgacagggtcctgggatagcttcctcaagatctggaactaacgccagtagcatgtggatgccatggagactggaagaccattccaacttggacgcgttaccatgagagcatatcctatccaaccgtactaacgtggacaccctacacctcccctcagaacttcaaaagggcaagatcttttttccttcacttattgctgaaaccaagagcacaattcccattgagagaaagatctctgtgctgtaaactaaaacaaattgtgcattccttccggggccatcgtctttgttttcttttttgtcttgaatgaattttaaaaggaaatatataataaaaatgttaaccagaaggtaaacttgagtgtaattgtcagacagacacacttttccaccagtgtatttgaattttagaccagtgaccctgttttgtggcattcatgcaaaacatgctgagggctttgttcatctggtcatcgtgtccaaatttcagtcatgtttgtagcaagattttggaagcattcatatttcctttttaaaatgtattcctttgtgttcaacagttaatcaaaaccagagagtctagggcagcctctctgatgttgtcaatgatgtaaattcagtccctggtttttaattttctgtctgatgtcacagatcattgttgcacacaaacgtggcatagaaaagaacatgttcagaagccatggggccaagcacatgcggggacggtctcaaatgcgtgatcagagaatccttcacctttgctgaaaagtgagctcagatccagcaccatgttcctcctgacccatcctgtctatcttctcagttgagtttttaatctcactttgggtttccttgtgaagttggagggaagtttataatagcctaacactaccccacccccaactaggaggaacctctgttttcaagagagatgcctgtcctgtgcttggatagtcagtcaattatttgtgtatgaaacaatgtacaaatcaatgttttgaaaataatgatctcagactttctaagttaaattttaaaaattttgattgtttgccatattgggtgggtttactcttagaatcgcatgctgtagaaatgctcaaaagtgcatatgggactcagtccttaggtgttctttttcttttaagaaataacctcttacagttgtaaccattgcggctctgtccacttctcgttgctgctctgtggcacatatcggaagcagtacagcgcgcggctctacacgcttgggtagcgggataagtcactgttttctttatttctttaaaaaaaaaaaagttctgttgcaaacgactgctgttggattctgagggtttcttttttttttttttccgtttacntgttcctgatcctgccctcctatatggattcttcagggccctccacatctgaggtggctcattcccatcacacacagattgtcctggtgttcatttcaaggccagtgttcagcagcagcgtttggaaagcaggttctgtgggaccccccgccccgccccccgcactccttcatagcagcagtagtggcttctccatcctgttttctgcaacattctatacaaaactgtgctgtgaccttgcggtaggcctggatctggcaaagagaatacaaatgaaaccccttctttctctttccgtccaacaactctgtagagctctctgcacccttacccctttccaccttttgtatttaattttaaagtcagtgtactgcaaggaagctggatgcaagatagatactatattaaactgtactgttatttaagatgtaataaagcagtttgacatgagggaaaaaaaaaaaacaaaaaaaaaaaaa

SEQ ID NO: 308714 - DNA, 2599 bp, Homo sapiens
ctagaggatccccgatagtgcaacgtggtcgctgagacaaatttacatgtattggagaccagaccagaagcccttctgaattaagatatgccccttctgggaactatgtggcctgcggtggcctggataacatttgctccatttacaatctgaaaactcgtgaggggaacgtgcgcgtgagtcgtgagctggcaggacacacaggttacctgtcctgctgccgattcctggatgacaatcagatcgtcaccagctctggagacaccacgtgtgccctgtgggacatcgagaccggccagcagacgaccacgtttaccggacacactggagatgtcatgagcctttctcttgctcctgacaccagactgttcgtctctggtgcttgtgatgcttcagccaaactctgggatgtgcgagaaggcatgtgccggcagaccttcactggccacgagtctgacatcaatgccatttgcttctttccaaatggcaatgcatttgccactggctcagacgacgccacctgcaggctgtttgaccttcgtgctgaccaggagctcatgacttactcccatgacaacatcatctgcgggatcacctctgtctccttctccaagagcgggcgcctcctccttgctgggtacgacgacttcaactgcaacgtctgggatgcactcaaagccgaccgggcaggtgtcttggctgggcatgacaaccgcgtcagctgcctgggcgtgactgacgatggcatggctgtggcgacagggtcctgggatagcttcctcaagatctggaactaacgccagtagcatgtggatgccatggagactggaagaccattccaacttggacgcgttaccatgagagcatatcctatccaaccgtactaacgtggacaccctacacctcccctcagaacttcaaaagggcaagatcttttttccttcacttattgctgaaaccaagagcacaattcccattgagagaaagatctctgtgctgtaaactaaaacaaattgtgcattccttccggggccatcgtctttgttttcttttttgtcttgaatgaattttaaaaggaaatatataataaaaatgttaaccagaaggtaaacttgagtgtaattgtcagacagacacacttttccaccagtgtatttgaattttagaccagtgaccctgttttgtggcattcatgcaaaacatgctgagggctttgttcatctggtcatcgtgtccaaatttcagtcatgtttgtagcaagattttggaagcattcatatttcctttttaaaatgtattcctttgtgttcaacagttaatcaaaaccagagagtctagggcagcctctctgatgttgtcaatgatgtaaattcagtccctggtttttaattttctgtctgatgtcacagatcattgttgcacacaaacgtggcatagaaaagaacatgttcagaagccatggggccaagcacatgcggggacggtctcaaatgcgtgatcagagaatccttcacctttgctgaaaagtgagctcagatccagcaccatgttcctcctgacccatcctgtctatcttctcagttgagtttttaatctcactttgggtttccttgtgaagttggagggaagtttataatagcctaacactaccccacccccaactaggaggaacctctgttttcaagagagatgcctgtcctgtgcttggatagtcagtcaattatttgtgtatgaaacaatgtacaaatcaatgttttgaaaataatgatctcagactttctaagttaaattttaaaaattttgattgtttgccatattgggtgggtttactcttagaatcgcatgctgtagaaatgctcaaaagtgcatatgggactcagtccttaggtgttctttttcttttaagaaataacctcttacagttgtaaccattgcggctctgtccacttctcgttgctgctctgtggcacatatcggaagcagtacagcgcgcggctctacacgcttgggtagcgggataagtcactgttttctttatttctttaaaaaaaaaaaagttctgttgcaaacgactgctgttggattctgagggtggggagggagagagagggagggagagggagtgaagagcctgccctcctatatggattcttcagggccctccacatctgaggtggctcattcccatcacacacagattgtcctggtgttcatttcaaggccagtgttcagcagcagcgtttggaaagcaggttctgtgggaccccccgccccgccccccgcactccttcatagcagcagtagtggcttctccatcctgttttctgcaacattctatacaaaactgtgctgtgaccttgcggtaggcctggatctggcaaagagaatacaaatgaaaccccttctttctctttccgtccaacaactctgtagagctctctgcacccttacccctttccaccttttgtatttaattttaaagtcagtgtactgcaaggaagctggatgcaagatagatactatattaaactgtactgttatttaagatgtaataaagcagtttgacatgagggaaaaaaaaaaaacaaaaaaaaaaaaa

SEQ ID NO: 308715 - DNA, 3098 bp, Homo sapiens
aggctggggcttgtggtttttgtgagctgggagctgggctggggagttgttggagctgttggtgcctggtgatgttgatgcatgccgccgcggcgggactggaccgagcctcgccggcgcgcacctgcccgcagcgcccgcggagcgcgcagcgcggcccgagcgcgacgacctgccgagcggcggccgaggcggcggtgtgggcgcgtcaggccgcgacgagggcgctgagacaaatttacatgtattggagaccagaccagaagcccttctgaattaagatctcacattcttgaaggtggcattgaagagcactaagatcggaagatgagtgagcttgaccagttacggcaggaggccgagcaacttaagaaccagattcgagacgccaggaaagcatgtgcagatgcaactctctctcagatcacaaacaacatcgacccagtgggaagaatccaaatgcgcacgaggaggacactgcgggggcacctggccaagatctacgccatgcactggggcacagactccaggcttctcgtcagtgcctcgcaggatggtaaacttatcatctgggacagctacaccaccaacaaggtccacgccatccctctgcgctcctcctgggtcatgacctgtgcatatgccccttctgggaactatgtggcctgcggtggcctggataacatttgctccatttacaatctgaaaactcgtgaggggaacgtgcgcgtgagtcgtgagctggcaggacacacaggttacctgtcctgctgccgattcctggatgacaatcagatcgtcaccagctctggagacaccacgtgtgccctgtgggacatcgagaccggccagcagacgaccacgtttaccggacacactggagatgtcatgagcctttctcttgctcctgacaccagactgttcgtctctggtgcttgtgatgcttcagccaaactctgggatgtgcgagaaggcatgtgccggcagaccttcactggccacgagtctgacatcaatgccatttgcttctttccaaatggcaatgcatttgccactggctcagacgacgccacctgcaggctgtttgaccttcgtgctgaccaggagctcatgacttactcccatgacaacatcatctgcgggatcacctctgtctccttctccaagagcgggcgcctcctccttgctgggtacgacgacttcaactgcaacgtctgggatgcactcaaagccgaccgggcaggtgtcttggctgggcatgacaaccgcgtcagctgcctgggcgtgactgacgatggcatggctgtggcgacagggtcctgggatagcttcctcaagatctggaactaacgccagtagcatgtggatgccatggagactggaagaccattccaacttggacgcgttaccatgagagcatatcctatccaaccgtactaacgtggacaccctacacctcccctcagaacttcaaaagggcaagatcttttttccttcacttattgctgaaaccaagagcacaattcccattgagagaaagatctctgtgctgtaaactaaaacaaattgtgcattccttccggggccatcgtctttgttttcttttttgtcttgaatgaattttaaaaggaaatatataataaaaatgttaaccagaaggtaaacttgagtgtaattgtcagacagacacacttttccaccagtgtatttgaattttagaccagtgaccctgttttgtggcattcatggtttgtagcaagattttggaagcattcatatttcctttttaaaatgtattcctttgtgttcaacagttaatcaaaaccagagagtctagggcagcctctctgatgttgtcaatgatgtaaattcagtccctggtttttaattttctgtctgatgtcacagatcattgttgcacacaaacgtggcatagaaaagaacatgttcagaagccatggggccaagcacatgcggggacggtctcaaatgcgtgatcagagaatccttcacctttgctgaaaagtgagctcagatccagcaccatgttcctcctgacccatcctgtctatcttctcagttgagtttttaatctcactttgggtttccttgtgaagttggagggaagtttataatagcctaacactaccccacccccaactaggaggaacctctgttttcaagagagatgcctgtcctgtgcttggatagtcagtcaattatttgtgtatgaaacaatgtacaaatcaatgttttgaaaataatgatctcagactttctaagttaaattttaaaaattttgattgtttgccatattgggtgggtttactcttagaatcgcatgctgtagaaatgctcaaaagtgcatatgggactcagtccttaggtgttctttttcttttaagaaataacctcttacagttgtaaccattgcggctctgtccacttctcgttgctgctctgtggcacatatcggaagcagtacagcgcgcggctctacacgcttgggtagcgggataagtcactgttttctttatttctttaaaaaaaaaaaagttctgttgcaaacgactgctgttggattctgagggtggggagggagagagagggagggagagggagtgaagagcctgccctcctatatggattcttcagggccctccacatctgaggtggctcattcccatcacacacagattgtcctggtgttcatttcaaggccagtgttcagcagcagcgtttggaaagcaggttctgtgggaccccccgccccgccccccgcactccttcatagcagcagtagtggcttctccatcctgttttctgcaacattctatacaaaactgtgctgtgaccttgcggtaggcctggatctggcaaagagaatacaaatgaaaccccttctttctctttccgtccaacaactctgtagagctctctgcacccttacccctttccaccttttgtatttaattttaaagtcagtgtactgcaaggaagctggatgcaagatagatactatattaaactgtactgttatttaagatgtaataaagcagtttgacatgagggaaaaaaaaaaaacaaaaaaaaaaaaa

SEQ ID NO: 308716 - DNA, 3105 bp, Homo sapiens
aggctggggcttgtggtttttgtgagctgggagctgggctggggagttgttggagctgttggtgcctggtgatgttgatgcatgccgccgcggcgggactggaccgagcctcgccggcgcgcacctgcccgcagcgcccgcggagcgcgcagcgcggcccgagcgcgacgacctgccgagcggcggccgaggcggcggtgtgggcgcgtcaggccgcgacgagggcgctgagacaaatttacatgtattggagaccagaccagaagcccttctgaattaagatctcacattcttgaaggtggcattgaagagcactaagatcggaagatgagtgagcttgaccagttacggcaggaggccgagcaacttaagaaccagattcgagacgccaggaaagcatgtgcagatgcaactctctctcagatcacaaacaacatcgacccagtgggaagaatccaaatgcgcacgaggaggacactgcgggggcacctggccaagatctacgccatgcactggggcacagactccaggcttctcgtcagtgcctcgcaggatggtaaacttatcatctgggacagctacaccaccaacaaggtccacgccatccctctgcgctcctcctgggtcatgacctgtgcatatgccccttctgggaactatgtggcctgcggtggcctggataacatttgctccatttacaatctgaaaactcgtgaggggaacgtgcgcgtgagtcgtgagctggcaggacacacaggttacctgtcctgctgccgattcctggatgacaatcagatcgtcaccagctctggagacaccacgtgtgccctgtgggacatcgagaccggccagcagacgaccacgtttaccggacacactggagatgtcatgagcctttctcttgctcctgacaccagactgttcgtctctggtgcttgtgatgcttcagccaaactctgggatgtgcgagaaggcatgtgccggcagaccttcactggccacgagtctgacatcaatgccatttgcttctttccaaatggcaatgcatttgccactggctcagacgacgccacctgcaggctgtttgaccttcgtgctgaccaggagctcatgacttactcccatgacaacatcatctgcgggatcacctctgtctccttctccaagagcgggcgcctcctccttgctgggtacgacgacttcaactgcaacgtctgggatgcactcaaagccgaccgggcaggtgtcttggctgggcatgacaaccgcgtcagctgcctgggcgtgactgacgatggcatggctgtggcgacagggtcctgggatagcttcctcaagatctggaactaacgccagtagcatgtggatgccatggagactggaagaccattccaacttggacgcgttaccatgagagcatatcctatccaaccgtactaacgtggacaccctacacctcccctcagaacttcaaaagggcaagatcttttttccttcacttattgctgaaaccaagagcacaattcccattgagagaaagatctctgtgctgtaaactaaaacaaattgtgcattccttccggggccatcgtctttgttttcttttttgtcttgaatgaattttaaaaggaaatatataataaaaatgttaaccagaaggtaaacttgagtgtaattgtcagacagacacacttttccaccagtgtatttgaattttagaccagtgaccctgttttgtggcattcatgcaaaacatgctgagggctttgttcatctggtcatcgtgtccaaatttcagtcatgtttgtagcaagattttggaagcattcatatttcctttttaaaatgtattcctttgtgttcaacagttaatcaaaaccagagagtctagggcagcctctctgatgttgtcaatgatgtaaattcagtccctggtttttaattttctgtctgatgtcacagatcattgttgcacacaaacgtggcatagaaaagaacatgttcagaagccatggggccaagcacatgcggggacggtctcaaatgcgtgatcagagaatccttcacctttgctgaaaagttctcagttgagtttttaatctcactttgggtttccttgtgaagttggagggaagtttataatagcctaacactaccccacccccaactaggaggaacctctgttttcaagagagatgcctgtcctgtgcttggatagtcagtcaattatttgtgtatgaaacaatgtacaaatcaatgttttgaaaataatgatctcagactttctaagttaaattttaaaaattttgattgtttgccatattgggtgggtttactcttagaatcgcatgctgtagaaatgctcaaaagtgcatatgggactcagtccttaggtgttctttttcttttaagaaataacctcttacagttgtaaccattgcggctctgtccacttctcgttgctgctctgtggcacatatcggaagcagtacagcgcgcggctctacacgcttgggtagcgggataagtcactgttttctttatttctttaaaaaaaaaaaagttctgttgcaaacgactgctgttggattctgagggtggggagggagagagagggagggagagggagtgaagagcctgccctcctatatggattcttcagggccctccacatctgaggtggctcattcccatcacacacagattgtcctggtgttcatttcaaggccagtgttcagcagcagcgtttggaaagcaggttctgtgggaccccccgccccgccccccgcactccttcatagcagcagtagtggcttctccatcctgttttctgcaacattctatacaaaactgtgctgtgaccttgcggtaggcctggatctggcaaagagaatacaaatgaaaccccttctttctctttccgtccaacaactctgtagagctctctgcacccttacccctttccaccttttgtatttaattttaaagtcagtgtactgcaaggaagctggatgcaagatagatactatattaaactgtactgttatttaagatgtaataaagcagtttgacatgagggaaaaaaaaaaaacaaaaaaaaaaaaa

SEQ ID NO: 308717 - DNA, 3419 bp, Homo sapiens
aggctggggcttgtggtttttgtgagctgggagctgggctggggagttgttggagctgttggtgcctggtgatgttgatgcatgccgccgcggcgggactggaccgagcctcgccggcgcgcacctgcccgcagcgcccgcggagcgcgcagcgcggcccgagcgcgacgacctgccgagcggcggccgaggcggcggtgtgggcgcgtcaggccgcgacgagggcgctgagacaaatttacatgtattggagaccagaccagaagcccttctgaattaagatctcacattcttgaaggtggcattgaagagcactaagatcggaagatgagtgagcttgaccagttacggcaggaggccgagcaacttaagaaccagattcgagacgccaggaaagcatgtgcagatgcaactctctctcagatcacaaacaacatcgacccagtgggaagaatccaaatgcgcacgaggaggacactgcgggggcacctggccaagatctacgccatgcactggggcacagactccaggcttctcgtcagtgcctcgcaggatggtaaacttatcatctgggacagctacaccaccaacaaggtccacgccatccctctgcgctcctcctgggtcatgacctgtgcatatgccccttctgggaactatgtggcctgcggtggcctggataacatttgctccatttacaatctgaaaactcgtgaggggaacgtgcgcgtgagtcgtgagctggcaggacacacaggttacctgtcctgctgccgattcctggatgacaatcagatcgtcaccagctctggagacaccacgtgtgccctgtgggacatcgagaccggccagcagacgaccacgtttaccggacacactggagatgtcatgagcctttctcttgctcctgacaccagactgttcgtctctggtgcttgtgatgcttcagccaaactctgggatgtgcgagaaggcatgtgccggcagaccttcactggccacgagtctgacatcaatgccatttgcttctttccaaatggcaatgcatttgccactggctcagacgacgccacctgcaggctgtttgaccttcgtgctgaccaggagctcatgacttactcccatgacaacatcatctgcgggatcacctctgtctccttctccaagagcgggcgcctcctccttgctgggtacgacgacttcaactgcaacgtctgggatgcactcaaagccgaccgggcaggtgtcttggctgggcatgacaaccgcgtcagctgcctgggcgtgactgacgatggcatggctgtggcgacagggtcctgggatagcttcctcaagatctggaactaacgccagtaggtaatgcagcagcccaaatgcccttctctgaggagaactgtgcgtgtttctcatagaacatttgaagttgtcattaacggtttctagataaatgttgatgtagcattgatttggaattgtgttgtgggaaacgtttacagaaagctgaagtcacgtgccctcagctgcagacactcatgcagtgatgggaagagcagtgacctggctgtgcgtctgcacttagattctctgcctcttttcacatttctttaaactctgtttaaaacacatgtggatgccatggagactggaagaccattccaacttggacgcgttaccatgagagcatatcctatccaaccgtactaacgtggacaccctacacctcccctcagaacttcaaaagggcaagatcttttttccttcacttattgctgaaaccaagagcacaattcccattgagagaaagatctctgtgctgtaaactaaaacaaattgtgcattccttccggggccatcgtctttgttttcttttttgtcttgaatgaattttaaaaggaaatatataataaaaatgttaaccagaaggtaaacttgagtgtaattgtcagacagacacacttttccaccagtgtatttgaattttagaccagtgaccctgttttgtggcattcatgcaaaacatgctgagggctttgttcatctggtcatcgtgtccaaatttcagtcatgtttgtagcaagattttggaagcattcatatttcctttttaaaatgtattcctttgtgttcaacagttaatcaaaaccagagagtctagggcagcctctctgatgttgtcaatgatgtaaattcagtccctggtttttaattttctgtctgatgtcacagatcattgttgcacacaaacgtggcatagaaaagaacatgttcagaagccatggggccaagcacatgcggggacggtctcaaatgcgtgatcagagaatccttcacctttgctgaaaagtgagctcagatccagcaccatgttcctcctgacccatcctgtctatcttctcagttgagtttttaatctcactttgggtttccttgtgaagttggagggaagtttataatagcctaacactaccccacccccaactaggaggaacctctgttttcaagagagatgcctgtcctgtgcttggatagtcagtcaattatttgtgtatgaaacaatgtacaaatcaatgttttgaaaataatgatctcagactttctaagttaaattttaaaaattttgattgtttgccatattgggtgggtttactcttagaatcgcatgctgtagaaatgctcaaaagtgcatatgggactcagtccttaggtgttctttttcttttaagaaataacctcttacagttgtaaccattgcggctctgtccacttctcgttgctgctctgtggcacatatcggaagcagtacagcgcgcggctctacacgcttgggtagcgggataagtcactgttttctttatttctttaaaaaaaaaaaagttctgttgcaaacgactgctgttggattctgagggtggggagggagagagagggagggagagggagtgaagagcctgccctcctatatggattcttcagggccctccacatctgaggtggctcattcccatcacacacagattgtcctggtgttcatttcaaggccagtgttcagcagcagcgtttggaaagcaggttctgtgggaccccccgccccgccccccgcactccttcatagcagcagtagtggcttctccatcctgttttctgcaacattctatacaaaactgtgctgtgaccttgcggtaggcctggatctggcaaagagaatacaaatgaaaccccttctttctctttccgtccaacaactctgtagagctctctgcacccttacccctttccaccttttgtatttaattttaaagtcagtgtactgcaaggaagctggatgcaagatagatactatattaaactgtactgttatttaagatgtaataaagcagtttgacatgagggaaaaaaaaaaaacaaaaaaaaaaaaa

SEQ ID NO: 308718 - DNA, 3173 bp, Homo sapiens
aggctggggcttgtggtttttgtgagctgggagctgggctggggagttgttggagctgttggtgcctggtgatgttgatgcatgccgccgcggcgggactggaccgagcctcgccggcgcgcacctgcccgcagcgcccgcggagcgcgcagcgcggcccgagcgcgacgacctgccgagcggcggccgaggcggcggtgtgggcgcgtcaggccgcgacgagggcgctgagacaaatttacatgtattggagaccagaccagaagcccttctgaattaagatctcacattcttgaaggtggcattgaagagcactaagatcggaagatgagtgagcttgaccagttacggcaggaggccgagcaacttaagaaccagattcgagacgccaggaaagcatgtgcagatgcaactctctctcagatcacaaacaacatcgacccagtgggaagaatccaaatgcgcacgaggaggacactgcgggggcacctggccaagatctacgccatgcactggggcacagactccaggcttctcgtcagtgcctcgcaggatggtaaacttatcatctgggacagctacaccaccaacaaggtccacgccatccctctgcgctcctcctgggtcatgacctgtgcatatgccccttctgggaactatgtggcctgcggtggcctggataacatttgctccatttacaatctgaaaactcgtgaggggaacgtgcgcgtgagtcgtgagctggcaggacacacaggttacctgtcctgctgccgattcctggatgacaatcagatcgtcaccagctctggagacaccacgtgtgccctgtgggacatcgagaccggccagcagacgaccacgtttaccggacacactggagatgtcatgagcctttctcttgctcctgacaccagactgttcgtctctggtgcttgtgatgcttcagccaaactctgggatgtgcgagaaggcatgtgccggcagaccttcactggccacgagtctgacatcaatgccatttgcttctttccaaatggcaatgcatttgccactggctcagacgacgccacctgcaggctgtttgaccttcgtgctgaccaggagctcatgacttactcccatgacaacatcatctgcgggatcacctctgtctccttctccaagagcgggcgcctcctccttgctgggtacgacgacttcaactgcaacgtctgggatgcactcaaagccgaccgggcaggtgtcttggctgggcatgacaaccgcgtcagctgcctgggcgtgactgacgatggcatggctgtggcgacagggtcctgggatagcttcctcaagatctggaactaacgccagtagcatgtggatgccatggagactggaagaccattccaacttggacgcgttaccatgagagcatatcctatccaaccgtactaacgtggacaccctacacctcccctcagaacttcaaaagggcaagatcttttttccttcacttattgctgaaaccaagagcacaattcccattgagagaaagatctctgtgctgtaaactaaaacaaattgtgcattccttccggggccatcgtctttgttttcttttttgtcttgaatgaattttaaaaggaaatatataataaaaatgttaaccagaaggtaaacttgagtgtaattgtcagacagacacacttttccaccagtgtatttgaattttagaccagtgaccctgttttgtggcattcatgcaaaacatgctgagggctttgttcatctggtcatcgtgtccaaatttcagtcatgtttgtagcaagattttggaagcattcatatttcctttttaaaatgtattcctttgtgttcaacagttaatcaaaaccagagagtctagggcagcctctctgatgttgtcaatgatgtaaattcagtccctggtttttaattttctgtctgatgtcacagatcattgttgcacacaaacgtggcatagaaaagaacatgttcagaagccatggggccaagcacatgcggggacggtctcaaatgcgtgatcagagaatccttcacctttgctgaaaagtgagctcagatccagcaccatgttcctcctgacccatcctgtctatcttctcagttgagtttttaatctcactttgggtttccttgtgaagttggagggaagtttataatagcctaacactaccccacccccaactaggaggaacctctgttttcaagagagatgcctgtcctgtgcttggatagtcagtcaattatttgtgtatgaaacaatgtacaaatcaatgttttgaaaataatgatctcagactttctaagttaaattttaaaaattttgattgtttgccatattgggtgggtttactcttagaatcgcatgctgtagaaatgctcaaaagtgcatatgggactcagtccttaggtgttctttttcttttaagaaataacctcttacagttgtaaccattgcggctctgtccacttctcgttgctgctctgtggcacatatcggaagcagtacagcgcgcggctctacacgcttgggtagcgggataagtcactgttttctttatttctttaaaaaaaaaaaagttctgttgcaaacgactgctgttggattctgagggtggggagggagagagagggagggagagggagtgaagagcctgccctcctatatggattcttcagggccctccacatctgaggtggctcattcccatcacacacagattgtcctggtgttcatttcaaggccagtgttcagcagcagcgtttggaaagcaggttctgtgggaccccccgccccgccccccgcactccttcatagcagcagtagtggcttctccatcctgttttctgcaacattctatacaaaactgtgctgtgaccttgcggtaggcctggatctggcaaagagaatacaaatgaaaccccttctttctctttccgtccaacaactctgtagagctctctgcacccttacccctttccaccttttgtatttaattttaaagtcagtgtactgcaaggaagctggatgcaagatagatactatattaaactgtactgttatttaagatgtaatacaaaaggtggaaaggggtaaggctgcagagagctctacagagttgttggacggaagaggagagtgg

SEQ ID NO: 308719 - DNA, 3089 bp, Homo sapiens
aggctggggcttgtggtttttgtgagctgggagctgggctggggagttgttggagctgttggtgcctggtgatgttgatgcatgccgccgcggcgggactggaccgagcctcgccggcgcgcacctgcccgcagcgcccgcggagcgcgcagcgcggcccgagcgcgacgacctgccgagcggcggccgaggcggcggtgtgggcgcgtcaggccgcgacgagggcgctgagacaaatttacatgtattggagaccagaccagaagcccttctgaattaagatctcacattcttgaaggtggcattgaagagcactaagatcggaagatgagtgagcttgaccagttacggcaggaggccgagcaacttaagaaccagattcgagacgccaggaaagcatgtgcagatgcaactctctctcagatcacaaacaacatcgacccagtgggaagaatccaaatgcgcacgaggaggacactgcgggggcacctggccaagatctacgccatgcactggggcacagactccaggcttctcgtcagtgcctcgcaggatggtaaacttatcatctgggacagctacaccaccaacaaggtccacgccatccctctgcgctcctcctgggtcatgacctgtgcatatgccccttctgggaactatgtggcctgcggtggcctggataacatttgctccatttacaatctgaaaactcgtgaggggaacgtgcgcgtgagtcgtgagctggcaggacacacaggttacctgtcctgctgccgattcctggatgacaatcagatcgtcaccagctctggagacaccacgtgtgccctgtgggacatcgagaccggccagcagacgaccacgtttaccggacacactggagatgtcatgagcctttctcttgctcctgacaccagactgttcgtctctggtgcttgtgatgcttcagccaaactctgggatgtgcgagaaggcatgtgccggcagaccttcactggccacgagtctgacatcaatgccatttgcttctttccaaatggcaatgcatttgccactggctcagacgacgccacctgcaggctgtttgaccttcgtgctgaccaggagctcatgacttactcccatgacaacatcatctgcgggatcacctctgtctccttctccaagagcgggcgcctcctccttgctgggtacgacgacttcaactgcaacgtctgggatgcactcaaagccgaccgggcaggtgtcttggctgggcatgacaaccgcgtcagctgcctgggcgtgactgacgatcatgtggatgccatggagactggaagaccattccaacttggacgcgttaccatgagagcatatcctatccaaccgtactaacgtggacaccctacacctcccctcagaacttcaaaagggcaagatcttttttccttcacttattgctgaaaccaagagcacaattcccattgagagaaagatctctgtgctgtaaactaaaacaaattgtgcattccttccggggccatcgtctttgttttcttttttgtcttgaatgaattttaaaaggaaatatataataaaaatgttaaccagaaggtaaacttgagtgtaattgtcagacagacacacttttccaccagtgtatttgaattttagaccagtgaccctgttttgtggcattcatgcaaaacatgctgagggctttgttcatctggtcatcgtgtccaaatttcagtcatgtttgtagcaagattttggaagcattcatatttcctttttaaaatgtattcctttgtgttcaacagttaatcaaaaccagagagtctagggcagcctctctgatgttgtcaatgatgtaaattcagtccctggtttttaattttctgtctgatgtcacagatcattgttgcacacaaacgtggcatagaaaagaacatgttcagaagccatggggccaagcacatgcggggacggtctcaaatgcgtgatcagagaatccttcacctttgctgaaaagtgagctcagatccagcaccatgttcctcctgacccatcctgtctatcttctcagttgagtttttaatctcactttgggtttccttgtgaagttggagggaagtttataatagcctaacactaccccacccccaactaggaggaacctctgttttcaagagagatgcctgtcctgtgcttggatagtcagtcaattatttgtgtatgaaacaatgtacaaatcaatgttttgaaaataatgatctcagactttctaagttaaattttaaaaattttgattgtttgccatattgggtgggtttactcttagaatcgcatgctgtagaaatgctcaaaagtgcatatgggactcagtccttaggtgttctttttcttttaagaaataacctcttacagttgtaaccattgcggctctgtccacttctcgttgctgctctgtggcacatatcggaagcagtacagcgcgcggctctacacgcttgggtagcgggataagtcactgttttctttatttctttaaaaaaaaaaaagttctgttgcaaacgactgctgttggattctgagggtggggagggagagagagggagggagagggagtgaagagcctgccctcctatatggattcttcagggccctccacatctgaggtggctcattcccatcacacacagattgtcctggtgttcatttcaaggccagtgttcagcagcagcgtttggaaagcaggttctgtgggaccccccgccccgccccccgcactccttcatagcagcagtagtggcttctccatcctgttttctgcaacattctatacaaaactgtgctgtgaccttgcggtaggcctggatctggcaaagagaatacaaatgaaaccccttctttctctttccgtccaacaactctgtagagctctctgcacccttacccctttccaccttttgtatttaattttaaagtcagtgtactgcaaggaagctggatgcaagatagatactatattaaactgtactgttatttaagatgtaataaagcagtttgacatgagggaaaaaaaaaaaacaaaaaaaaaaaaa

SEQ ID NO: 308720 - DNA, 3063 bp, Homo sapiens
aggctggggcttgtggtttttgtgagctgggagctgggctggggagttgttggagctgttggtgcctggtgatgttgatgcatgccgccgcggcgggactggaccgagcctcgccggcgcgcacctgcccgcagcgcccgcggagcgcgcagcgcggcccgagcgcgacgacctgccgagcggcggccgaggcggcggtgtgggcgcgtcaggccgcgacgagggcgctgagacaaatttacatgtattggagaccagaccagaagcccttctgaattaagatctcacattcttgaaggtggcattgaagagcactaagatcggaagatgagtgagcttgaccagttacggcaggaggccgagcaacttaagaaccagattcgagacgccaggaaagcatgtgcagatgcaactctctctcagatcacaaacaacatcgacccagtgggaagaatccaaatgcgcacgaggaggacactgcgggggcacctggccaagatctacgccatgcactggggcacagactccaggcttctcgtcagtgcctcgcaggatggtaaacttatcatctgggacagctacaccaccaacaaggtccacgccatccctctgcgctcctcctgggtcatgacctgtgcatatgccccttctgggaactatgtggcctgcggtggcctggataacatttgctccatttacaatctgaaaactcgtgaggggaacgtgcgcgtgagtcgtgagctggcaggacacacaggttacctgtcctgctgccgattcctggatgacaatcagatcgtcaccagctctggagacaccacgtgtgccctgtgggacatcgagaccggccagcagacgaccacgtttaccggacacactggagatgtcatgagcctttctcttgctcctgacaccagactgttcgtctctggtgcttgtgatgcttcagccaaactctgggatgtgcgagaaggcatgtgccggcagaccttcactggccacgagtctgacatcaatgccatttgcttctttccaaatggcaatgcatttgccactggctcagacgacgccacctgcaggctgtttgaccttcgtgctgaccaggagctcatgacttactcccatgacaacatcatctgcgggatcacctctgtctccttctccaagagcgggcgcctcctccttgctgggtacgacgacttcaactgcaacgtctgggatgcactcaaagccgaccgggcaggtgtcttggctgggcatgacaaccgcgtcagctgcctgggcgtgactgacgatggcatggctgtggcgacagggtcctgggatagcttcctcaagatctggaactaacgccagtagcatgtggatgccatggagactggaagaccattccaacttggacgcgttaccatgagagcatatcctatccaaccgtactaacgtggacaccctacacctcccctcagaacttcaaaagggcaagatcttttttccttcacttattgctgaaaccaagagcacaattcccattgagagaaagatctctgtgctgtaaactaaaacaaattgtgcattccttccggggccatcgtctttgttttcttttttgtcttgaatgaattttaaaaggaaatatataataaaaatgttaaccagaaggtaaacttgagtgtaattgtcagacagacacacttttccaccagtgtatttgaattttagaccagtgaccctgttttgtggcattcatgcaaaacatgctgagggctttgttcatctggtcatcgtgtccaaatttcagtcatgtttgtagcaagattttggaagcattcatatttcctttttaaaatgtattcctttgtgttcaacagttaatcaaaaccagagagtctagggcagcctctctgatgttgtcaatgatgtaaattcagtccctggtttttaattttctgtctgatgtcacagatcattgttgcacacaaacgtggcatagaaaagaacatgttcagaagccatggggccaagcacatgcggggacggtctcaaatgcgtgatcagagaatccttcacctttgctgaaaagtgagctcagatccagcaccatgttcctcctgacccatcctgtctatcttctcagttgagtttttaatctcactttgggtttccttgtgaagttggagggaagtttataatagcctaacactaccccacccccaactaggaggaacctctgttttcaagagagatgcctgtcctgtgcttggatagtcagtcaattatttgtgtatgaaacaatgtacaaatcaatgttttgaaaataatgatctcagactttctaagttaaattttaaaaattttgattgtttgccatattgggtgggtttactcttagaatcgcatgctgtagaaatgctcaaaagtgcatatgggactcagtccttaggtgttctttttcttttaagaaataacctcttacagttgtaaccattgcggctctgtccacttctcgttgctgctctgtggcacatatcggaagcagtacagcgcgcggctctacacgcttgggtagcgggataagtcactgttttctttatttctttaaaaaaaaaaaagttctgttgcaaacgactgctgttggattctgagggtggggagggagagagagggagggagagggagtgaagagcctgccctcctatatggattcttcagggccctccacatctgaggtggctcattcccatcaccgcactccttcatagcagcagtagtggcttctccatcctgttttctgcaacattctatacaaaactgtgctgtgaccttgcggtaggcctggatctggcaaagagaatacaaatgaaaccccttctttctctttccgtccaacaactctgtagagctctctgcacccttacccctttccaccttttgtatttaattttaaagtcagtgtactgcaaggaagctggatgcaagatagatactatattaaactgtactgttatttaagatgtaataaagcagtttgacatgagggaaaaaaaaaaaacaaaaaaaaaaaaa

SEQ ID NO: 308721 - DNA, 2888 bp, Homo sapiens
aggctggggcttgtggtttttgtgagctgggagctgggctggggagttgttggagctgttggtgcctggtgatgttgatgcatgccgccgcggcgggactggaccgagcctcgccggcgcgcacctgcccgcagcgcccgcggagcgcgcagcgcggcccgagcgcgacgacctgccgagcggcggccgaggcggcggtgtgggcgcgtcaggccgcgacgagggcgctgagacaaatttacatgtattggagaccagaccagaagcccttctgaattaagatctcacattcttgaaggtggcattgaagagcactaagatcggaagatgagtgagcttgaccagttacggcaggaggccgagcaacttaagaaccagattcgagacgccaggaaagcatgtgcagatgcaactctctctcagatcacaaacaacatcgacccagtgggaagaatccaaatgcgcacgaggaggacactgcgggggcacctggccaagatctacgccatgcactggggcacagactccaggcttctcgtcagtgcctcgcaggatggtaaacttatcatctgggacagctacaccaccaacaaggtccacgccatccctctgcgctcctcctgggtcatgacctgtgcatatgccccttctgggaactatgtggcctgcggtggcctggataacatttgctccatttacaatctgaaaactcgtgaggggaacgtgcgcgtgagtcgtgagctggcaggacacacaggttacctgtcctgctgccgattcctggatgacaatcagatcgtcaccagctctggagacaccacgtgtgccctgtgggacatcgagaccggccagcagacgaccacgtttaccggacacactggagatgtcatgagcctttctcttgctcctgacaccagactgttcgtctctggtgcttgtgatgcttcagccaaactctgggatgtgcgagaaggcatgtgccggcagaccttcactggccacgagtctgacatcaatgccatttgcttctttccaaatggcaatgcatttgccactggctcagacgacgccacctgcaggctgtttgaccttcgtgctgaccaggagctcatgacttactcccatgacaacatcatctgcgggatcacctctgtctccttctccaagagcgggcgcctcctccttgctgggtacgacgacttcaactgcaacgtctgggatgcactcaaagccgaccgggcaggtgtcttggctgggcatgacaaccgcgtcagctgcctgggcgtgactgacgatggcatggctgtggcgacagggtcctgggatagcttcctcaagatctggaactaacgccagtagcatgtggatgccatggagactggaagaccattccaacttggacgcgttaccatgagagcatatcctatccaaccgtactaacgtggacaccctacacctcccctcagaacttcaaaagggcaagatcttttttccttcacttattgctgaaaccaagagcacaattcccattgagagaaagatctctgtgctgtaaactaaaacaaattgtgcattccttccggggccatcgtctttgttttcttttttgtcttgaatgaattttaaaaggaaatatataataaaaatgttaaccagaaggtaaacttgagtgtaattgtcagacagacacacttttccaccagtgtatttgaattttagaccagtgaccctgttttgtggcattcatgcaaaacatgctgagggctttgttcatctggtcatcgtgtccaaatttcagtcatgtttgtagcaagattttggaagcattcatatttcctttttaaaatgtattcctttgtgttcaacagttaatcaaaaccagagagtctagggcagcctctctgatgttgtcaatgatgtaaattcagtccctggtttttaattttctgtctgatgtcacagatcattgttgcacacaaacgtggcatagaaaagaacatgttcagaagccatggggccaagcacatgcggggacggtctcaaatgcgtgatcagagaatccttcacctttgctgaaaagtgagctcagatccagcaccatgttcctcctgacccatcctgtctatcttctcagttgagtttttaatctcactttgggtttccttgtgaagttggagggaagtttataatagcctaacactaccccacccccaactaggaggaacctctgttttcaagagagatgcctgtcctgtgcttggatagtcagtcaattatttgtgtatgaaacaatgtacaaatcaatgttttgaaaataatgatctcagactttctaagttaaattttaaaaattttgattgtttgccatattgggtgggtttactcttagaatcgcatgctgtagaaatgctcaaaagtgcatatgggactcagtccttaggtgttctttttcttttaagaaataacctcttacagttgtaaccattgcggctctgtccacttctcgttgctgctctgtggcacatatcggaagcagtacagcgcgcggctctacacgcttgggtagcgggataagtcactgttttctttatttctttaaaaaaaaaaaagttctgttgcaaacgactgctgttggattctgagggtggggagggagagagagggagggagagggagtgaagagcctgccctcctatatggattcttcagggccctccacatctgaggtggctcattcccatcacacacagattgtcctggtgttcatttcaaggccagtgttcagcagcagcgtttggaaagcaggttctgtgggaccccccgccccgcccccgttcagtcattgatttgtcttcttctctatctcatgtggttcgtctacattctag

SEQ ID NO: 308722 - DNA, 3060 bp, Homo sapiens
aggctggggcttgtggtttttgtgagctgggagctgggctggggagttgttggagctgttggtgcctggtgatgttgatgcatgccgccgcggcgggactggaccgagcctcgccggcgcgcacctgcccgcagcgcccgcggagcgcgcagcgcggcccgagcgcgacgacctgccgagcggcggccgaggcggcggtgtgggcgcgtcaggccgcgacgagggcgctgagacaaatttacatgtattggagaccagaccagaagcccttctgaattaagatctcacattcttgaaggtggcattgaagagcactaagatcggaagatgagtgagcttgaccagttacggcaggaggccgagcaacttaagaaccagattcgagacgccaggaaagcatgtgcagatgcaactctctctcagatcacaaacaacatcgacccagtgggaagaatccaaatgcgcacgaggaggacactgcgggggcacctggccaagatctacgccatgcactggggcacagactccaggcttctcgtcagtgcctcgcaggatggtaaacttatcatctgggacagctacaccaccaacaaggtccacgccatccctctgcgctcctcctgggtcatgacctgtgcatatgccccttctgggaactatgtggcctgcggtggcctggataacatttgctccatttacaatctgaaaactcgtgaggggaacgtgcgcgtgagtcgtgagctggcaggacacacaggttacctgtcctgctgccgattcctggatgacaatcagatcgtcaccagctctggagacaccacgtgtgccctgtgggacatcgagaccggccagcagacgaccacgtttaccggacacactggagatgtcatgagcctttctcttgctcctgacaccagactgttcgtctctggtgcttgtgatgcttcagccaaactctgggatgtgcgagaaggcatgtgccggcagaccttcactggccacgagtctgacatcaatgccatttgcttctttccaaatggcaatgcatttgccactggctcagacgacgccacctgcaggctgtttgaccttcgtgctgaccaggagctcatgacttactcccatgacaacatcatctgcgggatcacctctgtctccttctccaagagcgggcgcctcctccttgctgggtacgacgacttcaactgcaacgtctgggatgcactcaaagccgaccgggcaggtgtcttggctgggcatgacaaccgcgtcagctgcctgggcgtgactgacgatggcatggctgtggcgacagggtcctgggatagcttcctcaagatctggaactaacgccagtagcatgtggatgccatggagactggaagaccattccaacttggacgcgttaccatgagagcatatcctatccaaccgtactaacgtggacaccctacacctcccctcagaacttcaaaagggcaagatcttttttccttcacttattgctgaaaccaagagcacaattcccattgagagaaagatctctgtgctgtaaactaaaacaaattgtgcattccttccggggccatcgtctttgttttcttttttgtcttgaatgaattttaaaaggaaatatataataaaaatgttaaccagaaggtaaacttgagtgtaattgtcagacagacacacttttccaccagtgtatttgaattttagaccagtgaccctgttttgtggcattcatgcaaaacatgctgagggctttgttcatctggtcatcgtgtccaaatttcagtcatgtttgtagcaagattttggaagcattcatatttcctttttaaaatgtattcctttgtgttcaacagttaatcaaaaccagagagtctagggcagcctctctgatgttgtcaatgatgtaaattcagtccctggtttttaattttctgtctgatgtcacagatcattgttgcacacaaacgtggcatagaaaagaacatgttcagaagccatggggccaagcacatgcggggacggtctcaaatgcgtgatcagagaatccttcacctttgctgaaaagtgagctcagatccagcaccatgttcctcctgacccatcctgtctatcttctcagttgagtttttaatctcactttgggtttccttgtgaagttggagggaagtttataatagcctaacactaccccacccccaactaggaggaacctctgttttcaagagagatgcctgtcctgtgcttggatagtcagtcaattatttgtgtatgaaacaatgtacaaatcaatgttttgaaaataatgatctcagactttctaagttaaattttaaaaattttgattgtttgccatattgggtgggtttactcttagaatcgcatgctgtagaaatgctcaaaagtgcatatgggactcagtccttaggtgttctttttcttttaagaaataacctcttacagttgtaaccattgcggctctgtccacttctcgttgctgctctgtggcacatatcggaagcagtacagcgcgcggctctacacgcttgggtagcgggataagtcactgttttctttatttctttaaaaaaaaaaaagttctgttgcaaacgactgctgttggattctgagggtggggagggagagagagggagggagagggagtgaagagcctgccctcctatatggattcttcagggccctccacatctgaggtggctcattcccatcacacacagattgtcctggtgttcatttcaaggccagtgttcagcaggagagagagattctgcccagtcttcaagacagagttcaagatctagagcttccacatagctgtcccgggctactctgacccacagggcttcccctcgtgacccctctgaggtcttggggtttaactgggctttcactacgcattcattattgggttatatggttatatttaataagcctaaataaagtacaagcaactcaaaagaagggatgaatatggcggggcacaggggctcacgccttaaatcccagggtggagagaggggtaccgag

SEQ ID NO: 308723 - DNA, 2812 bp, Homo sapiens
aggctggggcttgtggtttttgtgagctgggagctgggctggggagttgttggagctgttggtgcctggtgatgttgatgcatgccgccgcggcgggactggaccgagcctcgccggcgcgcacctgcccgcagcgcccgcggagcgcgcagcgcggcccgagcgcgacgacctgccgagcggcggccgaggcggcggtgtgggcgcgtcaggccgcgacgagggcgctgagacaaatttacatgtattggagaccagaccagaagcccttctgaattaagatctcacattcttgaaggtggcattgaagagcactaagatcggaagatgagtgagcttgaccagttacggcaggaggccgagcaacttaagaaccagattcgagacgccaggaaagcatgtgcagatgcaactctctctcagatcacaaacaacatcgacccagtgggaagaatccaaatgcgcacgaggaggacactgcgggggcacctggccaagatctacgccatgcactggggcacagactccaggcttctcgtcagtgcctcgcaggatggtaaacttatcatctgggacagctacaccaccaacaaggtccacgccatccctctgcgctcctcctgggtcatgacctgtgcatatgccccttctgggaactatgtggcctgcggtggcctggataacatttgctccatttacaatctgaaaactcgtgaggggaacgtgcgcgtgagtcgtgagctggcaggacacacaggttacctgtcctgctgccgattcctggatgacaatcagatcgtcaccagctctggagacaccacgtgtgccctgtgggacatcgagaccggccagcagacgaccacgtttaccggacacactggagatgtcatgagcctttctcttgctcctgacaccagactgttcgtctctggtgcttgtgatgcttcagccaaactctgggatgtgcgagaaggcatgtgccggcagaccttcactggccacgagtctgacatcaatgccatttgcttctttccaaatggcaatgcatttgccactggctcagacgacgccacctgcaggctgtttgaccttcgtgctgaccaggagctcatgacttactcccatgacaacatcatctgcgggatcacctctgtctccttctccaagagcgggcgcctcctccttgctgggtacgacgacttcaactgcaacgtctgggatgcactcaaagccgaccgggcaggtgtcttggctgggcatgacaaccgcgtcagctgcctgggcgtgactgacgatggcatggctgtggcgacagggtcctgggatagcttcctcaagatctggaactaacgccagtagcatgtggatgccatggagactggaagaccattccaacttggacgcgttaccatgagagcatatcctatccaaccgtactaacgtggacaccctacacctcccctcagaacttcaaaagggcaagatcttttttccttcacttattgctgaaaccaagagcacaattcccattgagagaaagatctctgtgctgtaaactaaaacaaattgtgcattccttccggggccatcgtctttgttttcttttttgtcttgaatgaattttaaaaggaaatatataataaaaatgttaaccagaaggtaaacttgagtgtaattgtcagacagacacacttttccaccagtgtatttgaattttagaccagtgaccctgttttgtggcattcatgcaaaacatgctgagggctttgttcatctggtcatcgtgtccaaatttcagtcatgtttgtagcaagattttggaagcattcatatttcctttttaaaatgtattcctttgtgttcaacagttaatcaaaaccagagagtctagggcagcctctctgatgttgtcaatgatgtaaattcagtccctggtttttaattttctgtctgatgtcacagatcattgttgcacacaaacgtggcatagaaaagaacatgttcagaagccatggggccaagcacatgcggggacggtctcaaatgcgtgatcagagaatccttcacctttgctgaaaagtgagctcagatccagcaccatgttcctcctgacccatcctgtctatcttctcagttgagtttttaatctcactttgggtttccttgtgaagttggagggaagtttataatagcctaacactaccccacccccaactaggaggaacctctgttttcaagagagatgcctgtcctgtgcttggatagtcagtcaattatttgtgtatgaaacaatgtacaaatcaatgttttgaaaataatgatctcagactttctaagttaaattttaaaaattttgattgtttgccatattgggtgggtttactcttagaatcgcatgctgtagaaatgctcaaaagtgcatatgggactcagtccttaggtgttctttttcttttaagaaataacctcttacagttgtaaccattgcggctctgtccacttctcgttgctgctctgtggcacatatcggaagcagtacagcgcgcggctctacacgcttgggtagcgggataagtcactgttttctttatttctttaaaaaaaaaaaagttctgttgcaaacgactgctgttggattctgagggtggggagggagagagagggagggagagggagtgaagagcctgccctcctatatggattcttcagggccctccacatctgaggtggctcattcccatcacacctgctttccaaacctgctgctgaacactggccttgaaatgaacaccaggacaatctgtggtcgagc

SEQ ID NO: 308724 - DNA, 3123 bp, Homo sapiens
aggctggggcttgtggtttttgtgagctgggagctgggctggggagttgttggagctgttggtgcctggtgatgttgatgcatgccgccgcggcgggactggaccgagcctcgccggcgcgcacctgcccgcagcgcccgcggagcgcgcagcgcggcccgagcgcgacgacctgccgagcggcggccgaggcggcggtgtgggcgcgtcaggccgcgacgagggcgctgagacaaatttacatgtattggagaccagaccagaagcccttctgaattaagatctcacattcttgaaggtggcattgaagagcactaagatcggaagatgagtgagcttgaccagttacggcaggaggccgagcaacttaagaaccagattcgagacgccaggaaagcatgtgcagatgcaactctctctcagatcacaaacaacatcgacccagtgggaagaatccaaatgcgcacgaggaggacactgcgggggcacctggccaagatctacgccatgcactggggcacagactccaggcttctcgtcagtgcctcgcaggatggtaaacttatcatctgggacagctacaccaccaacaaggtccacgccatccctctgcgctcctcctgggtcatgacctgtgcatatgccccttctgggaactatgtggcctgcggtggcctggataacatttgctccatttacaatctgaaaactcgtgaggggaacgtgcgcgtgagtcgtgagctggcaggacacacaggttacctgtcctgctgccgattcctggatgacaatcagatcgtcaccagctctggagacaccacgtgtgccctgtgggacatcgagaccggccagcagacgaccacgtttaccggacacactggagatgtcatgagcctttctcttgctcctgacaccagactgttcgtctctggtgcttgtgatgcttcagccaaactctgggatgtgcgagaaggcatgtgccggcagaccttcactggccacgagtctgacatcaatgccatttgcttctttccaaatggcaatgcatttgccactggctcagacgacgccacctgcaggctgtttgaccttcgtgctgaccaggagctcatgacttactcccatgacaacatcatctgcgggatcacctctgtctccttctccaagagcgggcgcctcctccttgctgggtacgacgacttcaactgcaacgtctgggatgcactcaaagccgaccgggcaggtgtcttggctgggcatgacaaccgcgtcagctgcctgggcgtgactgacgatggcatggctgtggcgacagggtcctgggatagcttcctcaagatctggaactaacgccagtagcatgtggatgccatggagactggaagaccattccaacttggacgcgttaccatgagagcatatcctatccaaccgtactaacgtggacaccctacacctcccctcagaacttcaaaagggcaagatcttttttccttcacttattgctgaaaccaagagcacaattcccattgagagaaagatctctgtgctgtaaactaaaacaaattgtgcattccttccggggccatcgtctttgttttcttttttgtcttgaatgaattttaaaaggaaatatataataaaaatgttaaccagaaggtaaacttgagtgtaattgtcagacagacacacttttccaccagtgtatttgaattttagaccagtgaccctgttttgtggcattcatgcaaaacatgctgagggctttgttcatctggtcatcgtgtccaaatttcagtcatgtttgtagcaagattttggaagcattcatatttcctttttaaaatgtattcctttgtgttcaacagttaatcaaaaccagagagtctagggcagcctctctgatgttgtcaatgatgtaaattcagtccctggtttttaattttctgtctgatgtcacagatcattgttgcacacaaacgtggcatagaaaagaacatgttcagaagccatggggccaagcacatgcggggacggtctcaaatgcgtgatcagagaatccttcacctttgctgaaaagtgagctcagatccagcaccatgttcctcctgacccatcctgtctatcttctcagttgagtttttaatctcactttgggtttccttgtgaagttggagggaagtttataatagcctaacactaccccacccccaactaggaggaacctctgttttcaagagagatgcctgtcctgtgcttggatagtcagtcaattatttgtgtatgaaacaatgtacaaatcaatgttttgaaaataatgatctcagactttctaagttaaattttaaaaattttgattgtttgccatattgggtgggtttactcttagaatcgcatgctgtagaaatgctcaaaagtgcatatgggactcagtccttaggtgttctttttcttttaagaaataacctcttacagttgtaaccattgcggctctatatcggaagcagtacagcgcgcggctctacacgcttgggtagcgggataagtcactgttttctttatttctttaaaaaaaaaaaagttctgttgcaaacgactgctgttggattctgagggtggggagggagagagagggagggagagggagtgaagagcctgccctcctatatggattcttcagggccctccacatctgaggtggctcattcccatcacacacagattgtcctggtgttcatttcaaggccagtgttcagcagcagcgtttggaaagcaggttctgtgggaccccccgccccgccccccgcactccttcatagcagcagtagtggcttctccatcctgttttctgcaacattctatacaaaactgtgctgtgaccttgcggtaggcctggatctggcaaagagaatacaaatgaaaccccttctttctctttccgtccaacaactctgtagagctctctgcacccttacccctttccaccttttgtatttaattttaaagtcagtgtactgcaaggaagctggatgcaagatagatactatattaaactgtactgttatttaagatgtaataaagcagtttgacatgagggaaaaaaaaaaaacaaaaaaaaaaaaa

SEQ ID NO: 308725 - DNA, 1814 bp, Homo sapiens
  misc_feature (1)..(1): n is a, c, g, or t
ngagcgcctctatgaggatcccatgtggatgccatggagactggaagaccattccaacttggacgcgttaccatgagagcatatcctatccaaccgtactaacgtggacaccctacacctcccctcagaacttcaaaagggcaagatcttttttccttcacttattgctgaaaccaagagcacaattcccattgagagaaagatctctgtgctgtaaactaaaacaaattgtgcattccttccggggccatcgtctttgttttcttttttgtcttgaatgaattttaaaaggaaatatataataaaaatgttaaccagaaggtaaacttgagtgtaattgtcagacagacacacttttccaccagtgtatttgaattttagaccagtgaccctgttttgtggcattcatgcaaaacatgctgagggctttgttcatctggtcatcgtgtccaaatttcagtcatgtttgtagcaagattttggaagcattcatatttcctttttaaaatgtattcctttgtgttcaacagttaatcaaaaccagagagtctagggcagcctctctgatgttgtcaatgatgtaaattcagtccctggtttttaattttctgtctgatgtcacagatcattgttgcacacaaacgtggcatagaaaagaacatgttcagaagccatggggccaagcacatgcggggacggtctcaaatgcgtgatcagagaatccttcacctttgctgaaaagtgagctcagatccagcaccatgttcctcctgacccatcctgtctatcttctcagttgagtttttaatctcactttgggtttccttgtgaagttggagggaagtttataatagcctaacactaccccacccccaactaggaggaacctctgttttcaagagagatgcctgtcctgtgcttggatagtcagtcaattatttgtgtatgaaacaatgtacaaatcaatgttttgaaaataatgatctcagactttctaagttaaattttaaaaattttgattgtttgccatattgggtgggtttactcttagaatcgcatgctgtagaaatgctcaaaagtgcatatgggactcagtccttaggtgttctttttcttttaagaaataacctcttacagttgtaaccattgcggctctgtccacttctcgttgctgctctgtggcacatatcggaagcagtacagcgcgcggctctacacgcttgggtagcgggataagtcactgttttctttatttctttaaaaaaaaaaaagttctgttgcaaacgactgctgttggattctgagggtggggagggagagagagggagggagagggagtgaagagcctgccctcctatatggattcttcagggccctccacatctgaggtggctcattcccatcacacacagattgtcctggtgttcatttcaaggccagtgttcagcagcagcgtttggaaagcaggttctgtgggaccccccgccccgccccccgcactccttcatagcagcagtagtggcttctccatcctgttttctgcaacattctatacaaaactgtgctgtgaccttgcggtaggcctggatctggcaaagagaatacaaatgaaaccccttctttctctttccgtccaacaactctgtagagctctctgcacccttacccctttccaccttttgtatttaattttaaagtcagtgtactgcaaggaagctggatgcaagatagatactatattaaactgtactgttatttaagatgtaataaagcagtttgacatgagggaaaaaaaaaaaacaaaaaaaaaaaaa

SEQ ID NO: 308726 - DNA, 1578 bp, Homo sapiens
  misc_feature (1)..(1): n is a, c, g, or t
  misc_feature (4)..(4): n is a, c, g, or t
  misc_feature (10)..(10): n is a, c, g, or t
  misc_feature (13)..(14): n is a, c, g, or t
  misc_feature (22)..(22): n is a, c, g, or t
nccnttcctnctnntttcgggnacccttttttcttcgggtttgactgatcaaaaagaaatatataataaaaatgttaaccagaaggtaaacttgagtgtaattgtcagacagacacacttttccaccagtgtatttgaattttagaccagtgaccctgttttgtggcattcatgcaaaacatgctgagggctttgttcatctggtcatcgtgtccaaatttcagtcatgtttgtagcaagattttggaagcattcatatttcctttttaaaatgtattcctttgtgttcaacagttaatcaaaaccagagagtctagggcagcctctctgatgttgtcaatgatgtaaattcagtccctggtttttaattttctgtctgatgtcacagatcattgttgcacacaaacgtggcatagaaaagaacatgttcagaagccatggggccaagcacatgcggggacggtctcaaatgcgtgatcagagaatccttcacctttgctgaaaagtgagctcagatccagcaccatgttcctcctgacccatcctgtctatcttctcagttgagtttttaatctcactttgggtttccttgtgaagttggagggaagtttataatagcctaacactaccccacccccaactaggaggaacctctgttttcaagagagatgcctgtcctgtgcttggatagtcagtcaattatttgtgtatgaaacaatgtacaaatcaatgttttgaaaataatgatctcagactttctaagttaaattttaaaaattttgattgtttgccatattgggtgggtttactcttagaatcgcatgctgtagaaatgctcaaaagtgcatatgggactcagtccttaggtgttctttttcttttaagaaataacctcttacagttgtaaccattgcggctctgtccacttctcgttgctgctctgtggcacatatcggaagcagtacagcgcgcggctctacacgcttgggtagcgggataagtcactgttttctttatttctttaaaaaaaaaaaagttctgttgcaaacgactgctgttggattctgagggtggggagggagagagagggagggagagggagtgaagagcctgccctcctatatggattcttcagggccctccacatctgaggtggctcattcccatcacacacagattgtcctggtgttcatttcaaggccagtgttcagcagcagcgtttggaaagcaggttctgtgggaccccccgccccgccccccgcactccttcatagcagcagtagtggcttctccatcctgttttctgcaacattctatacaaaactgtgctgtgaccttgcggtaggcctggatctggcaaagagaatacaaatgaaaccccttctttctctttccgtccaacaactctgtagagctctctgcacccttacccctttccaccttttgtatttaattttaaagtcagtgtactgcaaggaagctggatgcaagatagatactatattaaactgtactgttatttaagatgtaataaagcagtttgacatgagggaaaaaaaaaaaacaaaaaaaaaaaaa

SEQ ID NO: 308727 - DNA, 2293 bp, Homo sapiens
aggctggggcttgtggtttttgtgagctgggagctgggctggggagttgttggagctgttggtgcctggtgatgttgatgcatgccgccgcggcgggactggaccgagcctcgccggcgcgcacctgcccgcagcgcccgcggagcgcgcagcgcggcccgagcgcgacgacctgccgagcggcggccgaggcggcggtgtgggcgcgtcaggccgcgacgagggcgctgagacaaatttacatgtattggagaccagaccagaagcccttctgaattaagatctcacattcttgaaggtggcattgaagagcactaagatcggaagatgagtgagcttgaccagttacggcaggaggccgagcaacttaagaaccagattcgagacgccaggaaagcatgtgcagatgcaactctctctcagatcacaaacaacatcgacccagtgggaagaatccaaatgcgcacgaggaggacactgcgggggcacctggccaagatctacgccatgcactggggcacagactccaggcttctcgtcagtgcctcgcaggatggtaaacttatcatctgggacagctacaccaccaacaaggtccacgccatccctctgcgctcctcctgggtcatgacctgtgcatatgccccttctgggaactatgtggcctgcggtggcctggataacatttgctccatttacaatctgaaaactcgtgaggggaacgtgcgcgtgagtcgtgagctggcaggacacacaggttacctgtcctgctgccgattcctggatgacaatcagatcgtcaccagctctggagacaccacgtgtgccctgtgggacatcgagaccggccagcagacgaccacgtttaccggacacactggagatgtcatgagcctttctcttgctcctgacaccagactgttcgtctctggtgcttgtgatgcttcagccaaactctgggatgtgcgagaaggcatgtgccggcagaccttcactggccacgagtctgacatcaatgccatttgcttctttccaaatggcaatgcatttgccactggctcagacgacgccacctgcaggctgtttgaccttcgtgctgaccaggagctcatgacttactcccatgacaacatcatctgcgggatcacctctgtctccttctccaagagcgggcgcctcctccttgctgggtacgacgacttcaactgcaacgtctgggatgcactcaaagccgaccgggcaggtgtcttggctgggcatgacaaccgcgtcagctgcctgggcgtgactgacgatggcatggctgtggcgacagggtcctgggatagcttcctcaagatctggaactaacgccagtagcatgtggatgccatggagactggaagaccattccaacttggacgcgttaccatgagagcatatcctatccaaccgtactaacgtggacaccctacacctcccctcagaacttcaaaagggcaagatcttttttccttcacttattgctgaaaccaagagcacaattcccattgagagaaagatctctgtgctgtaaactaaaacaaattgtgcattccttccggggccatcgtctttgttttcttttttgtcttgaatgaattttaaaaggaaatatataataaaaatgttaaccagaaggtaaaatatcggaagcagtacagcgcgcggctctacacgcttgggtagcgggataagtcactgttttctttatttctttaaaaaaaaaaaagttctgttgcaaacgactgctgttggattctgagggtggggagggagagagagggagggagagggagtgaagagcctgccctcctatatggattcttcagggccctccacatctgaggtggctcattcccatcacacacagattgtcctggtgttcatttcaaggccagtgttcagcagcagcgtttggaaagcaggttctgtgggaccccccgccccgccccccgcactccttcatagcagcagtagtggcttctccatcctgttttctgcaacattctatacaaaactgtgctgtgaccttgcggtaggcctggatctggcaaagagaatacaaatgaaaccccttctttctctttccgtccaacaactctgtagagctctctgcacccttacccctttccaccttttgtatttaattttaaagtcagtgtactgcaaggaagctggatgcaagatagatactatattaaactgtactgttatttaagatgtaataaagcagtttgacatgagggaaaaaaaaaaaacaaaaaaaaaaaaa

SEQ ID NO: 308728 - DNA, 2657 bp, Homo sapiens
  misc_feature (2550)..(2550): n is a, c, g, or t
  misc_feature (2564)..(2564): n is a, c, g, or t
  misc_feature (2566)..(2566): n is a, c, g, or t
aggctggggcttgtggtttttgtgagctgggagctgggctggggagttgttggagctgttggtgcctggtgatgttgatgcatgccgccgcggcgggactggaccgagcctcgccggcgcgcacctgcccgcagcgcccgcggagcgcgcagcgcggcccgagcgcgacgacctgccgagcggcggccgaggcggcggtgtgggcgcgtcaggccgcgacgagggcgctgagacaaatttacatgtattggagaccagaccagaagcccttctgaattaagatctcacattcttgaaggtggcattgaagagcactaagatcggaagatgagtgagcttgaccagttacggcaggaggccgagcaacttaagaaccagattcgagacgccaggaaagcatgtgcagatgcaactctctctcagatcacaaacaacatcgacccagtgggaagaatccaaatgcgcacgaggaggacactgcgggggcacctggccaagatctacgccatgcactggggcacagactccaggcttctcgtcagtgcctcgcaggatggtaaacttatcatctgggacagctacaccaccaacaaggtccacgccatccctctgcgctcctcctgggtcatgacctgtgcatatgccccttctgggaactatgtggcctgcggtggcctggataacatttgctccatttacaatctgaaaactcgtgaggggaacgtgcgcgtgagtcgtgagctggcaggacacacaggttacctgtcctgctgccgattcctggatgacaatcagatcgtcaccagctctggagacaccacgtgtgccctgtgggacatcgagaccggccagcagacgaccacgtttaccggacacactggagatgtcatgagcctttctcttgctcctgacaccagactgttcgtctctggtgcttgtgatgcttcagccaaactctgggatgtgcgagaaggcatgtgccggcagaccttcactggccacgagtctgacatcaatgccatttgcttctttccaaatggcaatgcatttgccactggctcagacgacgccacctgcaggctgtttgaccttcgtgctgaccaggagctcatgacttactcccatgacaacatcatctgcgggatcacctctgtctccttctccaagagcgggcgcctcctccttgctgggtacgacgacttcaactgcaacgtctgggatgcactcaaagccgaccgggcaggtgtcttggctgggcatgacaaccgcgtcagctgcctgggcgtgactgacgatggcatggctgtggcgacagggtcctgggatagcttcctcaagatctggaactaacgccagtagcatgtggatgccatggagactggaagaccattccaacttggacgcgttaccatgagagcatatcctatccaaccgtactaacgtggacaccctacacctcccctcagaacttcaaaagggcaagatcttttttccttcacttattgctgaaaccaagagcacaattcccattgagagaaagatctctgtgctgtaaactaaaacaaattgtgcattccttccggggccatcgtctttgttttcttttttgtcttgaatgaattttaaaaggaaatatataataaaaatgttaaccagaaggtaaacttgagtgtaattgtcagacagacacacttttccaccagtgtatttgaattttagaccagtgaccctgttttgtggcattcatgcaaaacatgctgagggctttgttcatctggtcatcgtgtccaaatttcagtcatgtttgtagcaagattttggaagcattcatatttcctttttaaaatgtattcctttgtgttcaacagttaatcaaaaccagagagtctagggcagcctctctgatgttgtcaatgatgtaaattcagtccctggtttttaattttctgtctgatgtcacagatcattgttgcacacaaacgtggcatagaaaagaacatgttcagaagccatggggccaagcacatgcggggacggtctcaaatgcgtgatcagagaatccttcacctttgctgaaaagtgagctcagatccagcaccatgttcctcctgacccatcctgtctatcttctcagttgagtttttaatctcactttgggtttccttgtgaagttggagggaagtttataatagcctaacactaccccacccccaactaggaggaacctctgttttcaagagagatgcctgtcctgtgcttggatagtcagtcaattatttgtgtatgaaacaatgtacaaatcaatgttttgaaaataatgatctcagactttctaagttaaattttaaaaattttgattgtttgccatattgggtgggtttactcttagaatcgcatgctgtagaaatgctcaaaagtgcatatgggactcagtccttaggtgttctttttcttttaagaaataacctcttacagttgtaaccattgcggctctgtccacttctcgttgctgctctgtggcaccattggagacagacagggggctaaccnggagggaaacacgntnttttttaaaaaagggggcaaactcggcacgtccgcttgtagcagcaaataataagcggacagagaagttgacattgtgacaacatatttgg

SEQ ID NO: 308729 - DNA, 2682 bp, Homo sapiens
aggctggggcttgtggtttttgtgagctgggagctgggctggggagttgttggagctgttggtgcctggtgatgttgatgcatgccgccgcggcgggactggaccgagcctcgccggcgcgcacctgcccgcagcgcccgcggagcgcgcagcgcggcccgagcgcgacgacctgccgagcggcggccgaggcggcggtgtgggcgcgtcaggccgcgacgagggcgctgagacaaatttacatgtattggagaccagaccagaagcccttctgaattaagatctcacattcttgaaggtggcattgaagagcactaagatcggaagatgagtgagcttgaccagttacggcaggaggccgagcaacttaagaaccagattcgagacgccaggaaagcatgtgcagatgcaactctctctcagatcacaaacaacatcgacccagtgggaagaatccaaatgcgcacgaggaggacactgcgggggcacctggccaagatctacgccatgcactggggcacagactccaggcttctcgtcagtgcctcgcaggatggtaaacttatcatctgggacagctacaccaccaacaaggtccacgccatccctctgcgctcctcctgggtcatgacctgtgcatatgccccttctgggaactatgtggcctgcggtggcctggataacatttgctccatttacaatctgaaaactcgtgaggggaacgtgcgcgtgagtcgtgagctggcaggacacacaggttacctgtcctgctgccgattcctggatgacaatcagatcgtcaccagctctggagacaccacgtgtgccctgtgggacatcgagaccggccagcagacgaccacgtttaccggacacactggagatgtcatgagcctttctcttgctcctgacaccagactgttcgtctctggtgcttgtgatgcttcagccaaactctgggatgtgcgagaaggcatgtgccggcagaccttcactggccacgagtctgacatcaatgccatttgcttctttccaaatggcaatgcatttgccactggctcagacgacgccacctgcaggctgtttgaccttcgtgctgaccaggagctcatgacttactcccatgacaacatcatctgcgggatcacctctgtctccttctccaagagcgggcgcctcctccttgctgggtacgacgacttcaactgcaacgtctgggatgcactcaaagccgaccgggcaggtgtcttggctgggcatgacaaccgcgtcagctgcctgggcgtgactgacgatggcatggctgtggcgacagggtcctgggatagcttcctcaagatctggaactaacgccagtagcatgtggatgccatggagactggaagaccattccaacttggacgcgttaccatgagagcatatcctatccaaccgtactaacgtggacaccctacacctcccctcagaacttcaaaagggcaagatcttttttccttcacttattgctgaaaccaagagcacaattcccattgagagaaagatctctgtgctgtaaactaaaacaaattgtgcattccttccggggccatcgtctttgttttcttttttgtcttgaatgaattttaaaaggaaatatataataaaaatgttaaccagaaggtaaacttgagtgtaattgtcagacagacacacttttccaccagtgtatttgaattttagaccagtgaccctgttttgtggcattcatgcaaaacatgctgagggctttgttcatctggtcatcgtgtccaaatttcagtcatgtttgtagcaagattttggaagcattcatatttcctttttaaaatgtattcctttgtgttcaacagttaatcaaaaccagagagtctagggcagcctctctgatgttgtcaatgatgtaaattcagtccctggtttttaattttctgtctgatgtcacagatcattgttgcacacaaacgtggcatagaaaagaacatgttcagaagccatggggccaagcacatgcggggacggtctcaaatgcgtgatcagagaatccttcacctttgctgaaaagtgagctcagatccagcaccatgttcctcctgacccatcctgtctatcttctcagttgagtttttaatctcactttgggtttccttgtgaagttggagggaagtttataatagcctaacactaccccacccccaactaggaggaacctctgttttcaagagagatgcctgtcctgtgcttggatagtcagtcaattatttgtgtatgaaacaatgtacaaatcaatgttttgaaaataatgatctcagactttctaagttaaattttaaaaattttgattgtttgccatattgggtgggtttactcttagaatcgcatgctgtagaaatgctcaaaagtgcatatgggactcagtccttaggtgttctttttcttttaagaaataacctcttacagttgtaaccattgcggctctatatcggaagcagtacagcgcgcggctctacacgcttgggtagcgggataagtcactgttttctttatttctttaaaaaaaaaaaagttctgttgcaaacgactgctgttggattctgagggagaggggaggttcctcaagtgtgcggaagcgacacctgcaacagcaccacgattcaccaaggatcc

SEQ ID NO: 308730 - DNA, 1106 bp, Homo sapiens
cggacgcgtgggtcgacccacgcgtccggacccacgagctcagatccagcaccatgttcctcctgacccatcctgtctatcttctcagttgagtttttaatctcactttgggtttccttgtgaagttggagggaagtttataatagcctaacactaccccacccccaactaggaggaacctctgttttcaagagagatgcctgtcctgtgcttggatagtcagtcaattatttgtgtatgaaacaatgtacaaatcaatgttttgaaaataatgatctcagactttctaagttaaattttaaaaattttgattgtttgccatattgggtgggtttactcttagaatcgcatgctgtagaaatgctcaaaagtgcatatgggactcagtccttaggtgttctttttcttttaagaaataacctcttacagttgtaaccattgcggctctgtccacttctcgttgctgctctgtggcacatatcggaagcagtacagcgcgcggctctacacgcttgggtagcgggataagtcactgttttctttatttctttaaaaaaaaaaaagttctgttgcaaacgactgctgttggattctgagggtggggagggagagagagggagggagagggagtgaagagcctgccctcctatatggattcttcagggccctccacatctgaggtggctcattcccatcacacacagattgtcctggtgttcatttcaaggccagtgttcagcagcagcgtttggaaagcaggttctgtgggaccccccgccccgccccccgcactccttcatagcagcagtagtggcttctccatcctgttttctgcaacattctatacaaaactgtgctgtgaccttgcggtaggcctggatctggcaaagagaatacaaatgaaaccccttctttctctttccgtccaacaactctgtagagctctctgcacccttacccctttccaccttttgtatttaattttaaagtcagtgtactgcaaggaagctggatgcaagatagatactatattaaactgtactgttatttaagatgtaataaagcagtttgacatgagggaaaaaaaaaaaacaaaaaaaaaaaaa

SEQ ID NO: 308731 - DNA, 1664 bp, Homo sapiens
aggctggggcttgtggtttttgtgagctgggagctgggctggggagttgttggagctgttggtgcctggtgatgttgatgcatgccgccgcggcgggactggaccgagcctcgccggcgcgcacctgcccgcagcgcccgcggagcgcgcagcgcggcccgagcgcgacgacctgccgagcggcggccgaggcggcggtgtgggcgcgtcaggccgcgacgagggcgctgagacaaatttacatgtattggagaccagaccagaagcccttctgaattaagatctcacattcttgaaggtggcattgaagagcactaagatcggaagatgagtgagcttgaccagttacggcaggaggccgagcaacttaagaaccagattcgagacgccaggaaagcatgtgcagatgcaactctctctcagatcacaaacaacatcgacccagtgggaagaatccaaatgcgcacgaggaggacactgcgggggcacctggccaagatctacgccatgcactggggcacagactccaggcttctcgtcagtgcctcgcaggatggtaaacttatcatctgggacagctacaccaccaacaaggtccacgccatccctctgcgctcctcctgggtcatgacctgtgcatatgccccttctgggaactatgtggcctgcggtggcctggataacatttgctccatttacaatctgaaaactcgtgaggggaacgtgcgcgtgagtcgtgagctggcaggacacacaggttacctgtcctgctgccgattcctggatgacaatcagatcgtcaccagctctggagacaccacgtgtgccctgtgggacatcgagaccggccagcagacgaccacgtttaccggacacactggagatgtcatgagcctttctcttgctcctgacaccagactgttcgtctctggtgcttgtgatgcttcagccaaactctgggatgtgcgagaaggcatgtgccggcagaccttcactggccacgagtctgacatcaatgccatttgcttctttccaaatggcaatgcatttgccactggctcagacgacgccacctgcaggctgtttgaccttcgtgctgaccaggagctcatgacttactcccatgacaacatcatctgcgggatcacctctgtctccttctccaagagcgggcgcctcctccttgctgggtacgacgacttcaactgcaacgtctgggatgcactcaaagccgaccgggcaggtgtcttggctgggcatgacaaccgcgtcagctgcctgggcgtgactgacgatggcatggctgtggcgacagggtcctgggatagcttcctcaagatctggaactaacgccagtagcatgtggatgccatggagactggaagaccattccaacttggacgcgttaccatgagagcatatcctatccaaccgtactaacgtggacaccctacacctcccctcagaacttcaaaagggcaagatcttttttccttcacttattgctgaaaccaagagcacaattcccattgagagaaagatctctgtgctgtaaactaaaacaaattgtgcattccttccggggccatcgtctttgttttcttttttgtcttgaatgaattttaaaaggaaatatataataaaaatgttaaccagaaggtaaa

SEQ ID NO: 308732 - DNA, 1591 bp, Homo sapiens
aggctggggcttgtggtttttgtgagctgggagctgggctggggagttgttggagctgttggtgcctggtgatgttgatgcatgccgccgcggcgggactggaccgagcctcgccggcgcgcacctgcccgcagcgcccgcggagcgcgcagcgcggcccgagcgcgacgacctgccgagcggcggccgaggcggcggtgtgggcgcgtcaggccgcgacgagggcgctgagacaaatttacatgtattggagaccagaccagaagcccttctgaattaagatctcacattcttgaaggtggcattgaagagcactaagatcggaagatgagtgagcttgaccagttacggcaggaggccgagcaacttaagaaccagattcgagacgccaggaaagcatgtgcagatgcaactctctctcagatcacaaacaacatcgacccagtgggaagaatccaaatgcgcacgaggaggacactgcgggggcacctggccaagatctacgccatgcactggggcacagactccaggcttctcgtcagtgcctcgcaggatggtaaacttatcatctgggacagctacaccaccaacaaggtccacgccatccctctgcgctcctcctgggtcatgacctgtgcatatgccccttctgggaactatgtggcctgcggtggcctggataacatttgctccatttacaatctgaaaactcgtgaggggaacgtgcgcgtgagtcgtgagctggcaggacacacaggttacctgtcctgctgccgattcctggatgacaatcagatcgtcaccagctctggagacaccacgtgtgccctgtgggacatcgagaccggccagcagacgaccacgtttaccggacacactggagatgtcatgagcctttctcttgctcctgacaccagactgttcgtctctggtgcttgtgatgcttcagccaaactctgggatgtgcgagaaggcatgtgccggcagaccttcactggccacgagtctgacatcaatgccatttgcttctttccaaatggcaatgcatttgccactggctcagacgacgccacctgcaggctgtttgaccttcgtgctgaccaggagctcatgacttactcccatgacaacatcatctgcgggatcacctctgtctccttctccaagagcgggcgcctcctccttgctgggtacgacgacttcaactgcaacgtctgggatgcactcaaagccgaccgggcaggtgtcttggctgggcatgacaaccgcgtcagctgcctgggcgtgactgacgatggcatggctgtggcgacagggtcctgggatagcttcctcaagatctggaactaacgccagtagcatgtggatgccatggagactggaagaccattccaacttggacgcgttaccatgagagcatatcctatccaaccgtactaacgtggacaccctacacctcccctcagaacttcaaaagggcaagatcttttttccttcacttattgctgaaaccaagagcacaattcccattgagagaaagatctctgtgctgtaaactaaaacaaattgtgcattccttccggggccatcg

SEQ ID NO: 308733 - DNA, 1690 bp, Homo sapiens
  misc_feature (1635)..(1635): n is a, c, g, or t
aggctggggcttgtggtttttgtgagctgggagctgggctggggagttgttggagctgttggtgcctggtgatgttgatgcatgccgccgcggcgggactggaccgagcctcgccggcgcgcacctgcccgcagcgcccgcggagcgcgcagcgcggcccgagcgcgacgacctgccgagcggcggccgaggcggcggtgtgggcgcgtcaggccgcgacgagggcgctgagacaaatttacatgtattggagaccagaccagaagcccttctgaattaagatctcacattcttgaaggtggcattgaagagcactaagatcggaagatgagtgagcttgaccagttacggcaggaggccgagcaacttaagaaccagattcgagacgccaggaaagcatgtgcagatgcaactctctctcagatcacaaacaacatcgacccagtgggaagaatccaaatgcgcacgaggaggacactgcgggggcacctggccaagatctacgccatgcactggggcacagactccaggcttctcgtcagtgcctcgcaggatggtaaacttatcatctgggacagctacaccaccaacaaggtccacgccatccctctgcgctcctcctgggtcatgacctgtgcatatgccccttctgggaactatgtggcctgcggtggcctggataacatttgctccatttacaatctgaaaactcgtgaggggaacgtgcgcgtgagtcgtgagctggcaggacacacaggttacctgtcctgctgccgattcctggatgacaatcagatcgtcaccagctctggagacaccacgtgtgccctgtgggacatcgagaccggccagcagacgaccacgtttaccggacacactggagatgtcatgagcctttctcttgctcctgacaccagactgttcgtctctggtgcttgtgatgcttcagccaaactctgggatgtgcgagaaggcatgtgccggcagaccttcactggccacgagtctgacatcaatgccatttgcttctttccaaatggcaatgcatttgccactggctcagacgacgccacctgcaggctgtttgaccttcgtgctgaccaggagctcatgacttactcccatgacaacatcatctgcgggatcacctctgtctccttctccaagagcgggcgcctcctccttgctgggtacgacgacttcaactgcaacgtctgggatgcactcaaagccgaccgggcaggtgtcttggctgggcatgacaaccgcgtcagctgcctgggcgtgactgacgatggcatggctgtggcgacagggtcctgggatagcttcctcaagatctggaactaacgccagtagcatgtggatgccatggagactggaagaccattccaacttggacgcgttaccatgagagcatatcctatccaaccgtactaacgtggacaccctacacctcccctcagaacttcaaaagggcaagatcttttttccttcacttattgctgaaaccaagagcacaattcccattgagagaaagatctctgtgctgtaaactaaaacaaattgtgcattccttccggggccatcgtcgattcgcctcagttgctgctgtaataaaagtccacttttggncttaaaaaacatccccacacacacccccacagacaccccaccccaccatacaaag

SEQ ID NO: 308734 - DNA, 1858 bp, Homo sapiens
aggctggggcttgtggtttttgtgagctgggagctgggctggggagttgttggagctgttggtgcctggtgatgttgatgcatgccgccgcggcgggactggaccgagcctcgccggcgcgcacctgcccgcagcgcccgcggagcgcgcagcgcggcccgagcgcgacgacctgccgagcggcggccgaggcggcggtgtgggcgcgtcaggccgcgacgagggcgctgagacaaatttacatgtattggagaccagaccagaagcccttctgaattaagatctcacattcttgaaggtggcattgaagagcactaagatcggaagatgagtgagcttgaccagttacggcaggaggccgagcaacttaagaaccagattcgagacgccaggaaagcatgtgcagatgcaactctctctcagatcacaaacaacatcgacccagtgggaagaatccaaatgcgcacgaggaggacactgcgggggcacctggccaagatctacgccatgcactggggcacagactccaggcttctcgtcagtgcctcgcaggatggtaaacttatcatctgggacagctacaccaccaacaaggtccacgccatccctctgcgctcctcctgggtcatgacctgtgcatatgccccttctgggaactatgtggcctgcggtggcctggataacatttgctccatttacaatctgaaaactcgtgaggggaacgtgcgcgtgagtcgtgagctggcaggacacacaggttacctgtcctgctgccgattcctggatgacaatcagatcgtcaccagctctggagacaccacgtgtgccctgtgggacatcgagaccggccagcagacgaccacgtttaccggacacactggagatgtcatgagcctttctcttgctcctgacaccagactgttcgtctctggtgcttgtgatgcttcagccaaactctgggatgtgcgagaaggcatgtgccggcagaccttcactggccacgagtctgacatcaatgccatttgcttctttccaaatggcaatgcatttgccactggctcagacgacgccacctgcaggctgtttgaccttcgtgctgaccaggagctcatgacttactcccatgacaacatcatctgcgggatcacctctgtctccttctccaagagcgggcgcctcctccttgctgggtacgacgacttcaactgcaacgtctgggatgcactcaaagccgaccgggcaggtgtcttggctgggcatgacaaccgcgtcagctgcctgggcgtgactgacgatggcatggctgtggcgacagggtcctgggatagcttcctcaagatctggaactaacgccagtaggtaatgcagcagcccaaatgcccttctctgaggagaactgtgcgtgtttctcatagaacatttgaagttgtcattaacggtttctagataaatgttgatgtagcattgatttggaattgtgttgtgggaaacgtttacagaaagctgaagtcacgtgccctcagctgcagacactcatgcagtgatgggaagagcagtgacctggctgtgcgtctgcacttagattctctgcctcttttcacatttctttaaactctgtttaaaacacatgtggatgccatggagactggaagaccattccaacttggacgcgttaccatgagagcatatcctatccaaccgtactaacgtggacaccctacacctcccctcagaacttcaaaagggcaagatcttttttccttcacttattgctgaaaccaagagcacaattcccattgagagaaagatctctgtgctgtaaactaaaacaaattgtgcattccttccggggccatcg

SEQ ID NO: 308735 - DNA, 1536 bp, Homo sapiens
aggctggggcttgtggtttttgtgagctgggagctgggctggggagttgttggagctgttggtgcctggtgatgttgatgcatgccgccgcggcgggactggaccgagcctcgccggcgcgcacctgcccgcagcgcccgcggagcgcgcagcgcggcccgagcgcgacgacctgccgagcggcggccgaggcggcggtgtgggcgcgtcaggccgcgacgagggcgctgagacaaatttacatgtattggagaccagaccagaagcccttctgaattaagatctcacattcttgaaggtggcattgaagagcactaagatcggaagatgagtgagcttgaccagttacggcaggaggccgagcaacttaagaaccagattcgagacgccaggaaagcatgtgcagatgcaactctctctcagatcacaaacaacatcgacccagtgggaagaatccaaatgcgcacgaggaggacactgcgggggcacctggccaagatctacgccatgcactggggcacagactccaggcttctcgtcagtgcctcgcaggatggtaaacttatcatctgggacagctacaccaccaacaaggtccacgccatccctctgcgctcctcctgggtcatgacctgtgcatatgccccttctgggaactatgtggcctgcggtggcctggataacatttgctccatttacaatctgaaaactcgtgaggggaacgtgcgcgtgagtcgtgagctggcaggacacacaggttacctgtcctgctgccgattcctggatgacaatcagatcgtcaccagctctggagacaccacgtgtgccctgtgggacatcgagaccggccagcagacgaccacgtttaccggacacactggagatgtcatgagcctttctcttgctcctgacaccagactgttcgtctctggtgcttgtgatgcttcagccaaactctgggatgtgcgagaaggcatgtgccggcagaccttcactggccacgagtctgacatcaatgccatttgcttctttccaaatggcaatgcatttgccactggctcagacgacgccacctgcaggctgtttgaccttcgtgctgaccaggagctcatgacttactcccatgacaacatcatctgcgggatcacctctgtctccttctccaagagcgggcgcctcctccttgctgggtacgacgacttcaactgcaacgtctgggatgcactcaaagccgaccgggcaggtacgtggccatggggcctttctgtgtcttgtggacatttacgtggtatctttagagcaaacacagagtggttgcataagctgcagtgttttagtatcggtgggactgtggcatggcgtagcaggagtgacagtcgcaaactgatggcccagctctgaccctccaggcaagtggactccgaggagtaccagcagatcttcccacatgcgtcggggagggctctggggagagtcagtgggcaggagagggtcagctgtgcaggctccagggcccagccccgtgctttcccctct

SEQ ID NO: 308736 - DNA, 940 bp, Homo sapiens
  misc_feature (864)..(864): n is a, c, g, or t
  misc_feature (870)..(870): n is a, c, g, or t
ctagaggatccccgatagtgcaacgtggtcgctgagacaaatttacatgtattggagaccagaccagaagcccttctgaattaagatctcacattcttgaaggtggcattgaagagcactaagatcggaagatgagtgagcttgaccagttacggcaggaggccgagcaacttaagaaccagattcgagacgccaggaaagcatgtgcagatgcaactctctctcagatcacaaacaacatcgacccagtgggaagaatccaaatgcgcacgaggaggacactgcgggggcacctggccaagatctacgccatgcactggggcacagactccaggcttctcgtcagtgcctcgcaggatggtaaacttatcatctgggacagctacaccaccaacaaggtccacgccatccctctgcgctcctcctgggtcatgacctgtgcatatgccccttctgggaactatgtggcctgcggtggcctggataacatttgctccatttacaatctgaaaactcgtgaggggaacgtgcgcgtgagtcgtgagctggcaggacacacaggttacctgtcctgctgccgattcctggatgacaatcagatcgtcaccagctctggagacaccacgtgtgccctgtgggacatcgagaccggccagcagacgaccacgtttaccggacacactggagatgtcatgagcctttctcttgctcctgacaccagactgttcgtctctggtgcttgtgatgcttcagccaaactctgggatgtgcgagaaggcatgtgccggcagaccttcactggccacgagtctgacatcaatgccatttgcttcttcaatggaagcttgcatggttagagagcanctgagntgtttgacttgggtgacaggattagatatcagaatattggggaaaatggttacaagggaacctgggaaaa

SEQ ID NO: 308737 - DNA, 959 bp, Homo sapiens
ctagaggatccccgatagtgcaacgtggtcgctgagacaaatttacatgtattggagaccagaccagaagcccttctgaattaagatctcacattcttgaaggtggcattgaagagcactaagatcggaagatgagtgagcttgaccagttacggcaggaggccgagcaacttaagaaccagattcgagacgccaggaaagcatgtgcagatgcaactctctctcagatcacaaacaacatcgacccagtgggaagaatccaaatgcgcacgaggaggacactgcgggggcacctggccaagatctacgccatgcactggggcacagactccaggcttctcgtcagtgcctcgcaggatggtaaacttatcatctgggacagctacaccaccaacaaggtccacgccatccctctgcgctcctcctgggtcatgacctgtgcatatgccccttctgggaactatgtggcctgcggtggcctggataacatttgctccatttacaatctgaaaactcgtgaggggaacgtgcgcgtgagtcgtgagctggcaggacacacagcgcgtcagctgcctgggcgtgactgacgatggcatggctgtggcgacagggtcctgggatagcttcctcaagatctggaactaacgccagtagcatgtggatgccatggagactggaagaccattccaacttggacgcgttaccatgagagcatatcctatccaaccgtactaacgtggacaccctacacctcccctcagaacttcaaaagggcaagatcttttttccttcacttattgctgaaaccaagagcacaattcccattgagagaaagatctctgtgctgtaaactaaaacaaattgtgcattccttccggggccatcgtctttgttttcttttttgtcttgaatgaattttaaaaggaaatatataataaaaatgttaaccagaaggtaaa

SEQ ID NO: 308738 - DNA, 838 bp, Homo sapiens
  misc_feature (39)..(39): n is a, c, g, or t
  misc_feature (63)..(63): n is a, c, g, or t
  misc_feature (72)..(72): n is a, c, g, or t
  misc_feature (77)..(77): n is a, c, g, or t
  misc_feature (79)..(79): n is a, c, g, or t
  misc_feature (82)..(82): n is a, c, g, or t
  misc_feature (89)..(89): n is a, c, g, or t
  misc_feature (104)..(104): n is a, c, g, or t
  misc_feature (123)..(123): n is a, c, g, or t
  misc_feature (126)..(126): n is a, c, g, or t
  misc_feature (129)..(129): n is a, c, g, or t
  misc_feature (134)..(135): n is a, c, g, or t
  misc_feature (137)..(137): n is a, c, g, or t
  misc_feature (143)..(143): n is a, c, g, or t
  misc_feature (167)..(167): n is a, c, g, or t
  misc_feature (218)..(218): n is a, c, g, or t
  misc_feature (245)..(245): n is a, c, g, or t
  misc_feature (248)..(248): n is a, c, g, or t
  misc_feature (280)..(280): n is a, c, g, or t
  misc_feature (289)..(289): n is a, c, g, or t
  misc_feature (313)..(313): n is a, c, g, or t
  misc_feature (345)..(345): n is a, c, g, or t
  misc_feature (352)..(352): n is a, c, g, or t
  misc_feature (364)..(364): n is a, c, g, or t
  misc_feature (373)..(373): n is a, c, g, or t
  misc_feature (395)..(395): n is a, c, g, or t
  misc_feature (399)..(399): n is a, c, g, or t
  misc_feature (418)..(419): n is a, c, g, or t
  misc_feature (514)..(514): n is a, c, g, or t
  misc_feature (517)..(517): n is a, c, g, or t
  misc_feature (525)..(525): n is a, c, g, or t
  misc_feature (527)..(527): n is a, c, g, or t
  misc_feature (536)..(536): n is a, c, g, or t
  misc_feature (550)..(550): n is a, c, g, or t
  misc_feature (559)..(559): n is a, c, g, or t
  misc_feature (562)..(562): n is a, c, g, or t
  misc_feature (571)..(571): n is a, c, g, or t
  misc_feature (590)..(590): n is a, c, g, or t
  misc_feature (594)..(594): n is a, c, g, or t
  misc_feature (597)..(597): n is a, c, g, or t
  misc_feature (602)..(602): n is a, c, g, or t
agggtgttttcttttttttcttttttatagaaaaataanccccttcttaaccagtttgttaancccaattgncggtntnttnttcccanctttcttcgtttgtntgtttttttttggtcaccnttnttnggganngncagttntcagccgcgccgggcttctaccancgccttggggttagccggggatttagtttatcttttttttcttttattttntttttaaaaataaaaaaaaaaagtttnttntttgtcaaaacatacttgcttttttggatttnctgttggtnttgtgggttgggttgttgtgttgntgatggtatgaggtgtttgattgttgctctgntcttctntttttggttttnttctggtgncctcttatttttttgtgtgttntttnttcctctttttatttcttnntacacagattgtcctggtgttcatttcaaggccagtgttcagcagcagcgtttggaaagcaggttctgtgggaccccccgccccgcccccttttntcntttatttntnttgtttttngcttttccttcttnttttttttnttnttttttttnttttttttttttttttttnttcnttntcttnttggcctggatctggcaaagagaatacaaatgaaaccccttctttctctttccgtccaacaactctgtagagctctctgcacccttacccctttccaccttttgtatttaattttaaagtcagtgtactgcaaggaagctggatgcaagatagatactatattaaactgtactgttatttaagatgtaataaagcagtttgacatgagggaaaaaaaaaaaacaaaaaaaaaaaaa

SEQ ID NO: 308739 - DNA, 597 bp, Homo sapiens
ctagaggatccccgatagtgcaacgtggtcgctgagacaaatttacatgtattggagaccagaccagaagcccttctgaattaagatctcacattcttgaaggtggcattgaagagcactaagatcggaagatgagtgagcttgaccagttacggcaggaggccgagcaacttaagaaccagattcgagtatgtagttgtgtgtgcttggttttattaatcatttgagtttcaggttagatgttacttgttttaggaaaaatggtttacaggatgacttgttctatgttttatatgaaattgaatcttagttggcccaggatgtactaattatagatctagatacttagcctagtacattgtttttgggattttgctttctgtatacaatttgttatttgaatatacaccagatgtctccgtagaatttataagtgtcttttgcattctttatcataaccttgaaaatttgtgataccctgggccactgatcagactgtgatatctacctccctcccctgaatattgggactattgacagcagaaaacttgcttaaaagtaagagtattaacaacaataaaaaaagtatttcaggta

SEQ ID NO: 308740 - DNA, 358 bp, Homo sapiens
aaagaaccagttgagggttcagaagggggcgtgactgggtgtggcagatgtggagctgggttggtgagagcaggatgaggggctgttgctggctcctgagtgtagggtaggcccgtaagttgcactccactcaggggctgagaacctgtgtgcatagcaaggcacacaagacattcacttttttttttttttcttaagagacagagtctcactgttgcccaggctgacatacagtggctcgctgctgccttcaactcctgggctcaaccagtcctcctgtcttagcctctggagtagctaggactacaggtatgcaccaccatgccaatttttttaaaaaatattttgaggccgggcg

SEQ ID NO: 308741 - DNA, 4102 bp, Homo sapiens
  misc_feature (61)..(61): n is a, c, g, or t
tgcccgcggcgcggtgggaaagttgagttgggagaagttgggagcggcgggggcgcgcccnggggtgggcacggggcagtcgtcgggagcgcgcgagtgcgccggaggacggggagagaccccgagacccccggggcacgaagtccagagcgagcgggttatgcctccgcctcgttgccctgaaagccgcagcgacagcgaaaagggctaagattcggccatgagcagcgcccctcggcgccccgccaagggcgcagattctttctgtacgccagagccagagagcttgggccctgggacgcctgggttccccgagcaggaggaagacgaacttcaccgcaccctgggcgtggagcggtttgaggagatcctacaggaggccgggtctcgtggaggggaggagccaggccgcagctatggggaggaagactttgagtaccaccgccagtcctcccaccacatccatcacccactgtccacccacctgcctccggatgcacgccgccgcaagacaccccagggcccaggacggaagcctcgaaggcgcccgggagcctccccgactggagaaaccccgaccattgaggagggggaggaagatgaggatgaggccagcgaggctgagggggcccgggctctcactcagccgtcccctgtctccacaccctcctcggtgcagttctttctccaagaggatgacagtgctgaccggaaggcagagaggaccagtccatcttcccctgcaccactgccccaccaggaggcgactcctcgggcctccaaaggggcccaggctggaacccaggtggaggaggcggaggcggaggcggtggcggtggccagtggcactgcagggggtgacgacgggggtgcctcggggcgccccctgcccaaagcccagcctgggcaccgcagctacaaccttcaggagaggaggcgcatcgggagcatgactggggctgagcaggcactgctgccccgggtccccacggatgagattgaggcccagacgctggccacggccgacctagacctcatgaagagtcaccggtttgaggacgttcctggggtgcggcggcacttggtgcggaagaatgccaaaggttccacacagagtggccgagaagggcgggagcctggccccacacctcgggcccgaccccgggccccccacaagccccatgaggtgtttgtggagctgaatgagttgctcctggacaaaaaccaggagccccagtggcgggagacagctcgctggatcaaatttgaagaggacgtggaggaggagaccgagcgctgggggaagccccacgtggcctccctctccttccgcagtctcctggagctccgcaggaccctggcccatggggctgtgctcttggatctggaccagcagaccctgcccggagtggcccaccaggtggtggagcagatggtcatctctgaccagatcaaggccgaggacagggccaacgtgctgcgggctctgctgttgaaacacagccacccaagtgatgagaaggacttctccttcccccgcaacatctcagctggctccctgggctccctgctggggcatcaccatggtcagggggctgagagtgacccccacgtcaccgagcctctcatgggaggtgttcctgagacccggctggaggtggagcgagagcgtgagctgccgcctccagcaccaccagctggcatcacccgctccaagtccaagcacgagctgaaactgctggagaagattcctgagaatgccgaggccacggtggtccttgtgggctgcgtggagttcctctcccgccccaccatggcctttgtgcggctccgggaggctgtggagttggacgcagtgttggaggtgccggtgcctgtgcgtttcctcttcctgctgctgggcccgagtagtgccaacatggactaccacgagatcggccgctccatctccaccctcatgtcagacaagcaattccacgaggcagcctacctggctgacgagcgggaggacctgctgacggccatcaacgccttcctggactgcagcgtggtgctgccgccttcagaagtgcagggcgaggagctgctgcgctctgtggcccacttccagcgccagatgctcaagaagcgagaggagcagggccggctgctacctacaggggctgggctggagcccaaatctgcccaagataaggcgctcctgcagatggtagaggcggcaggggcagctgaagatgatccccttcggcggacggggcggccctttggggggctgatccgagatgtgcggcgccgctatccccactacctgagtgacttccgagatgcacttgaccctcagtgcctggccgcagtcatcttcatctactttgccgccctgtctcctgccatcacctttggggggctgctgggagagaagacacaggacctgataggggtgtcggagctgattatgtccacagcgctccagggcgtggtcttctgcctgctgggtgcccagcccctgttggtgatcggcttctcagggcccctgctggtctttgaggaggccttcttctcgttctgtagcagcaaccacctggagtacctggtgggccgtgtgtggatcggcttctggctggtgttcctggccctgctcatggtggccctggaggggagcttcctggtccgcttcgtctcccgcttcacccaggagatcttcgccttcttgatctcactcatcttcatctatgagaccttctacaagctggtgaagatcttccaggagcaccccctgcatggctgctcagcctccaacagctcagaggtggacggcggtgagaacatgacatgggccggggcaagacccacgctggggccgggcaacaggagcttggctgggcagtctgggcaggggaagccccggggccagcccaacacggccctgctgtcgctggtgctcatggccggcaccttcttcatcgccttcttcctgcgcaaattcaagaacagccggttctttcctggccggatccggcgggtgattggggactttggggtgcccatcgccatcctcatcatggtgcttgtggattacagtattgaggacacctatacccagaagctgagcgttcccagtggattctcggtgactgccccagaaaagaggggctgggtcatcaaccccctgggagagaagagccccttccctgtgtggatgatggttgccagcctgctgcccgccatcctggtcttcattctcatcttcatggagacacagatcaccacgctcatcatctccaagaaggagcgcatgctgcagaagggctccggcttccacctggacctgctgctcatcgtggccatgggcggcatctgtgccctctttggcctgccctggttggctgctgccactgtccgctctgtcactcacgccaacgcgctcactgtcatgagcaaggctgtggcacctggggacaagcccaagattcaggaagtcaaggagcagcgggtgacggggctgctggttgccctgcttgtgggcctctccatagttatcggggatctgctccggcagatccccctggccgtgctctttggaattttcctgtacatgggagtcacctcccttaacgggatccagttctatgagcggctgcatctgctgctcatgccgcccaaacaccacccagatgtcacttacgtcaagaaggtccggaccctccgtatgcacctgttcacggccctgcagctgctctgcctggccctgctctgggccgtcatgtccacagctgcctccctggccttccccttcatcctcatcctcacagtgccgctccgcatggtggtgctcacccgtatcttcaccgaccgagagatgaaatgtctggatgctaacgaggcagagccggtgtttgatgagcgggagggtgtggacgagtacaatgagatgcccatgcctgtgtagccgccaccgagggacagccgagggaccgatggacgaggggacaggctggtgggatggggttccccctcccatgcccctccctcctttttatttaagtgaataatttaaagtcttctcctcccccactgcccctgcagtaaagtgctttggccccca

SEQ ID NO: 308742 - DNA, 4394 bp, Homo sapiens
acccctgccggccatggacttcctgctgcggcctcaggtgcgaggggtctgcgaccctctctccccatggcggcaagctccctgcgcctctccccgtcccctcgtcccacggggctgcttctggtgggagtggggctgggcgcttaggggagccaggagatggacaggagccttcctcacagaggggagaagccagccccctggcccgctcaccttctcttatccggtgttctgccagtcccagctgctccagtccccacctcgcccctaagacccgcccttcaccccagccctccccgcgctcttccttgttctggctgctggcaccgctatggagggggctgcatacccccgcccttggagatcccgatgcccttcaggtccagaagctcttgagcaaatatttggcggcgcctggagctgagaccgtgggtgggtggggggctggaccaaggctgcctggccaggcggctgccgcttagctgggctgagctcttacaagcgccgcattccctgccggctgtgccggccggccgctgctccgcgcccgcaggatgactcagccagagccagagagcttgggccctgggacgcctgggttccccgagcaggaggaagacgaacttcaccgcaccctgggcgtggagcggtttgaggagatcctacaggaggccgggtctcgtggaggggaggagccaggccgcagctatggggaggaagactttgagtaccaccgccagtcctcccaccacatccatcacccactgtccacccacctgcctccggatgcacgccgccgcaagacaccccagggcccaggacggaagcctcgaaggcgcccgggagcctccccgactggagaaaccccgaccattgaggagggggaggaagatgaggatgaggccagcgaggctgagggggcccgggctctcactcagccgtcccctgtctccacaccctcctcggtgcagttctttctccaagaggatgacagtgctgaccggaaggcagagaggaccagtccatcttcccctgcaccactgccccaccaggaggcgactcctcgggcctccaaaggggcccaggctggaacccaggtggaggaggcggaggcggaggcggtggcggtggccagtggcactgcagggggtgacgacgggggtgcctcggggcgccccctgcccaaagcccagcctgggcaccgcagctacaaccttcaggagaggaggcgcatcgggagcatgactggggctgagcaggcactgctgccccgggtccccacggatgagattgaggcccagacgctggccacggccgacctagacctcatgaagagtcaccggtttgaggacgttcctggggtgcggcggcacttggtgcggaagaatgccaaaggttccacacagagtggccgagaagggcgggagcctggccccacacctcgggcccgaccccgggccccccacaagccccatgaggtgtttgtggagctgaatgagttgctcctggacaaaaaccaggagccccagtggcgggagacagctcgctggatcaaatttgaagaggacgtggaggaggagaccgagcgctgggggaagccccacgtggcctccctctccttccgcagtctcctggagctccgcaggaccctggcccatggggctgtgctcttggatctggaccagcagaccctgcccggagtggcccaccaggtggtggagcagatggtcatctctgaccagatcaaggccgaggacagggccaacgtgctgcgggctctgctgttgaaacacagccacccaagtgatgagaaggacttctccttcccccgcaacatctcagctggctccctgggctccctgctggggcatcaccatggtcagggggctgagagtgacccccacgtcaccgagcctctcatgggaggtgttcctgagacccggctggaggtggagcgagagcgtgagctgccgcctccagcaccaccagctggcatcacccgctccaagtccaagcacgagctgaaactgctggagaagattcctgagaatgccgaggccacggtggtccttgtgggctgcgtggagttcctctcccgccccaccatggcctttgtgcggctccgggaggctgtggagttggacgcagtgttggaggtgccggtgcctgtgcgtttcctcttcctgctgctgggcccgagtagtgccaacatggactaccacgagatcggccgctccatctccaccctcatgtcagacaagcaattccacgaggcagcctacctggctgacgagcgggaggacctgctgacggccatcaacgccttcctggactgcagcgtggtgctgccgccttcagaagtgcagggcgaggagctgctgcgctctgtggcccacttccagcgccagatgctcaagaagcgagaggagcagggccggctgctacctacaggggctgggctggagcccaaatctgcccaagataaggcgctcctgcagatggtagaggcggcaggggcagctgaagatgatccccttcggcggacggggcggccctttggggggctgatccgagatgtgcggcgccgctatccccactacctgagtgacttccgagatgcacttgaccctcagtgcctggccgcagtcatcttcatctactttgccgccctgtctcctgccatcacctttggggggctgctgggagagaagacacaggacctgataggggtgtcggagctgattatgtccacagcgctccagggcgtggtcttctgcctgctgggtgcccagcccctgttggtgatcggcttctcagggcccctgctggtctttgaggaggccttcttctcgttctgtagcagcaaccacctggagtacctggtgggccgtgtgtggatcggcttctggctggtgttcctggccctgctcatggtggccctggaggggagcttcctggtccgcttcgtctcccgcttcacccaggagatcttcgccttcttgatctcactcatcttcatctatgagaccttctacaagctggtgaagatcttccaggagcaccccctgcatggctgctcagcctccaacagctcagaggtggacggcggtgagaacatgacatgggccggggcaagacccacgctggggccgggcaacaggagcttggctgggcagtctgggcaggggaagccccggggccagcccaacacggccctgctgtcgctggtgctcatggccggcaccttcttcatcgccttcttcctgcgcaaattcaagaacagccggttctttcctggccggatccggcgggtgattggggactttggggtgcccatcgccatcctcatcatggtgcttgtggattacagtattgaggacacctatacccagaagctgagcgttcccagtggattctcggtgactgccccagaaaagaggggctgggtcatcaaccccctgggagagaagagccccttccctgtgtggatgatggttgccagcctgctgcccgccatcctggtcttcattctcatcttcatggagacacagatcaccacgctcatcatctccaagaaggagcgcatgctgcagaagggctccggcttccacctggacctgctgctcatcgtggccatgggcggcatctgtgccctctttggcctgccctggttggctgctgccactgtccgctctgtcactcacgccaacgcgctcactgtcatgagcaaggctgtggcacctggggacaagcccaagattcaggaagtcaaggagcagcgggtgacggggctgctggttgccctgcttgtgggcctctccatagttatcggggatctgctccggcagatccccctggccgtgctctttggaattttcctgtacatgggagtcacctcccttaacgggatccagttctatgagcggctgcatctgctgctcatgccgcccaaacaccacccagatgtcacttacgtcaagaaggtccggaccctccgtatgcacctgttcacggccctgcagctgctctgcctggccctgctctgggccgtcatgtccacagctgcctccctggccttccccttcatcctcatcctcacagtgccgctccgcatggtggtgctcacccgtatcttcaccgaccgagagatgaaatgtctggatgctaacgaggcagagccggtgtttgatgagcgggagggtgtggacgagtacaatgagatgcccatgcctgtgtagccgccaccgagggacagccgagggaccgatggacgaggggacaggctggtgggatggggttccccctcccatgcccctccctcctttttatttaagtgaataatttaaagtcttctcctcccccactgcccctgcagtaaagtgctttggccccca

SEQ ID NO: 308743 - DNA, 3837 bp, Homo sapiens
  misc_feature (61)..(61): n is a, c, g, or t
tgcccgcggcgcggtgggaaagttgagttgggagaagttgggagcggcgggggcgcgcccnggggtgggcacggggcagtcgtcgggagcgcgcgagtgcgccggaggacggggagagaccccgagacccccggggcacgaagtccagagcgagcgggttatgcctccgcctcgttgccctgaaagccgcagcgacagcgaaaagggctaagattcggccatgagcagcgcccctcggcgccccgccaagggcgcagattctttctgtacgccagagccagagagcttgggccctgggacgcctgggttccccgagcaggaggaagacgaacttcaccgcaccctgggcgtggagcggtttgaggagatcctacaggaggccgggtctcgtggaggggaggagccaggccgcagctatggggaggaagactttgagtaccaccgccagtcctcccaccacatccatcacccactgtccacccactgccccaccaggaggcgactcctcgggcctccaaaggggcccaggctggaacccaggtggaggaggcggaggcggaggcggtggcggtggccagtggcactgcagggggtgacgacgggggtgcctcggggcgccccctgcccaaagcccagcctgggcaccgcagctacaaccttcaggagaggaggcgcatcgggagcatgactggggctgagcaggcactgctgccccgggtccccacggatgagattgaggcccagacgctggccacggccgacctagacctcatgaagagtcaccggtttgaggacgttcctggggtgcggcggcacttggtgcggaagaatgccaaaggttccacacagagtggccgagaagggcgggagcctggccccacacctcgggcccgaccccgggccccccacaagccccatgaggtgtttgtggagctgaatgagttgctcctggacaaaaaccaggagccccagtggcgggagacagctcgctggatcaaatttgaagaggacgtggaggaggagaccgagcgctgggggaagccccacgtggcctccctctccttccgcagtctcctggagctccgcaggaccctggcccatggggctgtgctcttggatctggaccagcagaccctgcccggagtggcccaccaggtggtggagcagatggtcatctctgaccagatcaaggccgaggacagggccaacgtgctgcgggctctgctgttgaaacacagccacccaagtgatgagaaggacttctccttcccccgcaacatctcagctggctccctgggctccctgctggggcatcaccatggtcagggggctgagagtgacccccacgtcaccgagcctctcatgggaggtgttcctgagacccggctggaggtggagcgagagcgtgagctgccgcctccagcaccaccagctggcatcacccgctccaagtccaagcacgagctgaaactgctggagaagattcctgagaatgccgaggccacggtggtccttgtgggctgcgtggagttcctctcccgccccaccatggcctttgtgcggctccgggaggctgtggagttggacgcagtgttggaggtgccggtgcctgtgcgtttcctcttcctgctgctgggcccgagtagtgccaacatggactaccacgagatcggccgctccatctccaccctcatgtcagacaagcaattccacgaggcagcctacctggctgacgagcgggaggacctgctgacggccatcaacgccttcctggactgcagcgtggtgctgccgccttcagaagtgcagggcgaggagctgctgcgctctgtggcccacttccagcgccagatgctcaagaagcgagaggagcagggccggctgctacctacaggggctgggctggagcccaaatctgcccaagataaggcgctcctgcagatggtagaggcggcaggggcagctgaagatgatccccttcggcggacggggcggccctttggggggctgatccgagatgtgcggcgccgctatccccactacctgagtgacttccgagatgcacttgaccctcagtgcctggccgcagtcatcttcatctactttgccgccctgtctcctgccatcacctttggggggctgctgggagagaagacacaggacctgataggggtgtcggagctgattatgtccacagcgctccagggcgtggtcttctgcctgctgggtgcccagcccctgttggtgatcggcttctcagggcccctgctggtctttgaggaggccttcttctcgttctgtagcagcaaccacctggagtacctggtgggccgtgtgtggatcggcttctggctggtgttcctggccctgctcatggtggccctggaggggagcttcctggtccgcttcgtctcccgcttcacccaggagatcttcgccttcttgatctcactcatcttcatctatgagaccttctacaagctggtgaagatcttccaggagcaccccctgcatggctgctcagcctccaacagctcagaggtggacggcggtgagaacatgacatgggccggggcaagacccacgctggggccgggcaacaggagcttggctgggcagtctgggcaggggaagccccggggccagcccaacacggccctgctgtcgctggtgctcatggccggcaccttcttcatcgccttcttcctgcgcaaattcaagaacagccggttctttcctggccggatccggcgggtgattggggactttggggtgcccatcgccatcctcatcatggtgcttgtggattacagtattgaggacacctatacccagaagctgagcgttcccagtggattctcggtgactgccccagaaaagaggggctgggtcatcaaccccctgggagagaagagccccttccctgtgtggatgatggttgccagcctgctgcccgccatcctggtcttcattctcatcttcatggagacacagatcaccacgctcatcatctccaagaaggagcgcatgctgcagaagggctccggcttccacctggacctgctgctcatcgtggccatgggcggcatctgtgccctctttggcctgccctggttggctgctgccactgtccgctctgtcactcacgccaacgcgctcactgtcatgagcaaggctgtggcacctggggacaagcccaagattcaggaagtcaaggagcagcgggtgacggggctgctggttgccctgcttgtgggcctctccatagttatcggggatctgctccggcagatccccctggccgtgctctttggaattttcctgtacatgggagtcacctcccttaacgggatccagttctatgagcggctgcatctgctgctcatgccgcccaaacaccacccagatgtcacttacgtcaagaaggtccggaccctccgtatgcacctgttcacggccctgcagctgctctgcctggccctgctctgggccgtcatgtccacagctgcctccctggccttccccttcatcctcatcctcacagtgccgctccgcatggtggtgctcacccgtatcttcaccgaccgagagatgaaatgtctggatgctaacgaggcagagccggtgtttgatgagcgggagggtgtggacgagtacaatgagatgcccatgcctgtgtagccgccaccgagggacagccgagggaccgatggacgaggggacaggctggtgggatggggttccccctcccatgcccctccctcctttttatttaagtgaataatttaaagtcttctcctcccccactgcccctgcagtaaagtgctttggccccca

SEQ ID NO: 308744 - DNA, 4223 bp, Homo sapiens
cttctgtgccttcctctctctcagtgagtgagtggagttgagctcctgccctccacccagccagcctgcttccctcctgccggtccccaaggacctgggggagggaagcctcctgccggcctgtactggggagggggcaccccctccctgcaggggcatcttgggctctctccagagttcttccattcgtctgcttcctgtctcggcagcccggccccggctccacggggtgtctcaccctccccaccacaccctctctggtctcaggcccacctctggttatgcctccgcctcgttgccctgaaagccgcagcgacagcgaaaagggctaagattcggccatgagcagcgcccctcggcgccccgccaagggcgcagattctttctgtacgccagagccagagagcttgggccctgggacgcctgggttccccgagcaggaggaagacgaacttcaccgcaccctgggcgtggagcggtttgaggagatcctacaggaggccgggtctcgtggaggggaggagccaggccgcagctatggggaggaagactttgagtaccaccgccagtcctcccaccacatccatcacccactgtccacccacctgcctccggatgcacgccgccgcaagacaccccagggcccaggacggaagcctcgaaggcgcccgggagcctccccgactggagaaaccccgaccattgaggagggggaggaagatgaggatgaggccagcgaggctgagggggcccgggctctcactcagccgtcccctgtctccacaccctcctcggtgcagttctttctccaagaggatgacagtgctgaccggaaggcagagaggaccagtccatcttcccctgcaccactgccccaccaggaggcgactcctcgggcctccaaaggggcccaggctggaacccaggtggaggaggcggaggcggaggcggtggcggtggccagtggcactgcagggggtgacgacgggggtgcctcggggcgccccctgcccaaagcccagcctgggcaccgcagctacaaccttcaggagaggaggcgcatcgggagcatgactggggctgagcaggcactgctgccccgggtccccacggatgagattgaggcccagacgctggccacggccgacctagacctcatgaagagtcaccggtttgaggacgttcctggggtgcggcggcacttggtgcggaagaatgccaaaggttccacacagagtggccgagaagggcgggagcctggccccacacctcgggcccgaccccgggccccccacaagccccatgaggtgtttgtggagctgaatgagttgctcctggacaaaaaccaggagccccagtggcgggagacagctcgctggatcaaatttgaagaggacgtggaggaggagaccgagcgctgggggaagccccacgtggcctccctctccttccgcagtctcctggagctccgcaggaccctggcccatggggctgtgctcttggatctggaccagcagaccctgcccggagtggcccaccaggtggtggagcagatggtcatctctgaccagatcaaggccgaggacagggccaacgtgctgcgggctctgctgttgaaacacagccacccaagtgatgagaaggacttctccttcccccgcaacatctcagctggctccctgggctccctgctggggcatcaccatggtcagggggctgagagtgacccccacgtcaccgagcctctcatgggaggtgttcctgagacccggctggaggtggagcgagagcgtgagctgccgcctccagcaccaccagctggcatcacccgctccaagtccaagcacgagctgaaactgctggagaagattcctgagaatgccgaggccacggtggtccttgtgggctgcgtggagttcctctcccgccccaccatggcctttgtgcggctccgggaggctgtggagttggacgcagtgttggaggtgccggtgcctgtgcgtttcctcttcctgctgctgggcccgagtagtgccaacatggactaccacgagatcggccgctccatctccaccctcatgtcagacaagcaattccacgaggcagcctacctggctgacgagcgggaggacctgctgacggccatcaacgccttcctggactgcagcgtggtgctgccgccttcagaagtgcagggcgaggagctgctgcgctctgtggcccacttccagcgccagatgctcaagaagcgagaggagcagggccggctgctacctacaggggctgggctggagcccaaatctgcccaagataaggcgctcctgcagatggtagaggcggcaggggcagctgaagatgatccccttcggcggacggggcggccctttggggggctgatccgagatgtgcggcgccgctatccccactacctgagtgacttccgagatgcacttgaccctcagtgcctggccgcagtcatcttcatctactttgccgccctgtctcctgccatcacctttggggggctgctgggagagaagacacaggacctgataggggtgtcggagctgattatgtccacagcgctccagggcgtggtcttctgcctgctgggtgcccagcccctgttggtgatcggcttctcagggcccctgctggtctttgaggaggccttcttctcgttctgtagcagcaaccacctggagtacctggtgggccgtgtgtggatcggcttctggctggtgttcctggccctgctcatggtggccctggaggggagcttcctggtccgcttcgtctcccgcttcacccaggagatcttcgccttcttgatctcactcatcttcatctatgagaccttctacaagctggtgaagatcttccaggagcaccccctgcatggctgctcagcctccaacagctcagaggtggacggcggtgagaacatgacatgggccggggcaagacccacgctggggccgggcaacaggagcttggctgggcagtctgggcaggggaagccccggggccagcccaacacggccctgctgtcgctggtgctcatggccggcaccttcttcatcgccttcttcctgcgcaaattcaagaacagccggttctttcctggccggatccggcgggtgattggggactttggggtgcccatcgccatcctcatcatggtgcttgtggattacagtattgaggacacctatacccagaagctgagcgttcccagtggattctcggtgactgccccagaaaagaggggctgggtcatcaaccccctgggagagaagagccccttccctgtgtggatgatggttgccagcctgctgcccgccatcctggtcttcattctcatcttcatggagacacagatcaccacgctcatcatctccaagaaggagcgcatgctgcagaagggctccggcttccacctggacctgctgctcatcgtggccatgggcggcatctgtgccctctttggcctgccctggttggctgctgccactgtccgctctgtcactcacgccaacgcgctcactgtcatgagcaaggctgtggcacctggggacaagcccaagattcaggaagtcaaggagcagcgggtgacggggctgctggttgccctgcttgtgggcctctccatagttatcggggatctgctccggcagatccccctggccgtgctctttggaattttcctgtacatgggagtcacctcccttaacgggatccagttctatgagcggctgcatctgctgctcatgccgcccaaacaccacccagatgtcacttacgtcaagaaggtccggaccctccgtatgcacctgttcacggccctgcagctgctctgcctggccctgctctgggccgtcatgtccacagctgcctccctggccttccccttcatcctcatcctcacagtgccgctccgcatggtggtgctcacccgtatcttcaccgaccgagagatgaaatgtctggatgctaacgaggcagagccggtgtttgatgagcgggagggtgtggacgagtacaatgagatgcccatgcctgtgtagccgccaccgagggacagccgagggaccgatggacgaggggacaggctggtgggatggggttccccctcccatgcccctccctcctttttatttaagtgaataatttaaagtcttctcctcccccactgcccctgcagtaaagtgctttggccccca

SEQ ID NO: 308745 - DNA, 4304 bp, Homo sapiens
  misc_feature (61)..(61): n is a, c, g, or t
tgcccgcggcgcggtgggaaagttgagttgggagaagttgggagcggcgggggcgcgcccnggggtgggcacggggcagtcgtcgggagcgcgcgagtgcgccggaggacggggagagaccccgagacccccggggcacgaagtccagagcgagcgggttatgcctccgcctcgttgccctgaaagccgcagcgacagcgaaaagggctaagattcggccatgagcagcgcccctcggcgccccgccaagggcgcagattctttctgtacgccagagccagagagcttgggccctgggacgcctgggttccccgagcaggaggaagacgaacttcaccgcaccctgggcgtggagcggtttgaggagatcctacaggaggccgggtctcgtggaggggaggagccaggccgcagctatggggaggaagactttgagtaccaccgccagtcctcccaccacatccatcacccactgtccacccacctgcctccggatgcacgccgccgcaagacaccccagggcccaggacggaagcctcgaaggcgcccgggagcctccccgactggagaaaccccgaccattgaggagggggaggaagatgaggatgaggccagcgaggctgagggggcccgggctctcactcagccgtcccctgtctccacaccctcctcggtgcagttctttctccaagaggatgacagtgctgaccggaaggcagagaggaccagtccatcttcccctgcaccactgccccaccaggaggcgactcctcgggcctccaaaggggcccaggctggaacccaggtggaggaggcggaggcggaggcggtggcggtggccagtggcactgcagggggtgacgacgggggtgcctcggggcgccccctgcccaaagcccagcctgggcaccgcagctacaaccttcaggagaggaggcgcatcgggagcatgactggggctgagcaggcactgctgccccgggtccccacggatgagattgaggcccagacgctggccacggccgacctagacctcatgaagagtcaccggtttgaggacgttcctggggtgcggcggcacttggtgcggaagaatgccaaaggttccacacagagtggccgagaagggcgggagcctggccccacacctcgggcccgaccccgggccccccacaagccccatgaggtgtttgtggagctgaatgagttgctcctggacaaaaaccaggagccccagtggcgggagacagctcgctggatcaaatttgaagaggacgtggaggaggagaccgagcgctgggggaagccccacgtggcctccctctccttccgcagtctcctggagctccgcaggaccctggcccatggggctgtgctcttggatctggaccagcagaccctgcccggagtggcccaccaggtggtggagcagatggtcatctctgaccagatcaaggccgaggacagggccaacgtgctgcgggctctgctgttgaaacacagccacccaagtgatgagaaggacttctccttcccccgcaacatctcagctggctccctgggctccctgctggggcatcaccatggtcagggggctgagagtgacccccacgtcaccgagcctctcatgggaggtgttcctgagacccggctggaggtggagcgagagcgtgagctgccgcctccagcaccaccagctggcatcacccgctccaagtccaagcacgagctgaaactgctggagaagattcctgagaatgccgaggccacggtggtccttgtgggctgcgtggagttcctctcccgccccaccatggcctttgtgcggctccgggaggctgtggagttggacgcagtgttggaggtgccggtgcctgtgcgtttcctcttcctgctgctgggcccgagtagtgccaacatggactaccacgagatcggccgctccatctccaccctcatgtcagacaagcaattccacgaggcagcctacctggctgacgagcgggaggacctgctgacggccatcaacgccttcctggactgcagcgtggtgctgccgccttcagaagtgcagggcgaggagctgctgcgctctgtggcccacttccagcgccagatgctcaagaagcgagaggagcagggccggctgctacctacaggggctgggctggagcccaaatctgcccaagataaggcgctcctgcagatggtagaggcggcaggggcagctgaagatgatccccttcggcggacggggcggccctttggggggctgatccgagatgtgcggcgccgctatccccactacctgagtgacttccgagatgcacttgaccctcagtgcctggccgcagtcatcttcatctactttgccgccctgtctcctgccatcacctttggggggctgctgggagagaagacacaggacctgataggggtgtcggagctgattatgtccacagcgctccagggcgtggtcttctgcctgctgggtgcccagcccctgttggtgatcggcttctcagggcccctgctggtctttgaggaggccttcttctcgttctgtagcagcaaccacctggagtacctggtgggccgtgtgtggatcggcttctggctggtgttcctggccctgctcatggtggccctggaggggagcttcctggtccgcttcgtctcccgcttcacccaggagatcttcgccttcttgatctcactcatcttcatctatgagaccttctacaagctggtgaagatcttccaggagcaccccctgcatggctgctcagcctccaacagctcagaggtggacggcggtgagaacatgacatgggccggggcaagacccacgctggggccgggcaacaggagcttggctgggcagtctgggcaggggaagccccggggccagcccaacacggccctgctgtcgctggtgctcatggccggcaccttcttcatcgccttcttcctgcgcaaattcaagaacagccggttctttcctggccggatccggcgggtgattggggactttggggtgcccatcgccatcctcatcatggtgcttgtggattacagtattgaggacacctatacccagaagctgagcgttcccagtggattctcggtgactgccccagaaaagaggggctgggtcatcaaccccctgggagagaagagccccttccctgtgtggatgatggttgccagcctgctgcccgccatcctggtcttcattctcatcttcatggagacacagatcaccacgctcatcatctccaagaaggagcgcatgctgcagaagggctccggcttccacctggacctgctgctcatcgtggccatgggcggcatctgtgccctctttggcctgccctggttggctgctgccactgtccgctctgtcactcacgccaacgcgctcactgtcatgagcaaggctgtggcacctggggacaagcccaagattcaggaagtcaaggagcagcgggtgacggggctgctggttgccctgcttgtgggcctctccatagttatcggggatctgctccggcagatccccctggccgtgctctttggaattttcctgtacatgggagtcacctcccttaacgggatccagttctatgagcggctgcatctgctgctcatgccgcccaaacaccacccagatgtcacttacgtcaagaaggtccggaccctccgtatgcacctgttcacggccctgcagctgctctgcctggccctgctctgggccgtcatgtccacagctgcctccctggccttccccttcatcctcatcctcacagtgccgctccgcatggtggtgctcacccgtatcttcaccgaccgagagatgaaatgtctggatgctaacgaggcagagccggtgtttgatgagcgggagggtgtggacgagtacaatgagatgcccatgcctgtgtagccgccaccgagggacagccgagggaccgatggacgaggggacaggctggtgggatggggttccccctcccatgcccctccctcctttttatttaagtgaataatttaaagtcttctcctcccccactgcccctgcagtaaagtgctttggcccccaaaacaacaagaccaaaaaaacaccaccaaagcacaaaacagaaaacaaaagagggggggcctaataaacccggggggcgcaaagtaacacaccggtttttgaaacgggtcccattaggtgcgtataacacaagagcgcgcttacacctggcgagggaaggatcgtggctggagcccatgtggggtcagggacaccgagaaac

SEQ ID NO: 308746 - DNA, 3868 bp, Homo sapiens
acccctgccggccatggacttcctgctgcggcctcagccagagccagagagcttgggccctgggacgcctgggttccccgagcaggaggaagacgaacttcaccgcaccctgggcgtggagcggtttgaggagatcctacaggaggccgggtctcgtggaggggaggagccaggccgcagctatggggaggaagactttgagtaccaccgccagtcctcccaccacatccatcacccactgtccacccacctgcctccggatgcacgccgccgcaagacaccccagggcccaggacggaagcctcgaaggcgcccgggagcctccccgactggagaaaccccgaccattgaggagggggaggaagatgaggatgaggccagcgaggctgagggggcccgggctctcactcagccgtcccctgtctccacaccctcctcggtgcagttctttctccaagaggatgacagtgctgaccggaaggcagagaggaccagtccatcttcccctgcaccactgccccaccaggaggcgactcctcgggcctccaaaggggcccaggctggaacccaggtggaggaggcggaggcggaggcggtggcggtggccagtggcactgcagggggtgacgacgggggtgcctcggggcgccccctgcccaaagcccagcctgggcaccgcagctacaaccttcaggagaggaggcgcatcgggagcatgactggggctgagcaggcactgctgccccgggtccccacggatgagattgaggcccagacgctggccacggccgacctagacctcatgaagagtcaccggtttgaggacgttcctggggtgcggcggcacttggtgcggaagaatgccaaaggttccacacagagtggccgagaagggcgggagcctggccccacacctcgggcccgaccccgggccccccacaagccccatgaggtgtttgtggagctgaatgagttgctcctggacaaaaaccaggagccccagtggcgggagacagctcgctggatcaaatttgaagaggacgtggaggaggagaccgagcgctgggggaagccccacgtggcctccctctccttccgcagtctcctggagctccgcaggaccctggcccatggggctgtgctcttggatctggaccagcagaccctgcccggagtggcccaccaggtggtggagcagatggtcatctctgaccagatcaaggccgaggacagggccaacgtgctgcgggctctgctgttgaaacacagccacccaagtgatgagaaggacttctccttcccccgcaacatctcagctggctccctgggctccctgctggggcatcaccatggtcagggggctgagagtgacccccacgtcaccgagcctctcatgggaggtgttcctgagacccggctggaggtggagcgagagcgtgagctgccgcctccagcaccaccagctggcatcacccgctccaagtccaagcacgagctgaaactgctggagaagattcctgagaatgccgaggccacggtggtccttgtgggctgcgtggagttcctctcccgccccaccatggcctttgtgcggctccgggaggctgtggagttggacgcagtgttggaggtgccggtgcctgtgcgtttcctcttcctgctgctgggcccgagtagtgccaacatggactaccacgagatcggccgctccatctccaccctcatgtcagacaagcaattccacgaggcagcctacctggctgacgagcgggaggacctgctgacggccatcaacgccttcctggactgcagcgtggtgctgccgccttcagaagtgcagggcgaggagctgctgcgctctgtggcccacttccagcgccagatgctcaagaagcgagaggagcagggccggctgctacctacaggggctgggctggagcccaaatctgcccaagataaggcgctcctgcagatggtagaggcggcaggggcagctgaagatgatccccttcggcggacggggcggccctttggggggctgatccgagatgtgcggcgccgctatccccactacctgagtgacttccgagatgcacttgaccctcagtgcctggccgcagtcatcttcatctactttgccgccctgtctcctgccatcacctttggggggctgctgggagagaagacacaggacctgataggggtgtcggagctgattatgtccacagcgctccagggcgtggtcttctgcctgctgggtgcccagcccctgttggtgatcggcttctcagggcccctgctggtctttgaggaggccttcttctcgttctgtagcagcaaccacctggagtacctggtgggccgtgtgtggatcggcttctggctggtgttcctggccctgctcatggtggccctggaggggagcttcctggtccgcttcgtctcccgcttcacccaggagatcttcgccttcttgatctcactcatcttcatctatgagaccttctacaagctggtgaagatcttccaggagcaccccctgcatggctgctcagcctccaacagctcagaggtggacggcggtgagaacatgacatgggccggggcaagacccacgctggggccgggcaacaggagcttggctgggcagtctgggcaggggaagccccggggccagcccaacacggccctgctgtcgctggtgctcatggccggcaccttcttcatcgccttcttcctgcgcaaattcaagaacagccggttctttcctggccggatccggcgggtgattggggactttggggtgcccatcgccatcctcatcatggtgcttgtggattacagtattgaggacacctatacccagaagctgagcgttcccagtggattctcggtgactgccccagaaaagaggggctgggtcatcaaccccctgggagagaagagccccttccctgtgtggatgatggttgccagcctgctgcccgccatcctggtcttcattctcatcttcatggagacacagatcaccacgctcatcatctccaagaaggagcgcatgctgcagaagggctccggcttccacctggacctgctgctcatcgtggccatgggcggcatctgtgccctctttggcctgccctggttggctgctgccactgtccgctctgtcactcacgccaacgcgctcactgtcatgagcaaggctgtggcacctggggacaagcccaagattcaggaagtcaaggagcagcgggtgacggggctgctggttgccctgcttgtgggcctctccatagttatcggggatctgctccggcagatccccctggccgtgctctttggaattttcctgtacatgggagtcacctcccttaacgggatccagttctatgagcggctgcatctgctgctcatgccgcccaaacaccacccagatgtcacttacgtcaagaaggtccggaccctccgtatgcacctgttcacggccctgcagctgctctgcctggccctgctctgggccgtcatgtccacagctgcctccctggccttccccttcatcctcatcctcacagtgccgctccgcatggtggtgctcacccgtatcttcaccgaccgagagatgaaatgtctggatgctaacgaggcagagccggtgtttgatgagcgggagggtgtggacgagtacaatgagatgcccatgcctgtgtagccgccaccgagggacagccgagggaccgatggacgaggggacaggctggtgggatggggttccccctcccatgcccctccctcctttttatttaagtgaataatttaaagtcttctcctcccccactgcccctgcagtaaagtgctttggccccca

SEQ ID NO: 308747 - DNA, 4260 bp, Homo sapiens
  misc_feature (61)..(61): n is a, c, g, or t
tgcccgcggcgcggtgggaaagttgagttgggagaagttgggagcggcgggggcgcgcccnggggtgggcacggggcagtcgtcgggagcgcgcgagtgcgccggaggacggggagagaccccgagacccccggggcacgaagtccagagcgagcgggttatgcctccgcctcgttgccctgaaagccgcagcgacagcgaaaagggctaagattcggccatgagcagcgcccctcggcgccccgccaagggcgcagattctttctgtacgccagagccagagagcttgggccctgggacgcctgggttccccgagcaggaggaagacgaacttcaccgcaccctgggcgtggagcggtttgaggagatcctacaggaggccgggtctcgtggaggggaggagccaggccgcagctatggggaggaagactttgagtgtgagggggcaggcaggggagggggaggtggggggatcaggtttgactgtccagcaaagaagggactggggtcctagtgggaggagtggggctagggggcaggatggcaggggagggacactgtgcctgccacagccaagtccccctcctccctgcagaccaccgccagtcctcccaccacatccatcacccactgtccacccacctgcctccggatgcacgccgccgcaagacaccccagggcccaggacggaagcctcgaaggcgcccgggagcctccccgactggagaaaccccgaccattgaggagggggaggaagatgaggatgaggccagcgaggctgagggggcccgggctctcactcagccgtcccctgtctccacaccctcctcggtgcagttctttctccaagaggatgacagtgctgaccggaaggcagagaggaccagtccatcttcccctgcaccactgccccaccaggaggcgactcctcgggcctccaaaggggcccaggctggaacccaggtggaggaggcggaggcggaggcggtggcggtggccagtggcactgcagggggtgacgacgggggtgcctcggggcgccccctgcccaaagcccagcctgggcaccgcagctacaaccttcaggagaggaggcgcatcgggagcatgactggggctgagcaggcactgctgccccgggtccccacggatgagattgaggcccagacgctggccacggccgacctagacctcatgaagagtcaccggtttgaggacgttcctggggtgcggcggcacttggtgcggaagaatgccaaaggttccacacagagtggccgagaagggcgggagcctggccccacacctcgggcccgaccccgggccccccacaagccccatgaggtgtttgtggagctgaatgagttgctcctggacaaaaaccaggagccccagtggcgggagacagctcgctggatcaaatttgaagaggacgtggaggaggagaccgagcgctgggggaagccccacgtggcctccctctccttccgcagtctcctggagctccgcaggaccctggcccatggggctgtgctcttggatctggaccagcagaccctgcccggagtggcccaccaggtggtggagcagatggtcatctctgaccagatcaaggccgaggacagggccaacgtgctgcgggctctgctgttgaaacacagccacccaagtgatgagaaggacttctccttcccccgcaacatctcagctggctccctgggctccctgctggggcatcaccatggtcagggggctgagagtgacccccacgtcaccgagcctctcatgggaggtgttcctgagacccggctggaggtggagcgagagcgtgagctgccgcctccagcaccaccagctggcatcacccgctccaagtccaagcacgagctgaaactgctggagaagattcctgagaatgccgaggccacggtggtccttgtgggctgcgtggagttcctctcccgccccaccatggcctttgtgcggctccgggaggctgtggagttggacgcagtgttggaggtgccggtgcctgtgcgtttcctcttcctgctgctgggcccgagtagtgccaacatggactaccacgagatcggccgctccatctccaccctcatgtcagacaagcaattccacgaggcagcctacctggctgacgagcgggaggacctgctgacggccatcaacgccttcctggactgcagcgtggtgctgccgccttcagaagtgcagggcgaggagctgctgcgctctgtggcccacttccagcgccagatgctcaagaagcgagaggagcagggccggctgctacctacaggggctgggctggagcccaaatctgcccaagataaggcgctcctgcagatggtagaggcggcaggggcagctgaagatgatccccttcggcggacggggcggccctttggggggctgatccgagatgtgcggcgccgctatccccactacctgagtgacttccgagatgcacttgaccctcagtgcctggccgcagtcatcttcatctactttgccgccctgtctcctgccatcacctttggggggctgctgggagagaagacacaggacctgataggggtgtcggagctgattatgtccacagcgctccagggcgtggtcttctgcctgctgggtgcccagcccctgttggtgatcggcttctcagggcccctgctggtctttgaggaggccttcttctcgttctgtagcagcaaccacctggagtacctggtgggccgtgtgtggatcggcttctggctggtgttcctggccctgctcatggtggccctggaggggagcttcctggtccgcttcgtctcccgcttcacccaggagatcttcgccttcttgatctcactcatcttcatctatgagaccttctacaagctggtgaagatcttccaggagcaccccctgcatggctgctcagcctccaacagctcagaggtggacggcggtgagaacatgacatgggccggggcaagacccacgctggggccgggcaacaggagcttggctgggcagtctgggcaggggaagccccggggccagcccaacacggccctgctgtcgctggtgctcatggccggcaccttcttcatcgccttcttcctgcgcaaattcaagaacagccggttctttcctggccggatccggcgggtgattggggactttggggtgcccatcgccatcctcatcatggtgcttgtggattacagtattgaggacacctatacccagaagctgagcgttcccagtggattctcggtgactgccccagaaaagaggggctgggtcatcaaccccctgggagagaagagccccttccctgtgtggatgatggttgccagcctgctgcccgccatcctggtcttcattctcatcttcatggagacacagatcaccacgctcatcatctccaagaaggagcgcatgctgcagaagggctccggcttccacctggacctgctgctcatcgtggccatgggcggcatctgtgccctctttggcctgccctggttggctgctgccactgtccgctctgtcactcacgccaacgcgctcactgtcatgagcaaggctgtggcacctggggacaagcccaagattcaggaagtcaaggagcagcgggtgacggggctgctggttgccctgcttgtgggcctctccatagttatcggggatctgctccggcagatccccctggccgtgctctttggaattttcctgtacatgggagtcacctcccttaacgggatccagttctatgagcggctgcatctgctgctcatgccgcccaaacaccacccagatgtcacttacgtcaagaaggtccggaccctccgtatgcacctgttcacggccctgcagctgctctgcctggccctgctctgggccgtcatgtccacagctgcctccctggccttccccttcatcctcatcctcacagtgccgctccgcatggtggtgctcacccgtatcttcaccgaccgagagatgaaatgtctggatgctaacgaggcagagccggtgtttgatgagcgggagggtgtggacgagtacaatgagatgcccatgcctgtgtagccgccaccgagggacagccgagggaccgatggacgaggggacaggctggtgggatggggttccccctcccatgcccctccctcctttttatttaagtgaataatttaaagtcttctcctcccccactgcccctgcagtaaagtgctttggccccca

SEQ ID NO: 308748 - DNA, 3979 bp, Homo sapiens
cttctgtgccttcctctctctcagtgagtgagtggagttgagctcctgccctccacccagccagcctgcttccctcctgccggtccccaaggacctgggggagggaagcctcctgccggcctgtactggggagggggcaccccctccctgcaggggcatcttgggctctctccagagttcttccattcgtctgcttcctgtctcggcagcccggccccggctccacggggtgtctcaccctccccaccacaccctctctggtctcaggcccacctctggttatgcctccgcctcgttgccctgaaagccgcagcgacagcgaaaagggctaagattcggccatgagcagcgcccctcggcgccccgccaagggcgcagattctttctgtacgcccagggcccaggacggaagcctcgaaggcgcccgggagcctccccgactggagaaaccccgaccattgaggagggggaggaagatgaggatgaggccagcgaggctgagggggcccgggctctcactcagccgtcccctgtctccacaccctcctcggtgcagttctttctccaagaggatgacagtgctgaccggaaggcagagaggaccagtccatcttcccctgcaccactgccccaccaggaggcgactcctcgggcctccaaaggggcccaggctggaacccaggtggaggaggcggaggcggaggcggtggcggtggccagtggcactgcagggggtgacgacgggggtgcctcggggcgccccctgcccaaagcccagcctgggcaccgcagctacaaccttcaggagaggaggcgcatcgggagcatgactggggctgagcaggcactgctgccccgggtccccacggatgagattgaggcccagacgctggccacggccgacctagacctcatgaagagtcaccggtttgaggacgttcctggggtgcggcggcacttggtgcggaagaatgccaaaggttccacacagagtggccgagaagggcgggagcctggccccacacctcgggcccgaccccgggccccccacaagccccatgaggtgtttgtggagctgaatgagttgctcctggacaaaaaccaggagccccagtggcgggagacagctcgctggatcaaatttgaagaggacgtggaggaggagaccgagcgctgggggaagccccacgtggcctccctctccttccgcagtctcctggagctccgcaggaccctggcccatggggctgtgctcttggatctggaccagcagaccctgcccggagtggcccaccaggtggtggagcagatggtcatctctgaccagatcaaggccgaggacagggccaacgtgctgcgggctctgctgttgaaacacagccacccaagtgatgagaaggacttctccttcccccgcaacatctcagctggctccctgggctccctgctggggcatcaccatggtcagggggctgagagtgacccccacgtcaccgagcctctcatgggaggtgttcctgagacccggctggaggtggagcgagagcgtgagctgccgcctccagcaccaccagctggcatcacccgctccaagtccaagcacgagctgaaactgctggagaagattcctgagaatgccgaggccacggtggtccttgtgggctgcgtggagttcctctcccgccccaccatggcctttgtgcggctccgggaggctgtggagttggacgcagtgttggaggtgccggtgcctgtgcgtttcctcttcctgctgctgggcccgagtagtgccaacatggactaccacgagatcggccgctccatctccaccctcatgtcagacaagcaattccacgaggcagcctacctggctgacgagcgggaggacctgctgacggccatcaacgccttcctggactgcagcgtggtgctgccgccttcagaagtgcagggcgaggagctgctgcgctctgtggcccacttccagcgccagatgctcaagaagcgagaggagcagggccggctgctacctacaggggctgggctggagcccaaatctgcccaagataaggcgctcctgcagatggtagaggcggcaggggcagctgaagatgatccccttcggcggacggggcggccctttggggggctgatccgagatgtgcggcgccgctatccccactacctgagtgacttccgagatgcacttgaccctcagtgcctggccgcagtcatcttcatctactttgccgccctgtctcctgccatcacctttggggggctgctgggagagaagacacaggacctgataggggtgtcggagctgattatgtccacagcgctccagggcgtggtcttctgcctgctgggtgcccagcccctgttggtgatcggcttctcagggcccctgctggtctttgaggaggccttcttctcgttctgtagcagcaaccacctggagtacctggtgggccgtgtgtggatcggcttctggctggtgttcctggccctgctcatggtggccctggaggggagcttcctggtccgcttcgtctcccgcttcacccaggagatcttcgccttcttgatctcactcatcttcatctatgagaccttctacaagctggtgaagatcttccaggagcaccccctgcatggctgctcagcctccaacagctcagaggtggacggcggtgagaacatgacatgggccggggcaagacccacgctggggccgggcaacaggagcttggctgggcagtctgggcaggggaagccccggggccagcccaacacggccctgctgtcgctggtgctcatggccggcaccttcttcatcgccttcttcctgcgcaaattcaagaacagccggttctttcctggccggatccggcgggtgattggggactttggggtgcccatcgccatcctcatcatggtgcttgtggattacagtattgaggacacctatacccagaagctgagcgttcccagtggattctcggtgactgccccagaaaagaggggctgggtcatcaaccccctgggagagaagagccccttccctgtgtggatgatggttgccagcctgctgcccgccatcctggtcttcattctcatcttcatggagacacagatcaccacgctcatcatctccaagaaggagcgcatgctgcagaagggctccggcttccacctggacctgctgctcatcgtggccatgggcggcatctgtgccctctttggcctgccctggttggctgctgccactgtccgctctgtcactcacgccaacgcgctcactgtcatgagcaaggctgtggcacctggggacaagcccaagattcaggaagtcaaggagcagcgggtgacggggctgctggttgccctgcttgtgggcctctccatagttatcggggatctgctccggcagatccccctggccgtgctctttggaattttcctgtacatgggagtcacctcccttaacgggatccagttctatgagcggctgcatctgctgctcatgccgcccaaacaccacccagatgtcacttacgtcaagaaggtccggaccctccgtatgcacctgttcacggccctgcagctgctctgcctggccctgctctgggccgtcatgtccacagctgcctccctggccttccccttcatcctcatcctcacagtgccgctccgcatggtggtgctcacccgtatcttcaccgaccgagagatgaaatgtctggatgctaacgaggcagagccggtgtttgatgagcgggagggtgtggacgagtacaatgagatgcccatgcctgtgtagccgccaccgagggacagccgagggaccgatggacgaggggacaggctggtgggatggggttccccctcccatgcccctccctcctttttatttaagtgaataatttaaagtcttctcctcccccactgcccctgcagtaaagtgctttggccccca

SEQ ID NO: 308749 - DNA, 4360 bp, Homo sapiens
  misc_feature (61)..(61): n is a, c, g, or t
tgcccgcggcgcggtgggaaagttgagttgggagaagttgggagcggcgggggcgcgcccnggggtgggcacggggcagtcgtcgggagcgcgcgagtgcgccggaggacggggagagaccccgagacccccggggcacgaagtccagagcgagcgggttatgcctccgcctcgttgccctgaaagccgcagcgacagcgaaaagggctaagattcggccatgagcagcgcccctcggcgccccgccaagggcgcagattctttctgtacgccagagccagagagcttgggccctgggacgcctgggttccccgagcaggaggaagacgaacttcaccgcaccctgggcgtggagcggtttgaggagatcctacaggaggccgggtctcgtggaggggaggagccaggccgcagctatggggaggaagactttgagtaccaccgccagtcctcccaccacatccatcacccactgtccacccacctgcctccggatgcacgccgccgcaagacaccccagggcccaggacggaagcctcgaaggcgcccgggagcctccccgactggagaaaccccgaccattgaggagggggaggaagatgaggatgaggccagcgaggctgagggggcccgggctctcactcagccgtcccctgtctccacaccctcctcggtgcagttctttctccaagaggatgacagtgctgaccggaaggcagagaggaccagtccatcttcccctgcaccactgccccaccaggaggcgactcctcgggcctccaaaggggcccaggctggaacccaggtggaggaggcggaggcggaggcggtggcggtggccagtggcactgcagggggtgacgacgggggtgcctcggggcgccccctgcccaaagcccagcctgggcaccgcagctacaaccttcaggagaggaggcgcatcgggagcatgactggggctgagcaggcactgctgccccgggtccccacggatgagattgaggcccagacgctggccacggccgacctagacctcatgaagagtcaccggtttgaggacgttcctggggtgcggcggcacttggtgcggaagaatgccaaaggttccacacagagtggccgagaagggcgggagcctggccccacacctcgggcccgaccccgggccccccacaagccccatgaggtgtttgtggagctgaatgagttgctcctggacaaaaaccaggagccccagtggcgggagacagctcgctggatcaaatttgaagaggacgtggaggaggagaccgagcgctgggggaagccccacgtggcctccctctccttccgcagtctcctggagctccgcaggaccctggcccatggggctgtgctcttggatctggaccagcagaccctgcccggagtggcccaccaggtggtggagcagatggtcatctctgaccagatcaaggccgaggacagggccaacgtgctgcgggctctgctgttgaaacacagccacccaagtgatgagaaggacttctccttcccccgcaacatctcagctggctccctgggctccctgctggggcatcaccatggtcagggggctgagagtgacccccacgtcaccgagcctctcatgggaggtgttcctgagacccggctggaggtggagcgagagcgtgagctgccgcctccagcaccaccagctggcatcacccgctccaagtccaagcacgagctgaaactgctggagaagattcctgagaatgccgaggccacggtggtccttgtgggctgcgtggagttcctctcccgccccaccatggcctttgtgcggctccgggaggctgtggagttggacgcagtgttggaggtgccggtgcctgtgcgtttcctcttcctgctgctgggcccgagtagtgccaacatggactaccacgagatcggccgctccatctccaccctcatgtcagacaagcaattccacgaggcagcctacctggctgacgagcgggaggacctgctgacggccatcaacgccttcctggactgcagcgtggtgctgccgccttcagaagtgcagggcgaggagctgctgcgctctgtggcccacttccagcgccagatgctcaagaagcgagaggagcagggccggctgctacctacaggggctgggctggagcccaaatctgcccaagataaggcgctcctgcagatggtagaggcggcaggggcagctgaagatgatccccttcggcggacggggcggccctttggggggctgatccgagatgtgcggcgccgctatccccactacctgagtgacttccgagatgcacttgaccctcagtgcctggccgcagtcatcttcatctactttgccgccctgtctcctgccatcacctttggggggctgctgggagagaagacacaggacctgataggggtgtcggagctgattatgtccacagcgctccagggcgtggtcttctgcctgctgggtgcccagcccctgttggtgatcggcttctcagggcccctgctggtctttgaggaggccttcttctcgttctgtagcagcaaccacctggagtacctggtgggccgtgtgtggatcggcttctggctggtgttcctggccctgctcatggtggccctggaggggagcttcctggtccgcttcgtctcccgcttcacccaggagatcttcgccttcttgatctcactcatcttcatctatgagaccttctacaagctggtgaagatcttccaggagcaccccctgcatggctgctcagcctccaacagctcagaggtggacggcggtgagaacatgacatgggccggggcaagacccacgctggggccgggcaacaggagcttggctgggcagtctgggcaggggaagccccggggccagcccaacacggccctgctgtcgctggtgctcatggccggcaccttcttcatcgccttcttcctgcgcaaattcaagaacagccggttctttcctggccggatccggcgggtgattggggactttggggtgcccatcgccatcctcatcatggtgcttgtggattacagtattgaggacacctatacccagaagctgagcgttcccagtggattctcggtgactgccccagaaaagaggggctgggtcatcaaccccctgggagagaagagccccttccctgtgtggatgatggttgccagcctgctgcccgccatcctggtcttcattctcatcttcatggagacacagatcaccacgctcatcatctccaagaaggagcgcatgctgcagaagggctccggcttccacctggacctgctgctcatcgtggccatgggcggcatctgtgccctctttggcctgccctggttggctgctgccactgtccgctctgtcactcacgccaacgcgctcactgtcatgagcaaggctgtggcacctggggacaagcccaagattcaggaagtcaaggagcagcgggtgacggggctgctggttgccctgcttgtgggcctctccatagttatcggggatctgctccggcagatccccctggccgtgctctttggaattttcctgtacatgggagtcacctcccttaacgggatccagttctatgagcggctgcatctgctgctcatgccgcccaaacaccacccagatgtcacttacgtcaagaaggtccggaccctccgtatgcacctgttcacggccctgcagctgctctgcctggccctgctctgggccgtcatgtccacagctgcctccctggccttccccttcatcctcatcctcacagtgccgctccgcatggtggtgctcacccgtatcttcaccgaccgagagatgaaatgtctggatgctaacgaggcagagccggtgtttgatgagcgggagggtgtggacgagtacaatgagatgcccatgcctgtgtagccgccaccgagggacagccgagggaccgatggacgaggggacaggctggtgggatggggttccccctcccatgcccctccctcctttttatttaagtgaataatttaaagtcttctcctcccccactgcccctgcagtaaagtgctttggcccccaaaaaaaaaaaaacacaacacgacacacacacaactcgtgtgtgtgggccgacatgtggacctcgtcgaaaaaagatttttctcagacaccactcgctttggggggcgcggggacgcccagtgatgattaatcgcgcaacgtgcgccagcagcgtgtccccaaaagcaactcgcggcccagacctggggcggcgggtctttccccaccaattaaaaagcgcggggggaacacaggcggtctggaaccaatccagtgggg

SEQ ID NO: 308750 - DNA, 4705 bp, Homo sapiens
  misc_feature (61)..(61): n is a, c, g, or t
tgcccgcggcgcggtgggaaagttgagttgggagaagttgggagcggcgggggcgcgcccnggggtgggcacggggcagtcgtcgggagcgcgcgagtgcgccggaggacggggagagaccccgagacccccggggcacgaagtccagagcgagcgggttatgcctccgcctcgttgccctgaaagccgcagcgacagcgaaaagggctaagattcggccatgagcagcgcccctcggcgccccgccaagggcgcagattctttctgtacgccagagccagagagcttgggccctgggacgcctgggttccccgagcaggaggaagacgaacttcaccgcaccctgggcgtggagcggtttgaggagatcctacaggaggccgggtctcgtggaggggaggagccaggccgcagctatggggaggaagactttgagtaccaccgccagtcctcccaccacatccatcacccactgtccacccacctgcctccggatgcacgccgccgcaagacaccccagggcccaggacggaagcctcgaaggcgcccgggagcctccccgactggagaaaccccgaccattgaggagggggaggaagatgaggatgaggccagcgaggctgagggggcccgggctctcactcagccgtcccctgtctccacaccctcctcggtgcagttctttctccaagaggatgacagtgctgaccggaaggcagagaggaccagtccatcttcccctgcaccactgccccaccaggaggcgactcctcgggcctccaaaggggcccaggctggaacccaggtggaggaggcggaggcggaggcggtggcggtggccagtggcactgcagggggtgacgacgggggtgcctcggggcgccccctgcccaaagcccagcctgggcaccgcagctacaaccttcaggagaggaggcgcatcgggagcatgactggggctgagcaggcactgctgccccgggtccccacggatgagattgaggcccagacgctggccacggccgacctagacctcatgaagagtcaccggtttgaggacgttcctggggtgcggcggcacttggtgcggaagaatgccaaaggttccacacagagtggccgagaagggcgggagcctggccccacacctcgggcccgaccccgggccccccacaagccccatgaggtgtttgtggagctgaatgagttgctcctggacaaaaaccaggagccccagtggcgggagacagctcgctggatcaaatttgaagaggacgtggaggaggagaccgagcgctgggggaagccccacgtggcctccctctccttccgcagtctcctggagctccgcaggaccctggcccatggggctgtgctcttggatctggaccagcagaccctgcccggagtggcccaccaggtggtggagcagatggtcatctctgaccagatcaaggccgaggacagggccaacgtgctgcgggctctgctgttgaaacacagccacccaagtgatgagaaggacttctccttcccccgcaacatctcagctggctccctgggctccctgctggggcatcaccatggtcagggggctgagagtgacccccacgtcaccgagcctctcatgggaggtgttcctgagacccggctggaggtggagcgagagcgtgagctgccgcctccagcaccaccagctggcatcacccgctccaagtccaagcacgagctgaaactgctggagaagattcctgagaatgccgaggccacggtggtccttgtgggctgcgtggagttcctctcccgccccaccatggcctttgtgcggctccgggaggctgtggagttggacgcagtgttggaggtgccggtgcctgtgcgtttcctcttcctgctgctgggcccgagtagtgccaacatggactaccacgagatcggccgctccatctccaccctcatgtcagacaagcaattccacgaggcagcctacctggctgacgagcgggaggacctgctgacggccatcaacgccttcctggactgcagcgtggtgctgccgccttcagaagtgcagggcgaggagctgctgcgctctgtggcccacttccagcgccagatgctcaagaagcgagaggagcagggccggctgctacctacaggggctgggctggagcccaaatctgcccaagataaggcgctcctgcagatggtagaggcggcaggggcagctgaagatgatccccttcggcggacggggcggccctttggggggctgatccgagatgtgcggcgccgctatccccactacctgagtgacttccgagatgcacttgaccctcagtgcctggccgcagtcatcttcatctactttgccgccctgtctcctgccatcacctttggggggctgctgggagagaagacacaggacctgataggggtgtcggagctgattatgtccacagcgctccagggcgtggtcttctgcctgctgggtgcccagcccctgttggtgatcggcttctcagggcccctgctggtctttgaggaggccttcttctcgttctgtagcagcaaccacctggagtacctggtgggccgtgtgtggatcggcttctggctggtgttcctggccctgctcatggtggccctggaggggagcttcctggtccgcttcgtctcccgcttcacccaggagatcttcgccttcttgatctcactcatcttcatctatgagaccttctacaagctggtgaagatcttccaggagcaccccctgcatggctgctcagcctccaacagctcagaggtggacggcggtgagaacatgacatgggccggggcaagacccacgctggggccgggcaacaggagcttggctgggcagtctgggcaggggaagccccggggccagcccaacacggccctgctgtcgctggtgctcatggccggcaccttcttcatcgccttcttcctgcgcaaattcaagaacagccggttctttcctggccggatccggcgggtgattggggactttggggtgcccatcgccatcctcatcatggtgcttgtggattacagtattgaggacacctatacccagaagctgagcgttcccagtggattctcggtgactgccccagaaaagaggggctgggtcatcaaccccctgggagagaagagccccttccctgtgtggatgatggttgccagcctgctgcccgccatcctggtcttcattctcatcttcatggagacacagatcaccacgctcatcatctccaagaaggagcgcatgctgcagaagggctccggcttccacctggacctgctgctcatcgtggccatgggcggcatctgtgccctctttggcctgccctggttggctgctgccactgtccgctctgtcactcacgccaacgcgctcactgtcatgagcaaggctgtggcacctggggacaagcccaagattcaggaagtcaaggagcagcgggtgacggggctgctggttgccctgcttgtgggcctctccatagttatcggggatctgctccggcagatccccctggccgtgctctttggaattttcctgtacatgggagtcacctcccttaacgggatccagttctatgagcggctgcatctgctgctcatgccgcccaaacaccacccagatgtcacttacgtcaagaaggtccggaccctccgtatgcacctgttcacggccctgcagctgctctgcctggccctgctctgggccgtcatgtccacagctgcctccctggccttccccttcatcctcatcctcacagtgccgctccgcatggtggtgctcacccgtatcttcaccgaccgagagatgaaatgtctggatgctaacgaggcagagccggtgtttgatgagcgggagggtgtggacgagtacaatgagatgcccatgcctgtgtagccgccaccgagggacagccgagggaccgatggacgaggggacaggctggtgggatggggttccccctcccatgcccctccctcctttttatttaagtgaataatttaaagtcttctcctcccccactgcccctgcagtaaagtgctttggcccccaaaaaaaaaaaaaaataaaaaaaaaaaaaaaagaaaaagcccaacaagagaaccacaactatccaacaaccaacaaagggagggcggcaaggcagctaaagacgaacaccaccgcaggcggcggcgcacaccatacaaactaagaaccgacacaactgtagaaagagacgcgcaaacgaacacatcggaggccgaaacaaaacacgaacaaagcacagaagcgacagacaaacaacaccagccggacagcgcatagaaaacaacgccaccagatgcggcctcacctgaaggagccgcaaccaccacacacagcatcggtgatgcgagaaagccggcgacgaacagacacccaacacggcacacagcaccaccaacgcgaactcagaaccaccagacgtagcgacgagtgcacaccgaagaaacgacggacccgtcagaacaagctaggagcaaggctacagcagaaacacacaaaacacccggcgaccagcacaacgcagaccgaacgacacccctcaccgcacgcacgcagcgacagcacgtatagatataacagaccccgacacgccaactagacgagcacggaaacaacagccgcacacgc

SEQ ID NO: 308751 - DNA, 4424 bp, Homo sapiens
  misc_feature (61)..(61): n is a, c, g, or t
tgcccgcggcgcggtgggaaagttgagttgggagaagttgggagcggcgggggcgcgcccnggggtgggcacggggcagtcgtcgggagcgcgcgagtgcgccggaggacggggagagaccccgagacccccggggcacgaagtccagagcgagcgggttatgcctccgcctcgttgccctgaaagccgcagcgacagcgaaaagggctaagattcggccatgagcagcgcccctcggcgccccgccaagggcgcagattctttctgtacgccagagccagagagcttgggccctgggacgcctgggttccccgagcaggaggaagacgaacttcaccgcaccctgggcgtggagcggtttgaggagatcctacaggaggccgggtctcgtggaggggaggagccaggccgcagctatggggaggaagactttgagtaccaccgccagtcctcccaccacatccatcacccactgtccacccacctgcctccggatgcacgccgccgcaagacaccccagggcccaggacggaagcctcgaaggcgcccgggagcctccccgactggagaaaccccgaccattgaggagggggaggaagatgaggatgaggccagcgaggctgagggggcccgggctctcactcagccgtcccctgtctccacaccctcctcggtgcagttctttctccaagaggatgacagtgctgaccggaaggcagagaggaccagtccatcttcccctgcaccactgccccaccaggaggcgactcctcgggcctccaaaggggcccaggctggaacccaggtggaggaggcggaggcggaggcggtggcggtggccagtggcactgcagggggtgacgacgggggtgcctcggggcgccccctgcccaaagcccagcctgggcaccgcagctacaaccttcaggagaggaggcgcatcgggagcatgactggggctgagcaggcactgctgccccgggtccccacggatgagattgaggcccagacgctggccacggccgacctagacctcatgaagagtcaccggtttgaggacgttcctggggtgcggcggcacttggtgcggaagaatgccaaaggttccacacagagtggccgagaagggcgggagcctggccccacacctcgggcccgaccccgggccccccacaagccccatgaggtgtttgtggagctgaatgagttgctcctggacaaaaaccaggagccccagtggcgggagacagctcgctggatcaaatttgaagaggacgtggaggaggagaccgagcgctgggggaagccccacgtggcctccctctccttccgcagtctcctggagctccgcaggaccctggcccatggggctgtgctcttggatctggaccagcagaccctgcccggagtggcccaccaggtggtggagcagatggtcatctctgaccagatcaaggccgaggacagggccaacgtgctgcgggctctgctgttgaaacacagccacccaagtgatgagaaggacttctccttcccccgcaacatctcagctggctccctgggctccctgctggggcatcaccatggtcagggggctgagagtgacccccacgtcaccgagcctctcatgggaggtgttcctgagacccggctggaggtggagcgagagcgtgagctgccgcctccagcaccaccagctggcatcacccgctccaagtccaagcacgagctgaaactgctggagaagattcctgagaatgccgaggccacggtggtccttgtgggctgcgtggagttcctctcccgccccaccatggcctttgtgcggctccgggaggctgtggagttggacgcagtgttggaggtgccggtgcctgtgcgtttcctcttcctgctgctgggcccgagtagtgccaacatggactaccacgagatcggccgctccatctccaccctcatgtcagacaagcaattccacgaggcagcctacctggctgacgagcgggaggacctgctgacggccatcaacgccttcctggactgcagcgtggtgctgccgccttcagaagtgcagggcgaggagctgctgcgctctgtggcccacttccagcgccagatgctcaagaagcgagaggagcagggccggctgctacctacaggggctgggctggagcccaaatctgcccaagataaggcgctcctgcagatggtagaggcggcaggggcagctgaagatgatccccttcggcggacggggcggccctttggggggctgatccgagatgtgcggcgccgctatccccactacctgagtgacttccgagatgcacttgaccctcagtgcctggccgcagtcatcttcatctactttgccgccctgtctcctgccatcacctttggggggctgctgggagagaagacacaggacctgataggggtgtcggagctgattatgtccacagcgctccagggcgtggtcttctgcctgctgggtgcccagcccctgttggtgatcggcttctcagggcccctgctggtctttgaggaggccttcttctcgttctgtagcagcaaccacctggagtacctggtgggccgtgtgtggatcggcttctggctggtgttcctggccctgctcatggtggccctggaggggagcttcctggtccgcttcgtctcccgcttcacccaggagatcttcgccttcttgatctcactcatcttcatctatgagaccttctacaagctggtgaagatcttccaggagcaccccctgcatggctgctcagcctccaacagctcagaggtggacggcggtgagaacatgacatgggccggggcaagacccacgctggggccgggcaacaggagcttggctgggcagtctgggcaggggaagccccggggccagcccaacacggccctgctgtcgctggtgctcatggccggcaccttcttcatcgccttcttcctgcgcaaattcaagaacagccggttctttcctggccggatccggcgggtgattggggactttggggtgcccatcgccatcctcatcatggtgcttgtggattacagtattgaggacacctatacccagaagctgagcgttcccagtggattctcggtgactgccccagaaaagaggggctgggtcatcaaccccctgggagagaagagccccttccctgtgtggatgatggttgccagcctgctgcccgccatcctggtcttcattctcatcttcatggagacacagatcaccacgctcatcatctccaagaaggagcgcatgctgcagaagggctccggcttccacctggacctgctgctcatcgtggccatgggcggcatctgtgccctctttggcctgccctggttggctgctgccactgtccgctctgtcactcacgccaacgcgctcactgtcatgagcaaggctgtggcacctggggacaagcccaagattcaggaagtcaaggagcagcgggtgacggggctgctggttgccctgcttgtgggcctctccatagttatcggggatctgctccggcagatccccctggccgtgctctttggaattttcctgtacatgggagtcacctcccttaacgggatccagttctatgagcggctgcatctgctgctcatgccgcccaaacaccacccagatgtcacttacgtcaagaaggtccggaccctccgtatgcacctgttcacggccctgcagctgctctgcctggccctgctctgggccgtcatgtccacagctgcctccctggccttccccttcatcctcatcctcacagtgccgctccgcatggtggtgctcacccgtatcttcaccgaccgagagatgaaatgtctggatgctaacgaggcagagccggtgtttgatgagcgggagggtgtggacgagtacaatgagatgcccatgcctgtgtagccgccaccgagggacagccgagggaccgatggacgaggggacaggctggtgggatggggttccccctcccatgcccctccctcctttttatttaagtgaataatttaaagtcttctcctcccccactgcccctgcagtaaagtgctttggcccccaaaacaaaaacaaaaaaaaacttctctggggattcttatgtgttggggagttggggagaaagggggttatgtgaactgggcccaatgtggctcattagcgtgtttctcctgtgacccagtttccttgtggtcccacagggtggttagtaaccttgcgggttctccccatattaggtgagtctgcggtatttagtttgtcgaataagcccgggtttaaccccgggcatttacgtgacttccgcaaaaccgggacaaagaatgccagaaccggaatggtgagagcacacgcgtatttacggcaacgaaacactaaaaggatacac

SEQ ID NO: 308752 - DNA, 4012 bp, Homo sapiens
  misc_feature (61)..(61): n is a, c, g, or t
tgcccgcggcgcggtgggaaagttgagttgggagaagttgggagcggcgggggcgcgcccnggggtgggcacggggcagtcgtcgggagcgcgcgagtgcgccggaggacggggagagaccccgagacccccggggcacgaagtccagagcgagcgggttatgcctccgcctcgttgccctgaaagccgcagcgacagcgaaaagggctaagattcggccatgagcagcgcccctcggcgccccgccaagggcgcagattctttctgtacgccagagccagagagcttgggccctgggacgcctgggttccccgagcaggaggaagacgaacttcaccgcaccctgggcgtggagcggtttgaggagatcctacaggaggccgggtctcgtggaggggaggagccaggccgcagctatggggaggaagactttgagtaccaccgccagtcctcccaccacatccatcacccactgtccacccacctgcctccggatgcacgccgccgcaagacaccccagggcccaggacggaagcctcgaaggcgcccgggagcctccccgactggagaaaccccgaccattgaggagggggaggaagatgaggatgaggccagcgaggctgagggggcccgggctctcactcagccgtcccctgtctccacaccctcctcggtgcagttctttctccaagaggatgacagtgctgaccggaaggcagagaggaccagtccatcttcccctgcaccactgccccaccaggaggcgactcctcgggcctccaaaggggcccaggctggaacccaggtggaggaggcggaggcggaggcggtggcggtggccagtggcactgcagggggtgacgacgggggtgcctcggggcgccccctgcccaaagcccagcctgggcaccgcagctacaaccttcaggagaggaggcgcatcgggagcatgactggggctgagcaggcactgctgccccgggtccccacggatgagattgaggcccagacgctggccacggccgacctagacctcatgaagagtcaccggtttgaggacgttcctggggtgcggcggcacttggtgcggaagaatgccaaaggttccacacagagtggccgagaagggcgggagcctggccccacacctcgggcccgaccccgggccccccacaagccccatgaggtgtttgtggagctgaatgagttgctcctggacaaaaaccaggagccccagtggcgggagacagctcgctggatcaaatttgaagaggacgtggaggaggagaccgagcgctgggggaagccccacgtggcctccctctccttccgcagtctcctggagctccgcaggaccctggcccatggggctgtgctcttggatctggaccagcagaccctgcccggagtggcccaccaggtggtggagcagatggtcatctctgaccagatcaaggccgaggacagggccaacgtgctgcgggctctgctgttgaaacacagccacccaagtgatgagaaggacttctccttcccccgcaacatctcagctggctccctgggctccctgctggggcatcaccatggtcagggggctgagagtgacccccacgtcaccgagcctctcatgggaggtgttcctgagacccggctggaggtggagcgagagcgtgagctgccgcctccagcaccaccagctggcatcacccgctccaagtccaagcacgagctgaaactgctggagaagattcctgagaatgccgaggccacggtggtccttgtgggctgcgtggagttcctctcccgccccaccatggcctttgtgcggctccgggaggctgtggagttggacgcagtgttggaggtgccggtgcctgtgcgtttcctcttcctgctgctgggcccgagtagtgccaacatggactaccacgagatcggccgctccatctccaccctcatgtcagacaagcaattccacgaggcagcctacctggctgacgagcgggaggacctgctgacggccatcaacgccttcctggactgcagcgtggtgctgccgccttcagaagtgcagggcgaggagctgctgcgctctgtggcccacttccagcgccagatgctcaagaagcgagaggagcagggccggctgctacctacaggggctgggctggagcccaaatctgcccaagataaggcgctcctgcagatggtagaggcggcaggggcagctgaagatgatccccttcggcggacggggcggccctttggggggctgatccgagatgtgcggcgccgctatccccactacctgagtgacttccgagatgcacttgaccctcagtgcctggccgcagtcatcttcatctactttgccgccctgtctcctgccatcacctttggggggctgctgggagagaagacacaggacctgataggggtgtcggagctgattatgtccacagcgctccagggcgtggtcttctgcctgctgggtgcccagcccctgttggtgatcggcttctcagggcccctgctggtctttgaggaggccttcttctcgttctgtagcagcaaccacctggagtacctggtgggccgtgtgtggatcggcttctggctggtgttcctggccctgctcatggtggccctggaggggagcttcctggtccgcttcgtctcccgcttcacccaggagatcttcgccttcttgatctcactcatcttcatctatgagaccttctacaagctggtgaagatcttccaggagcaccccctgcatggctgctcagcctccaacagctcagaggtggacggcggtgagaacatgacatgggccggggcaagacccacgctggggccgggcaacaggagcttggctgggcagtctgggcaggggaagccccggggccagcccaacacggccctgctgtcgctggtgctcatggccggcaccttcttcatcgccttcttcctgcgcaaattcaagaacagccggttctttcctggccggaagctgagcgttcccagtggattctcggtgactgccccagaaaagaggggctgggtcatcaaccccctgggagagaagagccccttccctgtgtggatgatggttgccagcctgctgcccgccatcctggtcttcattctcatcttcatggagacacagatcaccacgctcatcatctccaagaaggagcgcatgctgcagaagggctccggcttccacctggacctgctgctcatcgtggccatgggcggcatctgtgccctctttggcctgccctggttggctgctgccactgtccgctctgtcactcacgccaacgcgctcactgtcatgagcaaggctgtggcacctggggacaagcccaagattcaggaagtcaaggagcagcgggtgacggggctgctggttgccctgcttgtgggcctctccatagttatcggggatctgctccggcagatccccctggccgtgctctttggaattttcctgtacatgggagtcacctcccttaacgggatccagttctatgagcggctgcatctgctgctcatgccgcccaaacaccacccagatgtcacttacgtcaagaaggtccggaccctccgtatgcacctgttcacggccctgcagctgctctgcctggccctgctctgggccgtcatgtccacagctgcctccctggccttccccttcatcctcatcctcacagtgccgctccgcatggtggtgctcacccgtatcttcaccgaccgagagatgaaatgtctggatgctaacgaggcagagccggtgtttgatgagcgggagggtgtggacgagtacaatgagatgcccatgcctgtgtagccgccaccgagggacagccgagggaccgatggacgaggggacaggctggtgggatggggttccccctcccatgcccctccctcctttttatttaagtgaataatttaaagtcttctcctcccccactgcccctgcagtaaagtgctttggccccca

SEQ ID NO: 308753 - DNA, 2326 bp, Homo sapiens
aggcactttggtgttcactgctgttcacaagggcgactctgggcagtactactgcattgcttccaatgacgcaggctcagccaggtgtgagcagcaggaggaggacgtcctcctcctgctgctgggcccgagtagtgccaacatggactaccacgagatcggccgctccatctccaccctcatgtcagacaagcaattccacgaggcagcctacctggctgacgagcgggaggacctgctgacggccatcaacgccttcctggactgcagcgtggtgctgccgccttcagaagtgcagggcgaggagctgctgcgctctgtggcccacttccagcgccagatgctcaagaagcgagaggagcagggccggctgctacctacaggggctgggctggagcccaaatctgcccaagataaggcgctcctgcagatggtagaggcggcaggggcagctgaagatgatccccttcggcggacggggcggccctttggggggctgatccgagatgtgcggcgccgctatccccactacctgagtgacttccgagatgcacttgaccctcagtgcctggccgcagtcatcttcatctactttgccgccctgtctcctgccatcacctttggggggctgctgggagagaagacacaggacctgataggggtgtcggagctgattatgtccacagcgctccagggcgtggtcttctgcctgctgggtgcccagcccctgttggtgatcggcttctcagggcccctgctggtctttgaggaggccttcttctcgttctgtagcagcaaccacctggagtacctggtgggccgtgtgtggatcggcttctggctggtgttcctggccctgctcatggtggccctggaggggagcttcctggtccgcttcgtctcccgcttcacccaggagatcttcgccttcttgatctcactcatcttcatctatgagaccttctacaagctggtgaagatcttccaggagcaccccctgcatggctgctcagcctccaacagctcagaggtggacggcggtgagaacatgacatgggccggggcaagacccacgctggggccgggcaacaggagcttggctgggcagtctgggcaggggaagccccggggccagcccaacacggccctgctgtcgctggtgctcatggccggcaccttcttcatcgccttcttcctgcgcaaattcaagaacagccggttctttcctggccggatccggcgggtgattggggactttggggtgcccatcgccatcctcatcatggtgcttgtggattacagtattgaggacacctatacccagaagctgagcgttcccagtggattctcggtgactgccccagaaaagaggggctgggtcatcaaccccctgggagagaagagccccttccctgtgtggatgatggttgccagcctgctgcccgccatcctggtcttcattctcatcttcatggagacacagatcaccacgctcatcatctccaagaaggagcgcatgctgcagaagggctccggcttccacctggacctgctgctcatcgtggccatgggcggcatctgtgccctctttggcctgccctggttggctgctgccactgtccgctctgtcactcacgccaacgcgctcactgtcatgagcaaggctgtggcacctggggacaagcccaagattcaggaagtcaaggagcagcgggtgacggggctgctggttgccctgcttgtgggcctctccatagttatcggggatctgctccggcagatccccctggccgtgctctttggaattttcctgtacatgggagtcacctcccttaacgggatccagttctatgagcggctgcatctgctgctcatgccgcccaaacaccacccagatgtcacttacgtcaagaaggtccggaccctccgtatgcacctgttcacggccctgcagctgctctgcctggccctgctctgggccgtcatgtccacagctgcctccctggccttccccttcatcctcatcctcacagtgccgctccgcatggtggtgctcacccgtatcttcaccgaccgagagatgaaatgtctggatgctaacgaggcagagccggtgtttgatgagcgggagggtgtggacgagtacaatgagatgcccatgcctgtgtagccgccaccgagggacagccgagggaccgatggacgaggggacaggctggtgggatggggttccccctcccatgcccctccctcctttttatttaagtgaataatttaaagtcttctcctcccccactgcccctgcagtaaagtgctttggccccca

SEQ ID NO: 308754 - DNA, 2316 bp, Homo sapiens
gagacggagtctcactctgtcacccaggctggagtgcagtggcacgatcttggctcactgcaacctccgcctcccaggttcaagtaattctcctgcctcagcctcctgctgctgggcccgagtagtgccaacatggactaccacgagatcggccgctccatctccaccctcatgtcagacaagcaattccacgaggcagcctacctggctgacgagcgggaggacctgctgacggccatcaacgccttcctggactgcagcgtggtgctgccgccttcagaagtgcagggcgaggagctgctgcgctctgtggcccacttccagcgccagatgctcaagaagcgagaggagcagggccggctgctacctacaggggctgggctggagcccaaatctgcccaagataaggcgctcctgcagatggtagaggcggcaggggcagctgaagatgatccccttcggcggacggggcggccctttggggggctgatccgagatgtgcggcgccgctatccccactacctgagtgacttccgagatgcacttgaccctcagtgcctggccgcagtcatcttcatctactttgccgccctgtctcctgccatcacctttggggggctgctgggagagaagacacaggacctgataggggtgtcggagctgattatgtccacagcgctccagggcgtggtcttctgcctgctgggtgcccagcccctgttggtgatcggcttctcagggcccctgctggtctttgaggaggccttcttctcgttctgtagcagcaaccacctggagtacctggtgggccgtgtgtggatcggcttctggctggtgttcctggccctgctcatggtggccctggaggggagcttcctggtccgcttcgtctcccgcttcacccaggagatcttcgccttcttgatctcactcatcttcatctatgagaccttctacaagctggtgaagatcttccaggagcaccccctgcatggctgctcagcctccaacagctcagaggtggacggcggtgagaacatgacatgggccggggcaagacccacgctggggccgggcaacaggagcttggctgggcagtctgggcaggggaagccccggggccagcccaacacggccctgctgtcgctggtgctcatggccggcaccttcttcatcgccttcttcctgcgcaaattcaagaacagccggttctttcctggccggatccggcgggtgattggggactttggggtgcccatcgccatcctcatcatggtgcttgtggattacagtattgaggacacctatacccagaagctgagcgttcccagtggattctcggtgactgccccagaaaagaggggctgggtcatcaaccccctgggagagaagagccccttccctgtgtggatgatggttgccagcctgctgcccgccatcctggtcttcattctcatcttcatggagacacagatcaccacgctcatcatctccaagaaggagcgcatgctgcagaagggctccggcttccacctggacctgctgctcatcgtggccatgggcggcatctgtgccctctttggcctgccctggttggctgctgccactgtccgctctgtcactcacgccaacgcgctcactgtcatgagcaaggctgtggcacctggggacaagcccaagattcaggaagtcaaggagcagcgggtgacggggctgctggttgccctgcttgtgggcctctccatagttatcggggatctgctccggcagatccccctggccgtgctctttggaattttcctgtacatgggagtcacctcccttaacgggatccagttctatgagcggctgcatctgctgctcatgccgcccaaacaccacccagatgtcacttacgtcaagaaggtccggaccctccgtatgcacctgttcacggccctgcagctgctctgcctggccctgctctgggccgtcatgtccacagctgcctccctggccttccccttcatcctcatcctcacagtgccgctccgcatggtggtgctcacccgtatcttcaccgaccgagagatgaaatgtctggatgctaacgaggcagagccggtgtttgatgagcgggagggtgtggacgagtacaatgagatgcccatgcctgtgtagccgccaccgagggacagccgagggaccgatggacgaggggacaggctggtgggatggggttccccctcccatgcccctccctcctttttatttaagtgaataatttaaagtcttctcctcccccactgcccctgcagtaaagtgctttggccccca

SEQ ID NO: 308755 - DNA, 2160 bp, Homo sapiens
tcccccatccccatgctgctttggcagcaattccacgaggcagcctacctggctgacgagcgggaggacctgctgacggccatcaacgccttcctggactgcagcgtggtgctgccgccttcagaagtgcagggcgaggagctgctgcgctctgtggcccacttccagcgccagatgctcaagaagcgagaggagcagggccggctgctacctacaggggctgggctggagcccaaatctgcccaagataaggcgctcctgcagatggtagaggcggcaggggcagctgaagatgatccccttcggcggacggggcggccctttggggggctgatccgagatgtgcggcgccgctatccccactacctgagtgacttccgagatgcacttgaccctcagtgcctggccgcagtcatcttcatctactttgccgccctgtctcctgccatcacctttggggggctgctgggagagaagacacaggacctgataggggtgtcggagctgattatgtccacagcgctccagggcgtggtcttctgcctgctgggtgcccagcccctgttggtgatcggcttctcagggcccctgctggtctttgaggaggccttcttctcgttctgtagcagcaaccacctggagtacctggtgggccgtgtgtggatcggcttctggctggtgttcctggccctgctcatggtggccctggaggggagcttcctggtccgcttcgtctcccgcttcacccaggagatcttcgccttcttgatctcactcatcttcatctatgagaccttctacaagctggtgaagatcttccaggagcaccccctgcatggctgctcagcctccaacagctcagaggtggacggcggtgagaacatgacatgggccggggcaagacccacgctggggccgggcaacaggagcttggctgggcagtctgggcaggggaagccccggggccagcccaacacggccctgctgtcgctggtgctcatggccggcaccttcttcatcgccttcttcctgcgcaaattcaagaacagccggttctttcctggccggatccggcgggtgattggggactttggggtgcccatcgccatcctcatcatggtgcttgtggattacagtattgaggacacctatacccagaagctgagcgttcccagtggattctcggtgactgccccagaaaagaggggctgggtcatcaaccccctgggagagaagagccccttccctgtgtggatgatggttgccagcctgctgcccgccatcctggtcttcattctcatcttcatggagacacagatcaccacgctcatcatctccaagaaggagcgcatgctgcagaagggctccggcttccacctggacctgctgctcatcgtggccatgggcggcatctgtgccctctttggcctgccctggttggctgctgccactgtccgctctgtcactcacgccaacgcgctcactgtcatgagcaaggctgtggcacctggggacaagcccaagattcaggaagtcaaggagcagcgggtgacggggctgctggttgccctgcttgtgggcctctccatagttatcggggatctgctccggcagatccccctggccgtgctctttggaattttcctgtacatgggagtcacctcccttaacgggatccagttctatgagcggctgcatctgctgctcatgccgcccaaacaccacccagatgtcacttacgtcaagaaggtccggaccctccgtatgcacctgttcacggccctgcagctgctctgcctggccctgctctgggccgtcatgtccacagctgcctccctggccttccccttcatcctcatcctcacagtgccgctccgcatggtggtgctcacccgtatcttcaccgaccgagagatgaaatgtctggatgctaacgaggcagagccggtgtttgatgagcgggagggtgtggacgagtacaatgagatgcccatgcctgtgtagccgccaccgagggacagccgagggaccgatggacgaggggacaggctggtgggatggggttccccctcccatgcccctccctcctttttatttaagtgaataatttaaagtcttctcctcccccactgcccctgcagtaaagtgctttggccccca

SEQ ID NO: 308756 - DNA, 4339 bp, Homo sapiens
  misc_feature (61)..(61): n is a, c, g, or t
tgcccgcggcgcggtgggaaagttgagttgggagaagttgggagcggcgggggcgcgcccnggggtgggcacggggcagtcgtcgggagcgcgcgagtgcgccggaggacggggagagaccccgagacccccggggcacgaagtccagagcgagcgggttatgcctccgcctcgttgccctgaaagccgcagcgacagcgaaaagggctaagattcggccatgagcagcgcccctcggcgccccgccaagggcgcagattctttctgtacgccagagccagagagcttgggccctgggacgcctgggttccccgagcaggaggaagacgaacttcaccgcaccctgggcgtggagcggtttgaggagatcctacaggaggccgggtctcgtggaggggaggagccaggccgcagctatggggaggaagactttgagtaccaccgccagtcctcccaccacatccatcacccactgtccacccacctgcctccggatgcacgccgccgcaagacaccccagggcccaggacggaagcctcgaaggcgcccgggagcctccccgactggagaaaccccgaccattgaggagggggaggaagatgaggatgaggccagcgaggctgagggggcccgggctctcactcagccgtcccctgtctccacaccctcctcggtgcagttctttctccaagaggatgacagtgctgaccggaaggcagagaggaccagtccatcttcccctgcaccactgccccaccaggaggcgactcctcgggcctccaaaggggcccaggctggaacccaggtggaggaggcggaggcggaggcggtggcggtggccagtggcactgcagggggtgacgacgggggtgcctcggggcgccccctgcccaaagcccagcctgggcaccgcagctacaaccttcaggagaggaggcgcatcgggagcatgactggggctgagcaggcactgctgccccgggtccccacggatgagattgaggcccagacgctggccacggccgacctagacctcatgaagagtcaccggtttgaggacgttcctggggtgcggcggcacttggtgcggaagaatgccaaaggttccacacagagtggccgagaagggcgggagcctggccccacacctcgggcccgaccccgggccccccacaagccccatgaggtgtttgtggagctgaatgagttgctcctggacaaaaaccaggagccccagtggcgggagacagctcgctggatcaaatttgaagaggacgtggaggaggagaccgagcgctgggggaagccccacgtggcctccctctccttccgcagtctcctggagctccgcaggaccctggcccatggggctgtgctcttggatctggaccagcagaccctgcccggagtggcccaccaggtggtggagcagatggtcatctctgaccagatcaaggccgaggacagggccaacgtgctgcgggctctgctgttgaaacacagccacccaagtgatgagaaggacttctccttcccccgcaacatctcagctggctccctgggctccctgctggggcatcaccatggtcagggggctgagagtgacccccacgtcaccgagcctctcatgggaggtgttcctgagacccggctggaggtggagcgagagcgtgagctgccgcctccagcaccaccagctggcatcacccgctccaagtccaagcacgagctgaaactgctggagaagattcctgagaatgccgaggccacggtggtccttgtgggctgcgtggagttcctctcccgccccaccatggcctttgtgcggctccgggaggctgtggagttggacgcagtgttggaggtgccggtgcctgtgcgtttcctcttcctgctgctgggcccgagtagtgccaacatggactaccacgagatcggccgctccatctccaccctcatgtcagacaagcaattccacgaggcagcctacctggctgacgagcgggaggacctgctgacggccatcaacgccttcctggactgcagcgtggtgctgccgccttcagaagtgcagggcgaggagctgctgcgctctgtggcccacttccagcgccagatgctcaagaagcgagaggagcagggccggctgctacctacaggggctgggctggagcccaaatctgcccaagataaggcgctcctgcagatggtagaggcggcaggggcagctgaagatgatccccttcggcggacggggcggccctttggggggctgatccgagatgtgcggcgccgctatccccactacctgagtgacttccgagatgcacttgaccctcagtgcctggccgcagtcatcttcatctactttgccgccctgtctcctgccatcacctttggggggctgctgggagagaagacacaggacctgataggggtgtcggagctgattatgtccacagcgctccagggcgtggtcttctgcctgctgggtgcccagcccctgttggtgatcggcttctcagggcccctgctggtctttgaggaggccttcttctcgttctgtagcagcaaccacctggagtacctggtgggccgtgtgtggatcggcttctggctggtgttcctggccctgctcatggtggccctggaggggagcttcctggtccgcttcgtctcccgcttcacccaggagatcttcgccttcttgatctcactcatcttcatctatgagaccttctacaagctggtgaagatcttccaggagcaccccctgcatggctgctcagcctccaacagctcagaggtggacggcggtgagaacatgacatgggccggggcaagacccacgctggggccgggcaacaggagcttggctgggcagtctgggcaggggaagccccggggccagcccaacacggccctgctgtcgctggtgctcatggccggcaccttcttcatcgccttcttcctgcgcaaattcaagaacagccggttctttcctggccggatccggcgggtgattggggactttggggtgcccatcgccatcctcatcatggtgcttgtggattacagtattgaggacacctatacccagaagctgagcgttcccagtggattctcggtgactgccccagaaaagaggggctgggtcatcaaccccctgggagagaagagccccttccctgtgtggatgatggttgccagcctgctgcccgccatcctggtcttcattctcatcttcatggagacacagatcaccacgctcatcatctccaagaaggagcgcatgctgcagaagggctccggcttccacctggacctgctgctcatcgtggccatgggcggcatctgtgccctctttggcctgccctggttggctgctgccactgtccgctctgtcactcacgccaacgcgctcactgtcatgagcaaggctgtggcacctggggacaagcccaagattcaggaagtcaaggagcagcgggtgacggggctgctggttgccctgcttgtgggcctctccatagttatcggggatctgctccggcagatccccctggccgtgctctttggaattttcctgtacatgggagtcacctcccttaacgggatccagttctatgagcggctgcatctgctgctcatgccgcccaaacaccacccagatgtcacttacgtcaagaaggtgagccccccagctccccaccggaaggggtgtgcctctggccatcctggtctacttgggtcactctccagctgccccctcccatctgcccagttcagccagcccccacctcctctctgtaccaacccagctctggcacctaggaatgttcttccatccccgcctccgaagaagagagaggctcttcccagcagcaggctagggaggaagctgggctcacctgtctccgccccccaggtccggaccctccgtatgcacctgttcacggccctgcagctgctctgcctggccctgctctgggccgtcatgtccacagctgcctccctggccttccccttcatcctcatcctcacagtgccgctccgcatggtggtgctcacccgtatcttcaccgaccgagagatgaaatgtctggatgctaacgaggcagagccggtgtttgatgagcgggagggtgtggacgagtacaatgagatgcccatgcctgtgtagccgccaccgagggacagccgagggaccgatggacgaggggacaggctggtgggatggggttccccctcccatgcccctccctcctttttatttaagtgaataatttaaagtcttctcctcccccactgcccctgcagtaaagtgctttggccccca

SEQ ID NO: 308757 - DNA, 4202 bp, Homo sapiens
  misc_feature (61)..(61): n is a, c, g, or t
tgcccgcggcgcggtgggaaagttgagttgggagaagttgggagcggcgggggcgcgcccnggggtgggcacggggcagtcgtcgggagcgcgcgagtgcgccggaggacggggagagaccccgagacccccggggcacgaagtccagagcgagcgggttatgcctccgcctcgttgccctgaaagccgcagcgacagcgaaaagggctaagattcggccatgagcagcgcccctcggcgccccgccaagggcgcagattctttctgtacgccagagccagagagcttgggccctgggacgcctgggttccccgagcaggaggaagacgaacttcaccgcaccctgggcgtggagcggtttgaggagatcctacaggaggccgggtctcgtggaggggaggagccaggccgcagctatggggaggaagactttgagtaccaccgccagtcctcccaccacatccatcacccactgtccacccacctgcctccggatgcacgccgccgcaagacaccccagggcccaggacggaagcctcgaaggcgcccgggagcctccccgactggagaaaccccgaccattgaggagggggaggaagatgaggatgaggccagcgaggctgagggggcccgggctctcactcagccgtcccctgtctccacaccctcctcggtgcagttctttctccaagaggatgacagtgctgaccggaaggcagagaggaccagtccatcttcccctgcaccactgccccaccaggaggcgactcctcgggcctccaaaggggcccaggctggaacccaggtggaggaggcggaggcggaggcggtggcggtggccagtggcactgcagggggtgacgacgggggtgcctcggggcgccccctgcccaaagcccagcctgggcaccgcagctacaaccttcaggagaggaggcgcatcgggagcatgactggggctgagcaggcactgctgccccgggtccccacggatgagattgaggcccagacgctggccacggccgacctagacctcatgaagagtcaccggtttgaggacgttcctggggtgcggcggcacttggtgcggaagaatgccaaaggttccacacagagtggccgagaagggcgggagcctggccccacacctcgggcccgaccccgggccccccacaagccccatgaggtgtttgtggagctgaatgagttgctcctggacaaaaaccaggagccccagtggcgggagacagctcgctggatcaaatttgaagaggacgtggaggaggagaccgagcgctgggggaagccccacgtggcctccctctccttccgcagtctcctggagctccgcaggaccctggcccatggggctgtgctcttggatctggaccagcagaccctgcccggagtggcccaccaggtggtggagcagatggtcatctctgaccagatcaaggccgaggacagggccaacgtgctgcgggctctgctgttgaaacacagccacccaagtgatgagaaggacttctccttcccccgcaacatctcagctggctccctgggctccctgctggggcatcaccatggtcagggggctgagagtgacccccacgtcaccgagcctctcatgggaggtgttcctgagacccggctggaggtggagcgagagcgtgagctgccgcctccagcaccaccagctggcatcacccgctccaagtccaagcacgagctgaaactgctggagaagattcctgagaatgccgaggccacggtggtccttgtgggctgcgtggagttcctctcccgccccaccatggcctttgtgcggctccgggaggctgtggagttggacgcagtgttggaggtgccggtgcctgtgcgtttcctcttcctgctgctgggcccgagtagtgccaacatggactaccacgagatcggccgctccatctccaccctcatgtcagacaagcaattccacgaggcagcctacctggctgacgagcgggaggacctgctgacggccatcaacgccttcctggactgcagcgtggtgctgccgccttcagaagtgcagggcgaggagctgctgcgctctgtggcccacttccagcgccagatgctcaagaagcgagaggagcagggccggctgctacctacaggggctgggctggagcccaaatctgcccaagataaggcgctcctgcagatggtagaggcggcaggggcagctgaagatgatccccttcggcggacggggcggccctttggggggctgatccgagatgtgcggcgccgctatccccactacctgagtgacttccgagatgcacttgaccctcagtgcctggccgcagtcatcttcatctactttgccgccctgtctcctgccatcacctttggggggctgctgggagagaagacacaggacctgataggggtgtcggagctgattatgtccacagcgctccagggcgtggtcttctgcctgctgggtgcccagcccctgttggtgatcggcttctcagggcccctgctggtctttgaggaggccttcttctcgttctgtagcagcaaccacctggagtacctggtgggccgtgtgtggatcggcttctggctggtgttcctggccctgctcatggtggccctggaggggagcttcctggtccgcttcgtctcccgcttcacccaggagatcttcgccttcttgatctcactcatcttcatctatgagaccttctacaagctggtgaagatcttccaggagcaccccctgcatggctgctcagcctccaacagctcagaggtggacggcggtgagaacatgacatgggccggggcaagacccacgctggggccgggcaacaggagcttggctgggcagtctgggcaggggaagccccggggccagcccaacacggccctgctgtcgctggtgctcatggccggcaccttcttcatcgccttcttcctgcgcaaattcaagaacagccggttctttcctggccggatccggcgggtgattggggactttggggtgcccatcgccatcctcatcatggtgcttgtggattacagtattgaggacacctatacccagaagctgagcgttcccagtggattctcggtgactgccccagaaaagaggggctgggtcatcaaccccctgggagagaagagccccttccctgtgtggatgatggttgccagcctgctgcccgccatcctggtcttcattctcatcttcatggagacacagatcaccacgctcatcatctccaagaaggagcgcatgctgcagaagggctccggcttccacctggacctgctgctcatcgtggccatgggcggcatctgtgccctctttggcctgccctggttggctgctgccactgtccgctctgtcactcacgccaacgcgctcactgtcatgagcaaggctgtggcacctggggacaagcccaagattcaggaagtcaaggagcagcgggtgacggggctgctggttgccctgcttgtgggcctctccatagttatcggggatctgctccggcagatccccctggccgtgctctttggaattttcctgtacatgggagtcacctcccttaacgggatccagttctatgagcggctgcatctgctgctcatgccgcccaaacaccacccagatgtcacttacgtcaagaaggtccggaccctccgtatgcacctgttcacggccctgcagctgctctgcctggccctgctctgggccgtcatgtccacagctgcctccctggccttccccttcatcctcatcctcacagtgccgctccgcatggtggtgctcacccgtatcttcaccgaccgagagatgaaatgtgtaagccctcccgtctgcctcccccggttcctcttgcctccctgtggatctggaaaggcccccccacttcccttcttgaccgccacctccccacacacagctggatgctaacgaggcagagccggtgtttgatgagcgggagggtgtggacgagtacaatgagatgcccatgcctgtgtagccgccaccgagggacagccgagggaccgatggacgaggggacaggctggtgggatggggttccccctcccatgcccctccctcctttttatttaagtgaataatttaaagtcttctcctcccccactgcccctgcagtaaagtgctttggccccca

SEQ ID NO: 308758 - DNA, 4439 bp, Homo sapiens
  misc_feature (61)..(61): n is a, c, g, or t
tgcccgcggcgcggtgggaaagttgagttgggagaagttgggagcggcgggggcgcgcccnggggtgggcacggggcagtcgtcgggagcgcgcgagtgcgccggaggacggggagagaccccgagacccccggggcacgaagtccagagcgagcgggttatgcctccgcctcgttgccctgaaagccgcagcgacagcgaaaagggctaagattcggccatgagcagcgcccctcggcgccccgccaagggcgcagattctttctgtacgccagagccagagagcttgggccctgggacgcctgggttccccgagcaggaggaagacgaacttcaccgcaccctgggcgtggagcggtttgaggagatcctacaggaggccgggtctcgtggaggggaggagccaggccgcagctatggggaggaagactttgagtaccaccgccagtcctcccaccacatccatcacccactgtccacccacctgcctccggatgcacgccgccgcaagacaccccagggcccaggacggaagcctcgaaggcgcccgggagcctccccgactggagaaaccccgaccattgaggagggggaggaagatgaggatgaggccagcgaggctgagggggcccgggctctcactcagccgtcccctgtctccacaccctcctcggtgcagttctttctccaagaggatgacagtgctgaccggaaggcagagaggaccagtccatcttcccctgcaccactgccccaccaggaggcgactcctcgggcctccaaaggggcccaggctggaacccaggtggaggaggcggaggcggaggcggtggcggtggccagtggcactgcagggggtgacgacgggggtgcctcggggcgccccctgcccaaagcccagcctgggcaccgcagctacaaccttcaggagaggaggcgcatcgggagcatgactggggctgagcaggcactgctgccccgggtccccacggatgagattgaggcccagacgctggccacggccgacctagacctcatgaagagtcaccggtttgaggacgttcctggggtgcggcggcacttggtgcggaagaatgccaaaggttccacacagagtggccgagaagggcgggagcctggccccacacctcgggcccgaccccgggccccccacaagccccatgaggtgtttgtggagctgaatgagttgctcctggacaaaaaccaggagccccagtggcgggagacagctcgctggatcaaatttgaagaggacgtggaggaggagaccgagcgctgggggaagccccacgtggcctccctctccttccgcagtctcctggagctccgcaggaccctggcccatggggctgtgctcttggatctggaccagcagaccctgcccggagtggcccaccaggtggtggagcagatggtcatctctgaccagatcaaggccgaggacagggccaacgtgctgcgggctctgctgttgaaacacagccacccaagtgatgagaaggacttctccttcccccgcaacatctcagctggctccctgggctccctgctggggcatcaccatggtcagggggctgagagtgacccccacgtcaccgagcctctcatgggaggtgttcctgagacccggctggaggtggagcgagagcgtgagctgccgcctccagcaccaccagctggcatcacccgctccaagtccaagcacgagctgaaactgctggagaagattcctgagaatgccgaggccacggtggtccttgtgggctgcgtggagttcctctcccgccccaccatggcctttgtgcggctccgggaggctgtggagttggacgcagtgttggaggtgccggtgcctgtgcgtttcctcttcctgctgctgggcccgagtagtgccaacatggactaccacgagatcggccgctccatctccaccctcatgtcagacaagcaattccacgaggcagcctacctggctgacgagcgggaggacctgctgacggccatcaacgccttcctggactgcagcgtggtgctgccgccttcagaagtgcagggcgaggagctgctgcgctctgtggcccacttccagcgccagatgctcaagaagcgagaggagcagggccggctgctacctacaggggctgggctggagcccaaatctgcccaagataaggcgctcctgcagatggtagaggcggcaggggcagctgaagatgatccccttcggcggacggggcggccctttggggggctgatccgagatgtgcggcgccgctatccccactacctgagtgacttccgagatgcacttgaccctcagtgcctggccgcagtcatcttcatctactttgccgccctgtctcctgccatcacctttggggggctgctgggagagaagacacaggacctgataggggtgtcggagctgattatgtccacagcgctccagggcgtggtcttctgcctgctgggtgcccagcccctgttggtgatcggcttctcagggcccctgctggtctttgaggaggccttcttctcgttctgtagcagcaaccacctggagtacctggtgggccgtgtgtggatcggcttctggctggtgttcctggccctgctcatggtggccctggaggggagcttcctggtccgcttcgtctcccgcttcacccaggagatcttcgccttcttgatctcactcatcttcatctatgagaccttctacaagctggtgaagatcttccaggagcaccccctgcatggctgctcagcctccaacagctcagaggtggacggcggtgagaacatgacatgggccggggcaagacccacgctggggccgggcaacaggagcttggctgggcagtctgggcaggggaagccccggggccagcccaacacggccctgctgtcgctggtgctcatggccggcaccttcttcatcgccttcttcctgcgcaaattcaagaacagccggttctttcctggccggatccggcgggtgattggggactttggggtgcccatcgccatcctcatcatggtgcttgtggattacagtattgaggacacctatacccagaagctgagcgttcccagtggattctcggtgactgccccagaaaagaggggctgggtcatcaaccccctgggagagaagagccccttccctgtgtggatgatggttgccagcctgctgcccgccatcctggtcttcattctcatcttcatggagacacagatcaccacgctcatcatctccaagaaggagcgcatgctgcagaagggctccggcttccacctggacctgctgctcatcgtggccatgggcggcatctgtgccctctttggcctgccctggttggctgctgccactgtccgctctgtcactcacgccaacgcgctcactgtcatgagcaaggctgtggcacctggggacaagcccaagattcaggaagtcaaggagcagcgggtgacggggctgctggttgccctgcttgtgggcctctccatagttatcggggatctgctccggcagatccccctggccgtgctctttggaattttcctgtacatgggagtcacctcccttaacgggatccagttctatgagcggctgcatctgctgctcatgccgcccaaacaccacccagatgtcacttacgtcaagaaggtgagccccccagctccccaccggaaggggtgtgcctctggccatcctggtctacttgggtcactctccagctgccccctcccatctgcccagttcagccagcccccacctcctctctgtaccaacccagctctggcacctaggaatgttcttccatccccgcctccgaagaagagagaggctcttcccagcagcaggctagggaggaagctgggctcacctgtctccgccccccaggtccggaccctccgtatgcacctgttcacggccctgcagctgctctgcctggccctgctctgggccgtcatgtccacagctgcctccctggccttccccttcatcctcatcctcacagtgccgctccgcatggtggtgctcacccgtatcttcaccgaccgagagatgaaatgtgtaagccctcccgtctgcctcccccggttcctcttgcctccctgtggatctggaaaggcccccccacttcccttcttgaccgccacctccccacacacagctggatgctaacgaggcagagccggtgtttgatgagcgggagggtgtggacgagtacaatgagatgcccatgcctgtgtagccgccaccgagggacagccgagggaccgatggacgaggggacaggctggtgggatggggttccccctcccatgcccctccctcctttttatttaagtgaataatttaaagtcttctcctcccccactgcccctgcagtaaagtgctttggccccca

SEQ ID NO: 308759 - DNA, 3894 bp, Homo sapiens
  misc_feature (61)..(61): n is a, c, g, or t
tgcccgcggcgcggtgggaaagttgagttgggagaagttgggagcggcgggggcgcgcccnggggtgggcacggggcagtcgtcgggagcgcgcgagtgcgccggaggacggggagagaccccgagacccccggggcacgaagtccagagcgagcgggttatgcctccgcctcgttgccctgaaagccgcagcgacagcgaaaagggctaagattcggccatgagcagcgcccctcggcgccccgccaagggcgcagattctttctgtacgccagagccagagagcttgggccctgggacgcctgggttccccgagcaggaggaagacgaacttcaccgcaccctgggcgtggagcggtttgaggagatcctacaggaggccgggtctcgtggaggggaggagccaggccgcagctatggggaggaagactttgagtaccaccgccagtcctcccaccacatccatcacccactgtccacccacctgcctccggatgcacgccgccgcaagacaccccagggcccaggacggaagcctcgaaggcgcccgggagcctccccgactggagaaaccccgaccattgaggagggggaggaagatgaggatgaggccagcgaggctgagggggcccgggctctcactcagccgtcccctgtctccacaccctcctcggtgcagttctttctccaagaggatgacagtgctgaccggaaggcagagaggaccagtccatcttcccctgcaccactgccccaccaggaggcgactcctcgggcctccaaaggggcccaggctggaacccaggtggaggaggcggaggcggaggcggtggcggtggccagtggcactgcagggggtgacgacgggggtgcctcggggcgccccctgcccaaagcccagcctgggcaccgcagctacaaccttcaggagaggaggcgcatcgggagcatgactggggctgagcaggcactgctgccccgggtccccacggatgagattgaggcccagacgctggccacggccgacctagacctcatgaagagtcaccggtttgaggacgttcctggggtgcggcggcacttggtgcggaagaatgccaaaggttccacacagagtggccgagaagggcgggagcctggccccacacctcgggcccgaccccgggccccccacaagccccatgaggtgtttgtggagctgaatgagttgctcctggacaaaaaccaggagccccagtggcgggagacagctcgctggatcaaatttgaagaggacgtggaggaggagaccgagcgctgggggaagccccacgtggcctccctctccttccgcagtctcctggagctccgcaggaccctggcccatggggctgtgctcttggatctggaccagcagaccctgcccggagtggcccaccaggtggtggagcagatggtcatctctgaccagatcaaggccgaggacagggccaacgtgctgcgggctctgctgttgaaacacagccacccaagtgatgagaaggacttctccttcccccgcaacatctcagctggctccctgggctccctgctggggcatcaccatggtcagggggctgagagtgacccccacgtcaccgagcctctcatgggaggtgttcctgagacccggctggaggtggagcgagagcgtgagctgccgcctccagcaccaccagctggcatcacccgctccaagtccaagcacgagctgaaactgctggagaagattcctgagaatgccgaggccacggtggtccttgtgggctgcgtggagttcctctcccgccccaccatggcctttgtgcggctccgggaggctgtggagttggacgcagtgttggaggtgccggtgcctgtgcgtttcctcttcctgctgctgggcccgagtagtgccaacatggactaccacgagatcggccgctccatctccaccctcatgtcagacaagcaattccacgaggcagcctacctggctgacgagcgggaggacctgctgacggccatcaacgccttcctggactgcagcgtggtgctgccgccttcagaagtgcagggcgaggagctgctgcgctctgtggcccacttccagcgccagatgctcaagaagcgagaggagcagggccggctgctacctacaggggctgggctggagcccaaatctgcccaagataaggcgctcctgcagatggtagaggcggcaggggcagctgaagatgatccccttcggcggacggggcggccctttggggggctgatccgagatgtgcggcgccgctatccccactacctgagtgacttccgagatgcacttgaccctcagtgcctggccgcagtcatcttcatctactttgccgccctgtctcctgccatcacctttggggggctgctgggagagaagacacaggacctgataggggtgtcggagctgattatgtccacagcgctccagggcgtggtcttctgcctgctgggtgcccagcccctgttggtgatcggcttctcagggcccctgctggtctttgaggaggccttcttctcgttctgtagcagcaaccacctggagtacctggtgggccgtgtgtggatcggcttctggctggtgttcctggccctgctcatggtggccctggaggggagcttcctggtccgcttcgtctcccgcttcacccaggagatcttcgccttcttgatctcactcatcttcatctatgagaccttctacaagctggtgaagatcttccaggagcaccccctgcatggctgctcagcctccaacagctcagaggtggacggcggtgagaacatgacatgggccggggcaagacccacgctggggccgggcaacaggagcttggctgggcagtctgggcaggggaagccccggggccagcccaacacggccctgctgtcgctggtgctcatggccggcaccttcttcatcgccttcttcctgcgcaaattcaagaacagccggttctttcctggccggatccggcgggtgattggggactttggggtgcccatcgccatcctcatcatggtgcttgtggattacagtattgaggacacctatacccagaagctgagcgttcccagtggattctcggtgactgccccagaaaagaggggctgggtcatcaaccccctgggagagaagagccccttccctgtgtggatgatggttgccagcctgctgcccgccatcctggtcttcattctcatcttcatggagacacagatcaccacgctcatcatctccaagaaggagcgcatgctgcagaagggctccggcttccacctggacctgctgctcatcgtggccatgggcggcatctgtgccctctttggcctgccctggttggctgctgccactgtccgctctgtcactcacgccaacgcgctcactgtcatgagcaaggctgtggcacctggggacaagcccaagattcaggaagtcaaggagcagcgggtgacggggctgctggttgccctgcttgtgggcctctccatagttatcggggatctgctccggcagatccccctggccgtgctctttggaattttcctgtacatgggagtcacctcccttaacgggatccagttctatgagcggctgcatctgctgctcatgccgcccaaacaccacccagatgtcacttacgtcaagaaggtcccggacctccggatgccctggtcacggcctgcaggtgtcttgctggcctggtctgggccggctctgcacagcttgctccctgggcttcccttaatctcatctcacagtgcggtccgatggtgtgtcacccgtttttccgacggaagatgaagctggtgctaccaggcaccggttgaaccgggggtgggcaacaggagccg

SEQ ID NO: 308760 - DNA, 3767 bp, Homo sapiens
  misc_feature (61)..(61): n is a, c, g, or t
tgcccgcggcgcggtgggaaagttgagttgggagaagttgggagcggcgggggcgcgcccnggggtgggcacggggcagtcgtcgggagcgcgcgagtgcgccggaggacggggagagaccccgagacccccggggcacgaagtccagagcgagcgggttatgcctccgcctcgttgccctgaaagccgcagcgacagcgaaaagggctaagattcggccatgagcagcgcccctcggcgccccgccaagggcgcagattctttctgtacgccagagccagagagcttgggccctgggacgcctgggttccccgagcaggaggaagacgaacttcaccgcaccctgggcgtggagcggtttgaggagatcctacaggaggccgggtctcgtggaggggaggagccaggccgcagctatggggaggaagactttgagtaccaccgccagtcctcccaccacatccatcacccactgtccacccacctgcctccggatgcacgccgccgcaagacaccccagggcccaggacggaagcctcgaaggcgcccgggagcctccccgactggagaaaccccgaccattgaggagggggaggaagatgaggatgaggccagcgaggctgagggggcccgggctctcactcagccgtcccctgtctccacaccctcctcggtgcagttctttctccaagaggatgacagtgctgaccggaaggcagagaggaccagtccatcttcccctgcaccactgccccaccaggaggcgactcctcgggcctccaaaggggcccaggctggaacccaggtggaggaggcggaggcggaggcggtggcggtggccagtggcactgcagggggtgacgacgggggtgcctcggggcgccccctgcccaaagcccagcctgggcaccgcagctacaaccttcaggagaggaggcgcatcgggagcatgactggggctgagcaggcactgctgccccgggtccccacggatgagattgaggcccagacgctggccacggccgacctagacctcatgaagagtcaccggtttgaggacgttcctggggtgcggcggcacttggtgcggaagaatgccaaaggttccacacagagtggccgagaagggcgggagcctggccccacacctcgggcccgaccccgggccccccacaagccccatgaggtgtttgtggagctgaatgagttgctcctggacaaaaaccaggagccccagtggcgggagacagctcgctggatcaaatttgaagaggacgtggaggaggagaccgagcgctgggggaagccccacgtggcctccctctccttccgcagtctcctggagctccgcaggaccctggcccatggggctgtgctcttggatctggaccagcagaccctgcccggagtggcccaccaggtggtggagcagatggtcatctctgaccagatcaaggccgaggacagggccaacgtgctgcgggctctgctgttgaaacacagccacccaagtgatgagaaggacttctccttcccccgcaacatctcagctggctccctgggctccctgctggggcatcaccatggtcagggggctgagagtgacccccacgtcaccgagcctctcatgggaggtgttcctgagacccggctggaggtggagcgagagcgtgagctgccgcctccagcaccaccagctggcatcacccgctccaagtccaagcacgagctgaaactgctggagaagattcctgagaatgccgaggccacggtggtccttgtgggctgcgtggagttcctctcccgccccaccatggcctttgtgcggctccgggaggctgtggagttggacgcagtgttggaggtgccggtgcctgtgcgtttcctcttcctgctgctgggcccgagtagtgccaacatggactaccacgagatcggccgctccatctccaccctcatgtcagacaagcaattccacgaggcagcctacctggctgacgagcgggaggacctgctgacggccatcaacgccttcctggactgcagcgtggtgctgccgccttcagaagtgcagggcgaggagctgctgcgctctgtggcccacttccagcgccagatgctcaagaagcgagaggagcagggccggctgctacctacaggggctgggctggagcccaaatctgcccaagataaggcgctcctgcagatggtagaggcggcaggggcagctgaagatgatccccttcggcggacggggcggccctttggggggctgatccgagatgtgcggcgccgctatccccactacctgagtgacttccgagatgcacttgaccctcagtgcctggccgcagtcatcttcatctactttgccgccctgtctcctgccatcacctttggggggctgctgggagagaagacacaggacctgataggggtgtcggagctgattatgtccacagcgctccagggcgtggtcttctgcctgctgggtgcccagcccctgttggtgatcggcttctcagggcccctgctggtctttgaggaggccttcttctcgttctgtagcagcaaccacctggagtaccctgctgtcgctggtgctcatggccggcaccttcttcatcgccttcttcctgcgcaaattcaagaacagccggttctttcctggccggatccggcgggtgattggggactttggggtgcccatcgccatcctcatcatggtgcttgtggattacagtattgaggacacctatacccagaagctgagcgttcccagtggattctcggtgactgccccagaaaagaggggctgggtcatcaaccccctgggagagaagagccccttccctgtgtggatgatggttgccagcctgctgcccgccatcctggtcttcattctcatcttcatggagacacagatcaccacgctcatcatctccaagaaggagcgcatgctgcagaagggctccggcttccacctggacctgctgctcatcgtggccatgggcggcatctgtgccctctttggcctgccctggttggctgctgccactgtccgctctgtcactcacgccaacgcgctcactgtcatgagcaaggctgtggcacctggggacaagcccaagattcaggaagtcaaggagcagcgggtgacggggctgctggttgccctgcttgtgggcctctccatagttatcggggatctgctccggcagatccccctggccgtgctctttggaattttcctgtacatgggagtcacctcccttaacgggatccagttctatgagcggctgcatctgctgctcatgccgcccaaacaccacccagatgtcacttacgtcaagaaggtccggaccctccgtatgcacctgttcacggccctgcagctgctctgcctggccctgctctgggccgtcatgtccacagctgcctccctggccttccccttcatcctcatcctcacagtgccgctccgcatggtggtgctcacccgtatcttcaccgaccgagagatgaaatgtctggatgctaacgaggcagagccggtgtttgatgagcgggagggtgtggacgagtacaatgagatgcccatgcctgtgtagccgccaccgagggacagccgagggaccgatggacgaggggacaggctggtgggatggggttccccctcccatgcccctccctcctttttatttaagtgaataatttaaagtcttctcctcccccactgcccctgcagtaaagtgctttggccccca

SEQ ID NO: 308761 - DNA, 1400 bp, Homo sapiens
aactgatgtatgagtcagagtcctgggtgtaaatttcagtaccagggtgaaggatcttccaggagcaccccctgcatggctgctcagcctccaacagctcagaggtggacggcggtgagaacatgacatgggccggggcaagacccacgctggggccgggcaacaggagcttggctgggcagtctgggcaggggaagccccggggccagcccaacacggccctgctgtcgctggtgctcatggccggcaccttcttcatcgccttcttcctgcgcaaattcaagaacagccggttctttcctggccggatccggcgggtgattggggactttggggtgcccatcgccatcctcatcatggtgcttgtggattacagtattgaggacacctatacccagaagctgagcgttcccagtggattctcggtgactgccccagaaaagaggggctgggtcatcaaccccctgggagagaagagccccttccctgtgtggatgatggttgccagcctgctgcccgccatcctggtcttcattctcatcttcatggagacacagatcaccacgctcatcatctccaagaaggagcgcatgctgcagaagggctccggcttccacctggacctgctgctcatcgtggccatgggcggcatctgtgccctctttggcctgccctggttggctgctgccactgtccgctctgtcactcacgccaacgcgctcactgtcatgagcaaggctgtggcacctggggacaagcccaagattcaggaagtcaaggagcagcgggtgacggggctgctggttgccctgcttgtgggcctctccatagttatcggggatctgctccggcagatccccctggccgtgctctttggaattttcctgtacatgggagtcacctcccttaacgggatccagttctatgagcggctgcatctgctgctcatgccgcccaaacaccacccagatgtcacttacgtcaagaaggtccggaccctccgtatgcacctgttcacggccctgcagctgctctgcctggccctgctctgggccgtcatgtccacagctgcctccctggccttccccttcatcctcatcctcacagtgccgctccgcatggtggtgctcacccgtatcttcaccgaccgagagatgaaatgtctggatgctaacgaggcagagccggtgtttgatgagcgggagggtgtggacgagtacaatgagatgcccatgcctgtgtagccgccaccgagggacagccgagggaccgatggacgaggggacaggctggtgggatggggttccccctcccatgcccctccctcctttttatttaagtgaataatttaaagtcttctcctcccccactgcccctgcagtaaagtgctttggccccca

SEQ ID NO: 308762 - DNA, 1778 bp, Homo sapiens
gttttaaaactcacattttttaataacaaaggtacatgcttttgttaaaatgtcaaacaatccaggagtgtagaaaggggaaaggctccagaggtgacagtcagtctgggcatcagatgtgtgtgacaggccactcagtggtcctctgtgctcatgtcctcttcctttaggcccctggatcctctctgggcctggctggtgccactcaccactgccttcctgacttatactagccgcttggtcttttctgccccacactgccctgtgctcacagctggttctctgggtcattgtcttaattcaacaagacaagctccttgaaagcaggccagcctttcccctgccccaccccttccacccgacactcactgagccccaggaatcttttctgcagtccagctgatggaggccgtgtggcctcctctccccagatcttccaggagcaccccctgcatggctgctcagcctccaacagctcagaggtggacggcggtgagaacatgacatgggccggggcaagacccacgctggggccgggcaacaggagcttggctgggcagtctgggcaggggaagccccggggccagcccaacacggccctgctgtcgctggtgctcatggccggcaccttcttcatcgccttcttcctgcgcaaattcaagaacagccggttctttcctggccggatccggcgggtgattggggactttggggtgcccatcgccatcctcatcatggtgcttgtggattacagtattgaggacacctatacccagaagctgagcgttcccagtggattctcggtgactgccccagaaaagaggggctgggtcatcaaccccctgggagagaagagccccttccctgtgtggatgatggttgccagcctgctgcccgccatcctggtcttcattctcatcttcatggagacacagatcaccacgctcatcatctccaagaaggagcgcatgctgcagaagggctccggcttccacctggacctgctgctcatcgtggccatgggcggcatctgtgccctctttggcctgccctggttggctgctgccactgtccgctctgtcactcacgccaacgcgctcactgtcatgagcaaggctgtggcacctggggacaagcccaagattcaggaagtcaaggagcagcgggtgacggggctgctggttgccctgcttgtgggcctctccatagttatcggggatctgctccggcagatccccctggccgtgctctttggaattttcctgtacatgggagtcacctcccttaacgggatccagttctatgagcggctgcatctgctgctcatgccgcccaaacaccacccagatgtcacttacgtcaagaaggtccggaccctccgtatgcacctgttcacggccctgcagctgctctgcctggccctgctctgggccgtcatgtccacagctgcctccctggccttccccttcatcctcatcctcacagtgccgctccgcatggtggtgctcacccgtatcttcaccgaccgagagatgaaatgtctggatgctaacgaggcagagccggtgtttgatgagcgggagggtgtggacgagtacaatgagatgcccatgcctgtgtagccgccaccgagggacagccgagggaccgatggacgaggggacaggctggtgggatggggttccccctcccatgcccctccctcctttttatttaagtgaataatttaaagtcttctcctcccccactgcccctgcagtaaagtgctttggccccca

SEQ ID NO: 308763 - DNA, 1936 bp, Homo sapiens
  misc_feature (61)..(61): n is a, c, g, or t
tgcccgcggcgcggtgggaaagttgagttgggagaagttgggagcggcgggggcgcgcccnggggtgggcacggggcagtcgtcgggagcgcgcgagtgcgccggaggacggggagagaccccgagacccccggggcacgaagtccagagcgagcgggttatgcctccgcctcgttgccctgaaagccgcagcgacagcgaaaagggctaagattcggccatgagcagcgcccctcggcgccccgccaagggcgcagattctttctgtacgccagagccagagagcttgggccctgggacgcctgggttccccgagcaggaggaagacgaacttcaccgcaccctgggcgtggagcggtttgaggagatcctacaggaggccgggtctcgtggaggggaggagccaggccgcagctatggggaggaagactttgagtaccaccgccagtcctcccaccacatccatcacccactgtccacccacctgcctccggatgcacgccgccgcaagacaccccagggcccaggacggaagcctcgaaggcgcccgggagcctccccgactggagaaaccccgaccattgaggagggggaggaagatgaggatgaggccagcgaggctgagggggcccgggctctcactcagccgtcccctgtctccacaccctcctcggtgcagttctttctccaagaggatgacagtgctgaccggaaggcagagaggaccagtccatcttcccctgcaccactgccccaccaggaggcgactcctcgggcctccaaaggggcccaggctggaacccaggtggaggaggcggaggcggaggcggtggcggtggccagtggcactgcagggggtgacgacgggggtgcctcggggcgccccctgcccaaagcccagcctgggcaccgcagctacaaccttcaggagaggaggcgcatcgggagcatgactggggctgagcaggcactgctgccccgggtccccacggatgagattgaggcccagacgctggccacggccgacctagacctcatgaagagtcaccggtttgaggacgttcctggggtgcggcggcacttggtgcggaagaatgccaaaggttccacacagagtggccgagaagggcgggagcctggccccacacctcgggcccgaccccgggccccccacaagccccatgaggtgtttgtggagctgaatgagttgctcctggacaaaaaccaggagccccagtggcgggagacagctcgctggatcaaatttgaagaggacgtggaggaggagaccgagcgctgggggaagccccacgtggcctccctctccttccgcagtctcctggagctccgcaggaccctggcccatggggctgtgctcttggatctggaccagcagaccctgcccggagtggcccaccaggtggtggagcagatggtcatctctgaccagatcaaggccgaggacagggccaacgtgctgcgggctctgctgttgaaacacaggagagaagacacaggacctgataggggtgtcggagctgattatgtccacagcgctccagggcgtggtcttctgcctgctgggtgcccagcccctgttggtgatcggcttctcagggcccctgctggtctttgaggaggccttcttctcgttctgtagcagcaaccacctggagtacctggtgggccgtgtgtggatcggcttctggctggtgttcctggccctgctcatggtggccctggaggggagcttcctggtccgcttcgtctcccgcttcacccaggagatcttcgccttcttgatctcactcatcttcatctatgagaccttctacaagctggtgaagatccttccagagagcaaccccccttgccattgggcttgcggtccaggcccttccccaaagcaaggccgttccaggaaggggcttgggac

SEQ ID NO: 308764 - DNA, 645 bp, Homo sapiens
caacacggccctgctgtcgctggtgctcatggccggcaccttcttcatcgccttcttcctgcgcaaattcaagaacagccggttctttcctggccgggtgcgtgggcttaaaggccaagagggggttaggggcaggaaggggggtggcaggaagtcagcggctgtggtggcaggactctgagcgctgtgcctgcccactcagatccggcgggtgattggggactttggggtgcccatcgccatcctcatcatggtgcttgtggattacagtattgaggacacctatacccaggtaaggtgctgcccacagcaggcaagtgctgctgcctctgccaccccgggtctaggtgttcccctccagcctccaaacccagcctgtccttaagcttaagcctgtccttaagatgccatcccctttccatggcatgccctccacattcaccttaacccttgtccctacactgtgtctgccctgcagaagctgagcgttcccagtggattctcggtgactgccccagaaaagaggggctgggtcatcaaccccctgggagagaagagccccttccctgtgtggatgatggttgccagcctgctgcccgccatcctggtcttcattctcatcttcatggagacacagatcaccac

SEQ ID NO: 308765 - DNA, 499 bp, Homo sapiens
gtgtcgaccctaaacagcacagtataacaactatttacatagcatttgcattgtattaggtatcataggcaatctagagatgatttaaagtatacaggaggatgtgggtaggttatatgcaaatattacaccagtttatataatagacttgcacatccgtggattttggtatccacaaggtgtcctggaaccgattccccgtagataccaagagacaactgtatttggaaagcttcagaagctttgcagatgaatgcagaaggctgggagtcagtgggagctttcctaacctcagaacagccattcatttgatctgtgtctagaatgagagtttctctgtgtgagctatgggtgattaatccattttgccttcattcttcagtggtttggcatatagattgaagtgttttgcttttctatttattggcggaggcaaatagaaacagagctctctctctctctcttgcagtgtacccacactccaaagtgccataaaacg

SEQ ID NO: 308766 - DNA, 1598 bp, Homo sapiens
  misc_feature (2)..(2): n is a, c, g, or t
  misc_feature (330)..(330): n is a, c, g, or t
  misc_feature (672)..(672): n is a, c, g, or t
  misc_feature (711)..(711): n is a, c, g, or t
  misc_feature (738)..(738): n is a, c, g, or t
  misc_feature (745)..(745): n is a, c, g, or t
  misc_feature (752)..(752): n is a, c, g, or t
  misc_feature (804)..(804): n is a, c, g, or t
gngctttttatttcatttattgagttcttccattccaggattatgtacttttgttatcttatatgtcttaagtcacactgagtttctttaatgtcattttgatttttttgttaggcatttcaaaatttggggggagcatctgttactgaagaattattgttttcctttgaaggtgtcatgttttcttgcttttcaatgttttttgtatcgttatatttatatctgtacatctgatgtcacttcttcctattttatgcattggcttttgtagggaaagactttttcctgtagatgtagctatagtgttggttggatagggtgctttggctntgattctgggtgagtgcagtagtatagtctccctgtgatttcttcagctttaatgagcattagcggtgtctgagagtccctcagtggcttagactgtggttgttaatgaaggctgtagtaggcttttctggggactgtgactccaggtagaccagtgctcaggcactagtagttgtgccagtaggcagggcatgcctttcctcaggcccctagatagtacatgtgggcgccagcaggcataggcagagcataacagtacttaaggccccagatgaaatgcacaggcaccaacagcaggcagaacaggcctgtcgtcaggccctctgatggtgtatgcaggcnatggcagcagcgtgctagttgagtcagtcctcaggcccntagatggcatgcttaggcacagttganagtggcngtgggcngagcaggcttgtccttaggaccctagataatgtgtgctggtggcagtggtgngcagggcaggcttctctccaagcccacctctggagtttgcaggtgctggtggcaggcaggtgggttgacctcctggcactatgtgcacaggtgacagcagcagtaggtgggttagacccttttcaatcccactttagagctcttcagttagaagttagtttatggtgctcctttttctaaccgtaagtcattataaaatacaggtttatcagttattttttggcatatttaacacatttaaatgggatgaacagctttttagtttataataggaagctaataaaaatcaaatctaatttgtttcattttgttttgttttttgagacagagtcttgctctgtcacccaggctggacgcagtggaggttgtagtgagccaagattgcaccacggcacgctagcctgggtgacacagcaagactccatctccaaaaaaaaaaaaaaaattactttcaacaaggcatatagtctcttgtaatatatatgtatactattacattgtacagaatctgtacttatgtttggtgtgtaatataccaattagttttatataatatcctcataagctattctaatttttgagagaaacacaaaaagttatagattgatagtctgtataatattagacaaaatagtaagctttataaaaagttatttttggtaaatggtaaggaatttggggtggaatgtgatgagattaaaatgtagctttggtataacttcatgtgtatttcaaaatatactgaacgtcaacatgatttgaataaagaaaatgtattttctacttgaaccaca

SEQ ID NO: 308767 - DNA, 3993 bp, Homo sapiens
gtctcctagtcgcctgccaccagcccctgagagactgcaggtccagtgaaaaggagcaggaacggcagcagcccggccgccgacccggaagctctttcaccgccaaccgcgaggctgcaaagggtgtgaacccggaagcgatttcatagccacggtaacggcggggtggaaagctaaggcctttgaagacctgggaccccgtagtttcgggagagggtgaggggtgaatggtgctgaggtgcgaggagagggaaggacagtaaagagcaggtgggcaggagggtctccgactccagagacctgagcttttggggcgcgggtgggagcgcgggggaaccctcaagacggctttcttttggcgactgagggtttttctgccacaggaagctgggccgggctgctgtgcctgggaggagggaaggaggaatgagaaagcggtgacggtccctgccccccctcgccaggtgactgtcccacccatttagttgaatgtagcggccagagaggcactcgcggcagcccgtacgggtgggacctctcggtgtccttcgggaaacaggaggagcaagttcgactccagcgagggaaaacggaggtgggagactgaaccatctccacatctagttgccccaggtttttggctttcatcgctttttctacatgtttttagcctcaccagaagtctttcatctcggtggtccaactcaggatctcagcctcattattttcttacccttctggagtgcatatgtgcctttacagtttctgtttgcaaacgctgtctagcatactaagaggatgttagcaaacctgttccatggacactaaatggcagttgtacatctcccctcatcagtcatagtgacaaccagaaatgccctccatattttccagtgatcccagtcttcaatgcgtctgtctcataatttgtaaacgtttattatcttgaagtcattgttaatctgtggtgaaaagtaattgctaaatagaaattctgagaagaaaaaggcctcatccttttcacatgatgtaggaaggtctgttgcatgagcaatgggaaatccagaaaacatagaagatgcatatgttgctgttattcgtccaaagaatactgccagtctcaattctcgggaatacagagctaagtcatatgaaattttgttgcatgaagttcccattgaaggacagaaaaaaaagagaaagaaagttttattggaaacgaaacttcaaggcaacagtgaaataacacaaggcatattggattacgtagtagaaaccaccaaaccaatttctcctgcaaaccagggtatcagaggaaaacgagttgtactaatgaaaaaatttcctctggatggagagaagatgggcagagaagcatcattatttattgttccatcagttgtcaaagataatactaaatacacatataccccaggatgcccaattttttactgcttacaagatattatgcgagtctgtagtgaatccagtactcattttgctacacttacagcaaggatgttaatagccttggataagtggttagatgaacgtcatgcacaatctcactttattccagctttattccgaccttctcctcttgagcggataaaaactaatgtcataaatcctgcatatgctactgaatcaggtcagacagaaaactcactacatatgggctatagtgcactagaaataaagagtaaaatgttagccctagagaaagcagatacctgtatttacaaccctttgtttggatcagatcttcagtatacaaatcgggtagataaagtggtaataaatccatactttggtctaggagctccagactactcaaaaatccaaatacctaaacaggaaaaatggcagagaagcatgagcagtgtcacagaagacaaggaacgacagtgggtagatgattttcctctccaccgaagcgcctgtgaaggagattcagaattactaagccgtcttctcagtgaaagattttcagtcaaccagttagatagtgaccactgggcacccattcattatgcatgctggtatggaaaagttgaggccactcgcatattgttagagaaaggaaagtgcaatccaaaccttttaaatggacaacttagttctcctcttcattttgctgctggaggaggacatgctgaaatagtacagattctcctaaaccacccagaaacggatagacatataacagaccaacaaggaagatctccattaaatatttgtgaagaaaacaaacaaaacaactgggaagaagctgcaaaattgttgaaggaagcaattaacaaaccatatgaaaaagttcgaatatacagaatggatgggtcatatcgttctgttgaattgaagcatggaaataataccacagtgcagcagataatggaaggaatgcgtctctctcaagaaactcagcaatatttcactatatggatttgttcagaaaacctcagccttcaactcaaaccatatcataaacccttgcaacatgttcgtgactggccagaaatacttgctgaattgactaatctggatcctcaaagggaaacacctcagctttttctaagaagagatgtgagacttcccttggaagttgaaaaacagattgaagacccactagctattcttattctctttgatgaagccagatataatttattgaagggcttttatacagctcctgatgctaagctgataacattggcaagtctgcttttgcaaatagtctatggaaattatgagagtaaaaaacacaagcaaggtttcctaaatgaagaaaatctaaaatccatcgtacctgttaccaaactgaaaagtaaggcacctcactggacaaatcgcatacttcatgaatacaagaatctcagtacaagtgaaggtgtcagtaaagaaatgcatcaccttcagcgcatgttcttacagaattgctgggaaattcctacttatggagcagcatttttcacaggacagatatttacaaaggcaagccccagcaatcataaagtcatccctgtgtatgtaggagtgaatataaaaggacttcatctcctcaacatggaaactaaggctttactcatcagtcttaagtatggttgttttatgtggcaattgggagatactgatacttgttttcagatccatagcatggaaaataaaatgagctttatagtacatacaaaacaggctggtctcgtggtaaaactgttaatgaagctaaatggacagttaatgcccactgaaagaaattcatgaaagagaagtaactgttactcaagccaccacattttgtaatgcagagttttttttccgtgaaagatttcttaaaatattacttttggccgagcatggtggctcacccctgtaattccagcactttgggaggctggggcaggcggatcacctgaagtcagagttcaagaccagcctggccaacatggtgaaaccctgtctctacaaaaatacaaaaattagctgggtgtggtggcgggcgcctataatcctagctactagggaggccaaggtgggagatcgcttaaacccaggaggtggaggttgtagtgagccaagattgcaccacggcacgctagcctgggtgacacagcaagactccatctccaaaaaaaaaaaaaaaattactttcaacaaggcatatagtctcttgtaatatatatgtatactattacattgtacagaatctgtacttatgtttggtgtgtaatataccaattagttttatataatatcctcataagctattctaatttttgagagaaacacaaaaagttatagattgatagtctgtataatattagacaaaatagtaagctttataaaaagttatttttggtaaatggtaaggaatttggggtggaatgtgatgagattaaaatgtagctttggtataacttcatgtgtatttcaaaatatactgaacgtcaacatgatttgaataaagaaaatgtattttctacttgaaccaca

SEQ ID NO: 308768 - DNA, 3630 bp, Homo sapiens
gtctcctagtcgcctgccaccagcccctgagagactgcaggtccagtgaaaaggagcaggaacggcagcagcccggccgccgacccggaagctctttcaccgccaaccgcgaggctgcaaagggtgtgaacccggaagcgatttcatagccacggtaacggcggggtggaaagctaaggcctttgaagacctgggaccccgtagtttcgggagagggtgaggggtgaatggtgctgaggtgcgaggagagggaaggacagtaaagagcaggtttttggctttcatcgctttttctacatgtttttagcctcaccagaagtctttcatctcggtggtccaactcaggatctcagcctcattattttcttacccttctggagtgcatatgtgcctttacagtttctgtttgcaaacgctgtctagcatactaagaggatgttagcaaacctgttccatggacactaaatggcagttgtacatctcccctcatcagtcatagtgacaaccagaaatgccctccatattttccagtgatcccagtcttcaatgcgtctgtctcataatttgtaaacgtttattatcttgaagtcattgttaatctgtggtgaaaagtaattgctaaatagaaattctgagaagaaaaaggcctcatccttttcacatgatgtaggaaggtctgttgcatgagcaatgggaaatccagaaaacatagaagatgcatatgttgctgttattcgtccaaagaatactgccagtctcaattctcgggaatacagagctaagtcatatgaaattttgttgcatgaagttcccattgaaggacagaaaaaaaagagaaagaaagttttattggaaacgaaacttcaaggcaacagtgaaataacacaaggcatattggattacgtagtagaaaccaccaaaccaatttctcctgcaaaccagggtatcagaggaaaacgagttgtactaatgaaaaaatttcctctggatggagagaagatgggcagagaagcatcattatttattgttccatcagttgtcaaagataatactaaatacacatataccccaggatgcccaattttttactgcttacaagatattatgcgagtctgtagtgaatccagtactcattttgctacacttacagcaaggatgttaatagccttggataagtggttagatgaacgtcatgcacaatctcactttattccagctttattccgaccttctcctcttgagcggataaaaactaatgtcataaatcctgcatatgctactgaatcaggtcagacagaaaactcactacatatgggctatagtgcactagaaataaagagtaaaatgttagccctagagaaagcagatacctgtatttacaaccctttgtttggatcagatcttcagtatacaaatcgggtagataaagtggtaataaatccatactttggtctaggagctccagactactcaaaaatccaaatacctaaacaggaaaaatggcagagaagcatgagcagtgtcacagaagacaaggaacgacagtgggtagatgattttcctctccaccgaagcgcctgtgaaggagattcagaattactaagccgtcttctcagtgaaagattttcagtcaaccagttagatagtgaccactgggcacccattcattatgcatgctggtatggaaaagttgaggccactcgcatattgttagagaaaggaaagtgcaatccaaaccttttaaatggacaacttagttctcctcttcattttgctgctggaggaggacatgctgaaatagtacagattctcctaaaccacccagaaacggatagacatataacagaccaacaaggaagatctccattaaatatttgtgaagaaaacaaacaaaacaactgggaagaagctgcaaaattgttgaaggaagcaattaacaaaccatatgaaaaagttcgaatatacagaatggatgggtcatatcgttctgttgaattgaagcatggaaataataccacagtgcagcagataatggaaggaatgcgtctctctcaagaaactcagcaatatttcactatatggatttgttcagaaaacctcagccttcaactcaaaccatatcataaacccttgcaacatgttcgtgactggccagaaatacttgctgaattgactaatctggatcctcaaagggaaacacctcagctttttctaagaagagatgtgagacttcccttggaagttgaaaaacagattgaagacccactagctattcttattctctttgatgaagccagatataatttattgaagggcttttatacagctcctgatgctaagctgataacattggcaagtctgcttttgcaaatagtctatggaaattatgagagtaaaaaacacaagcaaggtttcctaaatgaagaaaatctaaaatccatcgtacctgttaccaaactgaaaagtaaggcacctcactggacaaatcgcatacttcatgaatacaagaatctcagtacaagtgaaggtgtcagtaaagaaatgcatcaccttcagcgcatgttcttacagaattgctgggaaattcctacttatggagcagcatttttcacaggacagatatttacaaaggcaagccccagcaatcataaagtcatccctgtgtatgtaggagtgaatataaaaggacttcatctcctcaacatggaaactaaggctttactcatcagtcttaagtatggttgttttatgtggcaattgggagatactgatacttgttttcagatccatagcatggaaaataaaatgagctttatagtacatacaaaacaggctggtctcgtggtaaaactgttaatgaagctaaatggacagttaatgcccactgaaagaaattcatgaaagagaagtaactgttactcaagccaccacattttgtaatgcagagttttttttccgtgaaagatttcttaaaatattacttttggccgagcatggtggctcacccctgtaattccagcactttgggaggctggggcaggcggatcacctgaagtcagagttcaagaccagcctggccaacatggtgaaaccctgtctctacaaaaatacaaaaattagctgggtgtggtggcgggcgcctataatcctagctactagggaggccaaggtgggagatcgcttaaacccaggaggtggaggttgtagtgagccaagattgcaccacggcacgctagcctgggtgacacagcaagactccatctccaaaaaaaaaaaaaaaattactttcaacaaggcatatagtctcttgtaatatatatgtatactattacattgtacagaatctgtacttatgtttggtgtgtaatataccaattagttttatataatatcctcataagctattctaatttttgagagaaacacaaaaagttatagattgatagtctgtataatattagacaaaatagtaagctttataaaaagttatttttggtaaatggtaaggaatttggggtggaatgtgatgagattaaaatgtagctttggtataacttcatgtgtatttcaaaatatactgaacgtcaacatgatttgaataaagaaaatgtattttctacttgaaccaca

SEQ ID NO: 308769 - DNA, 3920 bp, Homo sapiens
gtctcctagtcgcctgccaccagcccctgagagactgcaggtccagtgaaaaggagcaggaacggcagcagcccggccgccgacccggaagctctttcaccgccaaccgcgaggctgcaaagggtgtgaacccggaagcgatttcatagccacggtaacggcggggtggaaagctaaggcctttgaagacctgggaccccgtagtttcgggagagggtgaggggtgaatggtgctgaggtgcgaggagagggaaggacagtaaagagcaggtgggcaggagggtctccgactccagagacctgagcttttggggcgcgggtgggagcgcgggggaaccctcaagacggctttcttttggcgactgagggtttttctgccacaggaagctgggccgggctgctgtgcctgggaggagggaaggaggaatgagaaagcggtgacggtccctgccccccctcgccaggtgactgtcccacccatttagttgaatgtagcggccagagaggcactcgcggcagcccgtacgggtgggacctctcggtgtccttcgggaaacaggaggagcaagttcgactccagcgagggaaaacggaggtgggagactgaaccatctccacatctagttgccccaggtttttggctttcatcgctttttctacatgtttttagcctcaccagaagtctttcatctcggtggtccaactcaggatctcagcctcattattttcttacccttctggagtgcatatgtgcctttacagtttctgtttgcaaacgctgtctagcatactaagaggatgttagcaaacctgttccatggacactaaatggcagttgtacatctcccctcatcagtcatagtgacaaccagaaatgccctccatattttccagtgatcccagtcttcaatgcgtctgtctcataatttgtaaacgtttattatcttgaagtcattgttaatctgtggtgaaaagtaattgctaaatagaaattctgagaagaaaaaggcctcatccttttcacatgatgtaggaaggtctgttgcatgagcaatgggaaatccagaaaacatagaagatgcatatgttgctgttattcgtccaaagaatactgccagtctcaattctcgggaatacagagctaagtcatatgaaattttgttgcatgaagttcccattgaaggacagaaaaaaaagagaaagaaagttttattggaaacgaaacttcaaggcaacagtgaaataacacaaggcatattggattacgtagtagaaaccaccaaaccaatttctcctgcaaaccagggtatcagaggaaaacgagttgtactaatgaaaaaatttcctctggatggagagaagatgggcagagaagcatcattatttattgttccatcagttgtcaaagataatactaaatacacatataccccaggatgcccaattttttactgcttacaagatattatgcgagtctgtagtgaatccagtactcattttgctacacttacagcaaggatgttaatagccttggataagtggttagatgaacgtcatgcacaatctcactttattccagctttattccgaccttctcctcttgagcggataaaaactaatgtcataaatcctgcatatgctactgaatcaggtcagacagaaaactcactacatatgggctatagtgcactagaaataaagagtaaaatgttagccctagagaaagcagatacctgtatttacaaccctttgtttggatcagatcttcagtatacaaatcgggtagataaagtggtaataaatccatactttggtctaggagctccagactactcaaaaatccaaatacctaaacaggaaaaatggcagagaagcatgagcagtgtcacagaagacaaggaacgacagtgggtagatgattttcctctccaccgaagcgcctgtgaaggagattcagaattactaagccgtcttctcagtgaaagattttcagtcaaccagttagatagtgaccactgggcacccattcattatgcatgctggtatggaaaagttgaggccactcgcatattgttagagaaaggaaagtgcaatccaaaccttttaaatggacaacttagttctcctcttcattttgctgctggaggaggacatgctgaaatagtacagattctcctaaaccacccagaaacggatagacatataacagaccaacaaggaagatctccattaaatatttgtgaagaaaacaaacaaaacaactgggaagaagctgcaaaattgttgaaggaagcaattaacaaaccatatgaaaaagttcgaatatacagaatggatgggtcatatcgttctgttgaattgaagcatggaaataataccacagtgcagcagataatggaaggaatgcgtctctctcaagaaactcagcaatatttcactatatggatttgttcagaaaacctcagccttcaactcaaaccatatcataaacccttgcaacatgttcgtgactggccagaaatacttgctgaattgactaatctggatcctcaaagggaaacacctcagctttttctaagaagagatgtgagacttcccttggaagttgaaaaacagattgaagacccactagctattcttattctctttgatgaagccagatataatttattgaagggcttttatacagctcctgatgctaagctgataacattggcaagtctgcttttgcaaatagtctatggaaattatgagagtaaaaaacacaagcaaggtttcctaaatgaagaaaatctaaaatccatcgtacctgttaccaaactgaaaagtaaggcacctcactggacaaatcgcatacttcatgaatacaagaatctcagtacaagtgaaggtgtcagtaaagaaatgcatcaccttcagcgcatgttcttacagaattgctgggaaattcctacttatggagcagcatttttcacaggacagatatttacaaaggcaagccccagcaatcataaagtcatccctgtgtatgtaggagtgaatataaaaggacttcatctcctcaacatggaaactaaggctttactcatcagtcttaagtatggttgttttatgtggcaattgggagatactgatacttgttttcagatccatagcatggaaaataaaatgagctttatagtacatacaaaacaggctggtctcgtggtaaaactgttaatgaagctaaatggacagttaatgcccactgaaagaaattcatgaaagagaagtaactgttactcaagccaccacattttgtaatgcagagttttttttccgtgaaagatttcttaaaatattacttttggccgagcatggtggctcacccctgtaattccagcactttgggaggctggggcaggcggatcacctgaagtcagagttcaagaccagcctggccaacatggtgaaaccctgtctctacaaaaatacaaaaattagctgggtgtggtggcgggcgcctataatcctagctactagggaggccaaggtgggagatcgcttaaacccaggaggtggaggttgtagtgagccaagattgcaccacggcacgctagcctgggtgacacagcaagactccatctccaaaaaaaaaaaaaaaattactttcaacaaggcatatagtctcttgtaatatatatgtatactattacattgtacagaatctgtacttatgtttggtgtgtaatataccaattagttttatataatatcctcataagctattctaatttttgagagaaacacaaaaagttatagattgatagtctgtataatattagacaaaatagtaagctttataaaaagttatttttggtaaatggtaaggaatttggggtggaatgtgatgagatctcgctcgggtcctctgatcgccc

SEQ ID NO: 308770 - DNA, 3683 bp, Homo sapiens
gtctcctagtcgcctgccaccagcccctgagagactgcaggtccagtgaaaaggagcaggaacggcagcagcccggccgccgacccggaagctctttcaccgccaaccgcgaggctgcaaagggtgtgaacccggaagcgatttcatagccacggtgactgtcccacccatttagttgaatgtagcggccagagaggcactcgcggcagcccgtacgggtgggacctctcggtgtccttcgggaaacaggaggagcaagttcgactccagcgagggaaaacggaggtgggagactgaaccatctccacatctagttgccccaggtttttggctttcatcgctttttctacatgtttttagcctcaccagaagtctttcatctcggtggtccaactcaggatctcagcctcattattttcttacccttctggagtgcatatgtgcctttacagtttctgtttgcaaacgctgtctagcatactaagaggatgttagcaaacctgttccatggacactaaatggcagttgtacatctcccctcatcagtcatagtgacaaccagaaatgccctccatattttccagtgatcccagtcttcaatgcgtctgtctcataatttgtaaacgtttattatcttgaagtcattgttaatctgtggtgaaaagtaattgctaaatagaaattctgagaagaaaaaggcctcatccttttcacatgatgtaggaaggtctgttgcatgagcaatgggaaatccagaaaacatagaagatgcatatgttgctgttattcgtccaaagaatactgccagtctcaattctcgggaatacagagctaagtcatatgaaattttgttgcatgaagttcccattgaaggacagaaaaaaaagagaaagaaagttttattggaaacgaaacttcaaggcaacagtgaaataacacaaggcatattggattacgtagtagaaaccaccaaaccaatttctcctgcaaaccagggtatcagaggaaaacgagttgtactaatgaaaaaatttcctctggatggagagaagatgggcagagaagcatcattatttattgttccatcagttgtcaaagataatactaaatacacatataccccaggatgcccaattttttactgcttacaagatattatgcgagtctgtagtgaatccagtactcattttgctacacttacagcaaggatgttaatagccttggataagtggttagatgaacgtcatgcacaatctcactttattccagctttattccgaccttctcctcttgagcggataaaaactaatgtcataaatcctgcatatgctactgaatcaggtcagacagaaaactcactacatatgggctatagtgcactagaaataaagagtaaaatgttagccctagagaaagcagatacctgtatttacaaccctttgtttggatcagatcttcagtatacaaatcgggtagataaagtggtaataaatccatactttggtctaggagctccagactactcaaaaatccaaatacctaaacaggaaaaatggcagagaagcatgagcagtgtcacagaagacaaggaacgacagtgggtagatgattttcctctccaccgaagcgcctgtgaaggagattcagaattactaagccgtcttctcagtgaaagattttcagtcaaccagttagatagtgaccactgggcacccattcattatgcatgctggtatggaaaagttgaggccactcgcatattgttagagaaaggaaagtgcaatccaaaccttttaaatggacaacttagttctcctcttcattttgctgctggaggaggacatgctgaaatagtacagattctcctaaaccacccagaaacggatagacatataacagaccaacaaggaagatctccattaaatatttgtgaagaaaacaaacaaaacaactgggaagaagctgcaaaattgttgaaggaagcaattaacaaaccatatgaaaaagttcgaatatacagaatggatgggtcatatcgttctgttgaattgaagcatggaaataataccacagtgcagcagataatggaaggaatgcgtctctctcaagaaactcagcaatatttcactatatggatttgttcagaaaacctcagccttcaactcaaaccatatcataaacccttgcaacatgttcgtgactggccagaaatacttgctgaattgactaatctggatcctcaaagggaaacacctcagctttttctaagaagagatgtgagacttcccttggaagttgaaaaacagattgaagacccactagctattcttattctctttgatgaagccagatataatttattgaagggcttttatacagctcctgatgctaagctgataacattggcaagtctgcttttgcaaatagtctatggaaattatgagagtaaaaaacacaagcaaggtttcctaaatgaagaaaatctaaaatccatcgtacctgttaccaaactgaaaagtaaggcacctcactggacaaatcgcatacttcatgaatacaagaatctcagtacaagtgaaggtgtcagtaaagaaatgcatcaccttcagcgcatgttcttacagaattgctgggaaattcctacttatggagcagcatttttcacaggacagatatttacaaaggcaagccccagcaatcataaagtcatccctgtgtatgtaggagtgaatataaaaggacttcatctcctcaacatggaaactaaggctttactcatcagtcttaagtatggttgttttatgtggcaattgggagatactgatacttgttttcagatccatagcatggaaaataaaatgagctttatagtacatacaaaacaggctggtctcgtggtaaaactgttaatgaagctaaatggacagttaatgcccactgaaagaaattcatgaaagagaagtaactgttactcaagccaccacattttgtaatgcagagttttttttccgtgaaagatttcttaaaatattacttttggccgagcatggtggctcacccctgtaattccagcactttgggaggctggggcaggcggatcacctgaagtcagagttcaagaccagcctggccaacatggtgaaaccctgtctctacaaaaatacaaaaattagctgggtgtggtggcgggcgcctataatcctagctactagggaggccaaggtgggagatcgcttaaacccaggaggtggaggttgtagtgagccaagattgcaccacggcacgctagcctgggtgacacagcaagactccatctccaaaaaaaaaaaaaaaattactttcaacaaggcatatagtctcttgtaatatatatgtatactattacattgtacagaatctgtacttatgtttggtgtgtaatataccaattagttttatataatatcctcataagctattctaatttttgagagaaacacaaaaagttatagattgatagtctgtataatattagacaaaatagtaagctttataaaaagttatttttggtaaatggtaaggaatttggggtggaatgtgatgagattaaaatgtagctttggtataacttcatgtgtatttcaaaatatactgaacgtcaacatgatttgaataaagaaaatgtattttctacttgaaccaca

SEQ ID NO: 308771 - DNA, 3514 bp, Homo sapiens
gtctcctagtcgcctgccaccagcccctgagagactgcaggtccagtgaaaaggagcaggaacggcagcagcccggccgccgacccggaagctctttcaccgccaaccgcgaggctgcaaagggtgtgaacccggaagcgatttcatagccacggtttttggctttcatcgctttttctacatgtttttagcctcaccagaagtctttcatctcggtggtccaactcaggatctcagcctcattattttcttacccttctggagtgcatatgtgcctttacagtttctgtttgcaaacgctgtctagcatactaagaggatgttagcaaacctgttccatggacactaaatggcagttgtacatctcccctcatcagtcatagtgacaaccagaaatgccctccatattttccagtgatcccagtcttcaatgcgtctgtctcataatttgtaaacgtttattatcttgaagtcattgttaatctgtggtgaaaagtaattgctaaatagaaattctgagaagaaaaaggcctcatccttttcacatgatgtaggaaggtctgttgcatgagcaatgggaaatccagaaaacatagaagatgcatatgttgctgttattcgtccaaagaatactgccagtctcaattctcgggaatacagagctaagtcatatgaaattttgttgcatgaagttcccattgaaggacagaaaaaaaagagaaagaaagttttattggaaacgaaacttcaaggcaacagtgaaataacacaaggcatattggattacgtagtagaaaccaccaaaccaatttctcctgcaaaccagggtatcagaggaaaacgagttgtactaatgaaaaaatttcctctggatggagagaagatgggcagagaagcatcattatttattgttccatcagttgtcaaagataatactaaatacacatataccccaggatgcccaattttttactgcttacaagatattatgcgagtctgtagtgaatccagtactcattttgctacacttacagcaaggatgttaatagccttggataagtggttagatgaacgtcatgcacaatctcactttattccagctttattccgaccttctcctcttgagcggataaaaactaatgtcataaatcctgcatatgctactgaatcaggtcagacagaaaactcactacatatgggctatagtgcactagaaataaagagtaaaatgttagccctagagaaagcagatacctgtatttacaaccctttgtttggatcagatcttcagtatacaaatcgggtagataaagtggtaataaatccatactttggtctaggagctccagactactcaaaaatccaaatacctaaacaggaaaaatggcagagaagcatgagcagtgtcacagaagacaaggaacgacagtgggtagatgattttcctctccaccgaagcgcctgtgaaggagattcagaattactaagccgtcttctcagtgaaagattttcagtcaaccagttagatagtgaccactgggcacccattcattatgcatgctggtatggaaaagttgaggccactcgcatattgttagagaaaggaaagtgcaatccaaaccttttaaatggacaacttagttctcctcttcattttgctgctggaggaggacatgctgaaatagtacagattctcctaaaccacccagaaacggatagacatataacagaccaacaaggaagatctccattaaatatttgtgaagaaaacaaacaaaacaactgggaagaagctgcaaaattgttgaaggaagcaattaacaaaccatatgaaaaagttcgaatatacagaatggatgggtcatatcgttctgttgaattgaagcatggaaataataccacagtgcagcagataatggaaggaatgcgtctctctcaagaaactcagcaatatttcactatatggatttgttcagaaaacctcagccttcaactcaaaccatatcataaacccttgcaacatgttcgtgactggccagaaatacttgctgaattgactaatctggatcctcaaagggaaacacctcagctttttctaagaagagatgtgagacttcccttggaagttgaaaaacagattgaagacccactagctattcttattctctttgatgaagccagatataatttattgaagggcttttatacagctcctgatgctaagctgataacattggcaagtctgcttttgcaaatagtctatggaaattatgagagtaaaaaacacaagcaaggtttcctaaatgaagaaaatctaaaatccatcgtacctgttaccaaactgaaaagtaaggcacctcactggacaaatcgcatacttcatgaatacaagaatctcagtacaagtgaaggtgtcagtaaagaaatgcatcaccttcagcgcatgttcttacagaattgctgggaaattcctacttatggagcagcatttttcacaggacagatatttacaaaggcaagccccagcaatcataaagtcatccctgtgtatgtaggagtgaatataaaaggacttcatctcctcaacatggaaactaaggctttactcatcagtcttaagtatggttgttttatgtggcaattgggagatactgatacttgttttcagatccatagcatggaaaataaaatgagctttatagtacatacaaaacaggctggtctcgtggtaaaactgttaatgaagctaaatggacagttaatgcccactgaaagaaattcatgaaagagaagtaactgttactcaagccaccacattttgtaatgcagagttttttttccgtgaaagatttcttaaaatattacttttggccgagcatggtggctcacccctgtaattccagcactttgggaggctggggcaggcggatcacctgaagtcagagttcaagaccagcctggccaacatggtgaaaccctgtctctacaaaaatacaaaaattagctgggtgtggtggcgggcgcctataatcctagctactagggaggccaaggtgggagatcgcttaaacccaggaggtggaggttgtagtgagccaagattgcaccacggcacgctagcctgggtgacacagcaagactccatctccaaaaaaaaaaaaaaaattactttcaacaaggcatatagtctcttgtaatatatatgtatactattacattgtacagaatctgtacttatgtttggtgtgtaatataccaattagttttatataatatcctcataagctattctaatttttgagagaaacacaaaaagttatagattgatagtctgtataatattagacaaaatagtaagctttataaaaagttatttttggtaaatggtaaggaatttggggtggaatgtgatgagattaaaatgtagctttggtataacttcatgtgtatttcaaaatatactgaacgtcaacatgatttgaataaagaaaatgtattttctacttgaaccaca

SEQ ID NO: 308772 - DNA, 3575 bp, Homo sapiens
gtctcctagtcgcctgccaccagcccctgagagactgcaggtccagtgaaaaggagcaggaacggcagcagcccggccgccgacccggaagctctttcaccgccaaccgcgaggctgcaaagggtgtgaacccggaagcgatttcatagccacggtaacggcggggtggaaagctaaggcctttgaagacctgggaccccgtagtttcgggagagggtgaggggtgaatggtgctgaggtgcgaggagagggaaggacagtaaagagcaggtgggcaggagggtctccgactccagagacctgagcttttggggcgcgggtgggagcgcgggggaaccctcaagacggctttcttttggcgactgagggtttttctgccacaggaagctgggccgggctgctgtgcctgggaggagggaaggaggaatgagaaagcggtgacggtccctgccccccctcgccaggtgactgtcccacccatttagttgaatgtagcggccagagaggcactcgcggcagcccgtacgggtgggacctctcggtgtccttcgggaaacaggaggagcaagttcgactccagcgagggaaaacggaggtgggagactgaaccatctccacatctagttgccccagcaatgggaaatccagaaaacatagaagatgcatatgttgctgttattcgtccaaagaatactgccagtctcaattctcgggaatacagagctaagtcatatgaaattttgttgcatgaagttcccattgaaggacagaaaaaaaagagaaagaaagttttattggaaacgaaacttcaaggcaacagtgaaataacacaaggcatattggattacgtagtagaaaccaccaaaccaatttctcctgcaaaccagggtatcagaggaaaacgagttgtactaatgaaaaaatttcctctggatggagagaagatgggcagagaagcatcattatttattgttccatcagttgtcaaagataatactaaatacacatataccccaggatgcccaattttttactgcttacaagatattatgcgagtctgtagtgaatccagtactcattttgctacacttacagcaaggatgttaatagccttggataagtggttagatgaacgtcatgcacaatctcactttattccagctttattccgaccttctcctcttgagcggataaaaactaatgtcataaatcctgcatatgctactgaatcaggtcagacagaaaactcactacatatgggctatagtgcactagaaataaagagtaaaatgttagccctagagaaagcagatacctgtatttacaaccctttgtttggatcagatcttcagtatacaaatcgggtagataaagtggtaataaatccatactttggtctaggagctccagactactcaaaaatccaaatacctaaacaggaaaaatggcagagaagcatgagcagtgtcacagaagacaaggaacgacagtgggtagatgattttcctctccaccgaagcgcctgtgaaggagattcagaattactaagccgtcttctcagtgaaagattttcagtcaaccagttagatagtgaccactgggcacccattcattatgcatgctggtatggaaaagttgaggccactcgcatattgttagagaaaggaaagtgcaatccaaaccttttaaatggacaacttagttctcctcttcattttgctgctggaggaggacatgctgaaatagtacagattctcctaaaccacccagaaacggatagacatataacagaccaacaaggaagatctccattaaatatttgtgaagaaaacaaacaaaacaactgggaagaagctgcaaaattgttgaaggaagcaattaacaaaccatatgaaaaagttcgaatatacagaatggatgggtcatatcgttctgttgaattgaagcatggaaataataccacagtgcagcagataatggaaggaatgcgtctctctcaagaaactcagcaatatttcactatatggatttgttcagaaaacctcagccttcaactcaaaccatatcataaacccttgcaacatgttcgtgactggccagaaatacttgctgaattgactaatctggatcctcaaagggaaacacctcagctttttctaagaagagatgtgagacttcccttggaagttgaaaaacagattgaagacccactagctattcttattctctttgatgaagccagatataatttattgaagggcttttatacagctcctgatgctaagctgataacattggcaagtctgcttttgcaaatagtctatggaaattatgagagtaaaaaacacaagcaaggtttcctaaatgaagaaaatctaaaatccatcgtacctgttaccaaactgaaaagtaaggcacctcactggacaaatcgcatacttcatgaatacaagaatctcagtacaagtgaaggtgtcagtaaagaaatgcatcaccttcagcgcatgttcttacagaattgctgggaaattcctacttatggagcagcatttttcacaggacagatatttacaaaggcaagccccagcaatcataaagtcatccctgtgtatgtaggagtgaatataaaaggacttcatctcctcaacatggaaactaaggctttactcatcagtcttaagtatggttgttttatgtggcaattgggagatactgatacttgttttcagatccatagcatggaaaataaaatgagctttatagtacatacaaaacaggctggtctcgtggtaaaactgttaatgaagctaaatggacagttaatgcccactgaaagaaattcatgaaagagaagtaactgttactcaagccaccacattttgtaatgcagagttttttttccgtgaaagatttcttaaaatattacttttggccgagcatggtggctcacccctgtaattccagcactttgggaggctggggcaggcggatcacctgaagtcagagttcaagaccagcctggccaacatggtgaaaccctgtctctacaaaaatacaaaaattagctgggtgtggtggcgggcgcctataatcctagctactagggaggccaaggtgggagatcgcttaaacccaggaggtggaggttgtagtgagccaagattgcaccacggcacgctagcctgggtgacacagcaagactccatctccaaaaaaaaaaaaaaaattactttcaacaaggcatatagtctcttgtaatatatatgtatactattacattgtacagaatctgtacttatgtttggtgtgtaatataccaattagttttatataatatcctcataagctattctaatttttgagagaaacacaaaaagttatagattgatagtctgtataatattagacaaaatagtaagctttataaaaagttatttttggtaaatggtaaggaatttggggtggaatgtgatgagattaaaatgtagctttggtataacttcatgtgtatttcaaaatatactgaacgtcaacatgatttgaataaagaaaatgtattttctacttgaaccaca

SEQ ID NO: 308773 - DNA, 3482 bp, Homo sapiens
gtctcctagtcgcctgccaccagcccctgagagactgcaggtccagtgaaaaggagcaggaacggcagcagcccggccgccgacccggaagctctttcaccgccaaccgcgaggctgcaaagggtgtgaacccggaagcgatttcatagccacggtaacggcggggtggaaagctaaggcctttgaagacctgggaccccgtagtttcgggagagggtgaggggtgaatggtgctgaggtgcgaggagagggaaggacagtaaagagcaggtttttggctttcatcgctttttctacatgtttttagcctcaccagaagtctttcatctcggtggtccaactcaggatctcagcctcattattttcttacccttctggagtgcatatgtgcctttacagtttctgtttgcaaacgctgtctagcatactaagaggatgttagcaaacctgttccatggacactaaatggcagttgtacatctcccctcatcagtcatagtgacaaccagaaatgccctccatattttccagtgatcccagcaatgggaaatccagaaaacatagaagatgcatatgttgctgttattcgtccaaagaatactgccagtctcaattctcgggaatacagagctaagtcatatgaaattttgttgcatgaagttcccattgaaggacagaaaaaaaagagaaagaaagttttattggaaacgaaacttcaaggcaacagtgaaataacacaaggcatattggattacgtagtagaaaccaccaaaccaatttctcctgcaaaccagggtatcagaggaaaacgagttgtactaatgaaaaaatttcctctggatggagagaagatgggcagagaagcatcattatttattgttccatcagttgtcaaagataatactaaatacacatataccccaggatgcccaattttttactgcttacaagatattatgcgagtctgtagtgaatccagtactcattttgctacacttacagcaaggatgttaatagccttggataagtggttagatgaacgtcatgcacaatctcactttattccagctttattccgaccttctcctcttgagcggataaaaactaatgtcataaatcctgcatatgctactgaatcaggtcagacagaaaactcactacatatgggctatagtgcactagaaataaagagtaaaatgttagccctagagaaagcagatacctgtatttacaaccctttgtttggatcagatcttcagtatacaaatcgggtagataaagtggtaataaatccatactttggtctaggagctccagactactcaaaaatccaaatacctaaacaggaaaaatggcagagaagcatgagcagtgtcacagaagacaaggaacgacagtgggtagatgattttcctctccaccgaagcgcctgtgaaggagattcagaattactaagccgtcttctcagtgaaagattttcagtcaaccagttagatagtgaccactgggcacccattcattatgcatgctggtatggaaaagttgaggccactcgcatattgttagagaaaggaaagtgcaatccaaaccttttaaatggacaacttagttctcctcttcattttgctgctggaggaggacatgctgaaatagtacagattctcctaaaccacccagaaacggatagacatataacagaccaacaaggaagatctccattaaatatttgtgaagaaaacaaacaaaacaactgggaagaagctgcaaaattgttgaaggaagcaattaacaaaccatatgaaaaagttcgaatatacagaatggatgggtcatatcgttctgttgaattgaagcatggaaataataccacagtgcagcagataatggaaggaatgcgtctctctcaagaaactcagcaatatttcactatatggatttgttcagaaaacctcagccttcaactcaaaccatatcataaacccttgcaacatgttcgtgactggccagaaatacttgctgaattgactaatctggatcctcaaagggaaacacctcagctttttctaagaagagatgtgagacttcccttggaagttgaaaaacagattgaagacccactagctattcttattctctttgatgaagccagatataatttattgaagggcttttatacagctcctgatgctaagctgataacattggcaagtctgcttttgcaaatagtctatggaaattatgagagtaaaaaacacaagcaaggtttcctaaatgaagaaaatctaaaatccatcgtacctgttaccaaactgaaaagtaaggcacctcactggacaaatcgcatacttcatgaatacaagaatctcagtacaagtgaaggtgtcagtaaagaaatgcatcaccttcagcgcatgttcttacagaattgctgggaaattcctacttatggagcagcatttttcacaggacagatatttacaaaggcaagccccagcaatcataaagtcatccctgtgtatgtaggagtgaatataaaaggacttcatctcctcaacatggaaactaaggctttactcatcagtcttaagtatggttgttttatgtggcaattgggagatactgatacttgttttcagatccatagcatggaaaataaaatgagctttatagtacatacaaaacaggctggtctcgtggtaaaactgttaatgaagctaaatggacagttaatgcccactgaaagaaattcatgaaagagaagtaactgttactcaagccaccacattttgtaatgcagagttttttttccgtgaaagatttcttaaaatattacttttggccgagcatggtggctcacccctgtaattccagcactttgggaggctggggcaggcggatcacctgaagtcagagttcaagaccagcctggccaacatggtgaaaccctgtctctacaaaaatacaaaaattagctgggtgtggtggcgggcgcctataatcctagctactagggaggccaaggtgggagatcgcttaaacccaggaggtggaggttgtagtgagccaagattgcaccacggcacgctagcctgggtgacacagcaagactccatctccaaaaaaaaaaaaaaaattactttcaacaaggcatatagtctcttgtaatatatatgtatactattacattgtacagaatctgtacttatgtttggtgtgtaatataccaattagttttatataatatcctcataagctattctaatttttgagagaaacacaaaaagttatagattgatagtctgtataatattagacaaaatagtaagctttataaaaagttatttttggtaaatggtaaggaatttggggtggaatgtgatgagattaaaatgtagctttggtataacttcatgtgtatttcaaaatatactgaacgtcaacatgatttgaataaagaaaatgtattttctacttgaaccaca

SEQ ID NO: 308774 - DNA, 3770 bp, Homo sapiens
gtctcctagtcgcctgccaccagcccctgagagactgcaggtccagtgaaaaggagcaggaacggcagcagcccggccgccgacccggaagctctttcaccgccaaccgcgaggctgcaaagggtgtgaacccggaagcgatttcatagccacggtaacggcggggtggaaagctaaggcctttgaagacctgggaccccgtagtttcgggagagggtgaggggtgaatggtgctgaggtgcgaggagagggaaggacagtaaagagcaggtgggcaggagggtctccgactccagagacctgagcttttggggcgcgggtgggagcgcgggggaaccctcaagacggctttcttttggcgactgagggtttttctgccacaggaagctgggccgggctgctgtgcctgggaggagggaaggaggaatgagaaagcggtgacggtccctgccccccctcgccaggtgactgtcccacccatttagttgaatgtagcggccagagaggcactcgcggcagcccgtacgggtgggacctctcggtgtccttcgggaaacaggaggagcaagttcgactccagcgagggaaaacggagcctcaccagaagtctttcatctcggtggtccaactcaggatctcagcctcattattttcttacccttctggagtgcatatgtgcctttacagtttctgtttgcaaacgctgtctagcatactaagaggatgttagcaaacctgttccatggacactaaatggcagttgtacatctcccctcatcagtcatagtgacaaccagaaatgccctccatattttccagtgatcccagcaatgggaaatccagaaaacatagaagatgcatatgttgctgttattcgtccaaagaatactgccagtctcaattctcgggaatacagagctaagtcatatgaaattttgttgcatgaagttcccattgaaggacagaaaaaaaagagaaagaaagttttattggaaacgaaacttcaaggcaacagtgaaataacacaaggcatattggattacgtagtagaaaccaccaaaccaatttctcctgcaaaccagggtatcagaggaaaacgagttgtactaatgaaaaaatttcctctggatggagagaagatgggcagagaagcatcattatttattgttccatcagttgtcaaagataatactaaatacacatataccccaggatgcccaattttttactgcttacaagatattatgcgagtctgtagtgaatccagtactcattttgctacacttacagcaaggatgttaatagccttggataagtggttagatgaacgtcatgcacaatctcactttattccagctttattccgaccttctcctcttgagcggataaaaactaatgtcataaatcctgcatatgctactgaatcaggtcagacagaaaactcactacatatgggctatagtgcactagaaataaagagtaaaatgttagccctagagaaagcagatacctgtatttacaaccctttgtttggatcagatcttcagtatacaaatcgggtagataaagtggtaataaatccatactttggtctaggagctccagactactcaaaaatccaaatacctaaacaggaaaaatggcagagaagcatgagcagtgtcacagaagacaaggaacgacagtgggtagatgattttcctctccaccgaagcgcctgtgaaggagattcagaattactaagccgtcttctcagtgaaagattttcagtcaaccagttagatagtgaccactgggcacccattcattatgcatgctggtatggaaaagttgaggccactcgcatattgttagagaaaggaaagtgcaatccaaaccttttaaatggacaacttagttctcctcttcattttgctgctggaggaggacatgctgaaatagtacagattctcctaaaccacccagaaacggatagacatataacagaccaacaaggaagatctccattaaatatttgtgaagaaaacaaacaaaacaactgggaagaagctgcaaaattgttgaaggaagcaattaacaaaccatatgaaaaagttcgaatatacagaatggatgggtcatatcgttctgttgaattgaagcatggaaataataccacagtgcagcagataatggaaggaatgcgtctctctcaagaaactcagcaatatttcactatatggatttgttcagaaaacctcagccttcaactcaaaccatatcataaacccttgcaacatgttcgtgactggccagaaatacttgctgaattgactaatctggatcctcaaagggaaacacctcagctttttctaagaagagatgtgagacttcccttggaagttgaaaaacagattgaagacccactagctattcttattctctttgatgaagccagatataatttattgaagggcttttatacagctcctgatgctaagctgataacattggcaagtctgcttttgcaaatagtctatggaaattatgagagtaaaaaacacaagcaaggtttcctaaatgaagaaaatctaaaatccatcgtacctgttaccaaactgaaaagtaaggcacctcactggacaaatcgcatacttcatgaatacaagaatctcagtacaagtgaaggtgtcagtaaagaaatgcatcaccttcagcgcatgttcttacagaattgctgggaaattcctacttatggagcagcatttttcacaggacagatatttacaaaggcaagccccagcaatcataaagtcatccctgtgtatgtaggagtgaatataaaaggacttcatctcctcaacatggaaactaaggctttactcatcagtcttaagtatggttgttttatgtggcaattgggagatactgatacttgttttcagatccatagcatggaaaataaaatgagctttatagtacatacaaaacaggctggtctcgtggtaaaactgttaatgaagctaaatggacagttaatgcccactgaaagaaattcatgaaagagaagtaactgttactcaagccaccacattttgtaatgcagagttttttttccgtgaaagatttcttaaaatattacttttggccgagcatggtggctcacccctgtaattccagcactttgggaggctggggcaggcggatcacctgaagtcagagttcaagaccagcctggccaacatggtgaaaccctgtctctacaaaaatacaaaaattagctgggtgtggtggcgggcgcctataatcctagctactagggaggccaaggtgggagatcgcttaaacccaggaggtggaggttgtagtgagccaagattgcaccacggcacgctagcctgggtgacacagcaagactccatctccaaaaaaaaaaaaaaaattactttcaacaaggcatatagtctcttgtaatatatatgtatactattacattgtacagaatctgtacttatgtttggtgtgtaatataccaattagttttatataatatcctcataagctattctaatttttgagagaaacacaaaaagttatagattgatagtctgtataatattagacaaaatagtaagctttataaaaagttatttttggtaaatggtaaggaatttggggtggaatgtgatgagattaaaatgtagctttggtataacttcatgtgtatttcaaaatatactgaacgtcaacatgatttgaataaagaaaatgtattttctacttgaaccaca

SEQ ID NO: 308775 - DNA, 3360 bp, Homo sapiens
gtctcctagtcgcctgccaccagcccctgagagactgcaggtccagtgaaaaggagcaggaacggcagcagcccggccgccgacccggaagctctttcaccgccaaccgcgaggctgcaaagggtgtgaacccggaagcgatttcatagccacggtaacggcggggtggaaagctaaggcctttgaagacctgggaccccgtagtttcgggagagggtgaggggtgaatggtgctgaggtgcgaggagagggaaggacagtaaagagcagttgaatgtagcggccagagaggcactcgcggcagcccgtacgggtgggacctctcggtgtccttcgggaaacaggaggagcaagttcgactccagcgagggaaaacggaggtgggagactgaaccatctccacatctagttgccccagcaatgggaaatccagaaaacatagaagatgcatatgttgctgttattcgtccaaagaatactgccagtctcaattctcgggaatacagagctaagtcatatgaaattttgttgcatgaagttcccattgaaggacagaaaaaaaagagaaagaaagttttattggaaacgaaacttcaaggcaacagtgaaataacacaaggcatattggattacgtagtagaaaccaccaaaccaatttctcctgcaaaccagggtatcagaggaaaacgagttgtactaatgaaaaaatttcctctggatggagagaagatgggcagagaagcatcattatttattgttccatcagttgtcaaagataatactaaatacacatataccccaggatgcccaattttttactgcttacaagatattatgcgagtctgtagtgaatccagtactcattttgctacacttacagcaaggatgttaatagccttggataagtggttagatgaacgtcatgcacaatctcactttattccagctttattccgaccttctcctcttgagcggataaaaactaatgtcataaatcctgcatatgctactgaatcaggtcagacagaaaactcactacatatgggctatagtgcactagaaataaagagtaaaatgttagccctagagaaagcagatacctgtatttacaaccctttgtttggatcagatcttcagtatacaaatcgggtagataaagtggtaataaatccatactttggtctaggagctccagactactcaaaaatccaaatacctaaacaggaaaaatggcagagaagcatgagcagtgtcacagaagacaaggaacgacagtgggtagatgattttcctctccaccgaagcgcctgtgaaggagattcagaattactaagccgtcttctcagtgaaagattttcagtcaaccagttagatagtgaccactgggcacccattcattatgcatgctggtatggaaaagttgaggccactcgcatattgttagagaaaggaaagtgcaatccaaaccttttaaatggacaacttagttctcctcttcattttgctgctggaggaggacatgctgaaatagtacagattctcctaaaccacccagaaacggatagacatataacagaccaacaaggaagatctccattaaatatttgtgaagaaaacaaacaaaacaactgggaagaagctgcaaaattgttgaaggaagcaattaacaaaccatatgaaaaagttcgaatatacagaatggatgggtcatatcgttctgttgaattgaagcatggaaataataccacagtgcagcagataatggaaggaatgcgtctctctcaagaaactcagcaatatttcactatatggatttgttcagaaaacctcagccttcaactcaaaccatatcataaacccttgcaacatgttcgtgactggccagaaatacttgctgaattgactaatctggatcctcaaagggaaacacctcagctttttctaagaagagatgtgagacttcccttggaagttgaaaaacagattgaagacccactagctattcttattctctttgatgaagccagatataatttattgaagggcttttatacagctcctgatgctaagctgataacattggcaagtctgcttttgcaaatagtctatggaaattatgagagtaaaaaacacaagcaaggtttcctaaatgaagaaaatctaaaatccatcgtacctgttaccaaactgaaaagtaaggcacctcactggacaaatcgcatacttcatgaatacaagaatctcagtacaagtgaaggtgtcagtaaagaaatgcatcaccttcagcgcatgttcttacagaattgctgggaaattcctacttatggagcagcatttttcacaggacagatatttacaaaggcaagccccagcaatcataaagtcatccctgtgtatgtaggagtgaatataaaaggacttcatctcctcaacatggaaactaaggctttactcatcagtcttaagtatggttgttttatgtggcaattgggagatactgatacttgttttcagatccatagcatggaaaataaaatgagctttatagtacatacaaaacaggctggtctcgtggtaaaactgttaatgaagctaaatggacagttaatgcccactgaaagaaattcatgaaagagaagtaactgttactcaagccaccacattttgtaatgcagagttttttttccgtgaaagatttcttaaaatattacttttggccgagcatggtggctcacccctgtaattccagcactttgggaggctggggcaggcggatcacctgaagtcagagttcaagaccagcctggccaacatggtgaaaccctgtctctacaaaaatacaaaaattagctgggtgtggtggcgggcgcctataatcctagctactagggaggccaaggtgggagatcgcttaaacccaggaggtggaggttgtagtgagccaagattgcaccacggcacgctagcctgggtgacacagcaagactccatctccaaaaaaaaaaaaaaaattactttcaacaaggcatatagtctcttgtaatatatatgtatactattacattgtacagaatctgtacttatgtttggtgtgtaatataccaattagttttatataatatcctcataagctattctaatttttgagagaaacacaaaaagttatagattgatagtctgtataatattagacaaaatagtaagctttataaaaagttatttttggtaaatggtaaggaatttggggtggaatgtgatgagattaaaatgtagctttggtataacttcatgtgtatttcaaaatatactgaacgtcaacatgatttgaataaagaaaatgtattttctacttgaaccaca

SEQ ID NO: 308776 - DNA, 2615 bp, Homo sapiens
  misc_feature (2573)..(2573): n is a, c, g, or t
  misc_feature (2597)..(2597): n is a, c, g, or t
gtctcctagtcgcctgccaccagcccctgagagactgcaggtccagtgaaaaggagcaggaacggcagcagcccggccgccgacccggaagctctttcaccgccaaccgcgaggctgcaaagggtgtgaacccggaagcgatttcatagccacggtgactgtcccacccatttagttgaatgtagcggccagagaggcactcgcggcagcccgtacgggtgggacctctcggtgtccttcgggaaacaggaggagcaagttcgactccagcgagggaaaacggaggtgggagactgaaccatctccacatctagttgccccaggtttttggctttcatcgctttttctacatgtttttagcctcaccagaagtctttcatctcggtggtccaactcaggatctcagcctcattattttcttacccttctggagtgcatatgtgcctttacagtttctgtttgcaaacgctgtctagcatactaagaggatgttagcaaacctgttccatggacactaaatggcagttgtacatctcccctcatcagtcatagtgacaaccagaaatgccctccatattttccagtgatcccagtcttcaatgcgtctgtctcataatttgtaaacgtttattatcttgaagtcattgttaatctgtggtgaaaagtaattgctaaatagaaattctgagaagaaaaaggcctcatccttttcacatgatgtaggaaggtctgttgcatgagcaatgggaaatccagaaaacatagaagatgcatatgttgctgttattcgtccaaagaatactgccagtctcaattctcgggaatacagagctaagtcatatgaaattttgttgcatgaagttcccattgaaggacagaaaaaaaagagaaagaaagttttattggaaacgaaacttcaaggcaacagtgaaataacacaaggcatattggattacgtagtagaaaccaccaaaccaatttctcctgcaaaccagggtatcagaggaaaacgagttgtactaatgaaaaaatttcctctggatggagagaagatgggcagagaagcatcattatttattgttccatcagttgtcaaagataatactaaatacacatataccccaggatgcccaattttttactgcttacaagatattatgcgagtctgtagtgaatccagtactcattttgctacacttacagcaaggatgttaatagccttggataagtggttagatgaacgtcatgcacaatctcactttattccagctttattccgaccttctcctcttgagcggataaaaactaatgtcataaatcctgcatatgctactgaatcaggtcagacagaaaactcactacatatgggctatagtgcactagaaataaagagtaaaatgttagccctagagaaagcagatacctgtatttacaaccctttgtttggatcagatcttcagtatacaaatcgggtagataaagtggtaataaatccatactttggtctaggagctccagactactcaaaaatccaaatacctaaacaggaaaaatggcagagaagcatgagcagtgtcacagaagacaaggaacgacagtgggtagatgattttcctctccaccgaagcgcctgtgaaggagattcagaattactaagccgtcttctcagtgaaagattttcagtcaaccagttagatagtgaccactgggcacccattcattatgcatgctggtatggaaaagttgaggccactcgcatattgttagagaaaggaaagtgcaatccaaaccttttaaatggacaacttagttctcctcttcattttgctgctggaggaggacatgctgaaatagtacagattctcctaaaccacccagaaacggatagacatataacagaccaacaaggaagatctccattaaatatttgtgaagaaaacaaacaaaacaactgggaagaagctgcaaaattgttgaaggaagcaattaacaaaccatatgaaaaagttcgaatatacagaatggatgggtcatatcgttctgttgaattgaagcatggaaataataccacagtgcagcagataatggaaggaatgcgtctctctcaagaaactcagcaatatttcactatatggatttgttcagaaaacctcagccttcaactcaaaccatatcataaacccttgcaacatgttcgtgactggccagaaatacttgctgaattgactaatctggatcctcaaagggaaacacctcagctttttctaagaagagatgtgagacttcccttggaagttgaaaaacagattgaagacccactagctattcttattctctttgatgaagccagatataatttattgaagggcttttatacagctcctgatgctaagctgataacattggcaagtctgcttttgcaaatagtctatggaaattatgagagtaaaaaacacaagcaaggtttcctaaatgaagaaaatctaaaatccatcgtacctgttaccaaactgaaaagtaaggcacctcactggacaaatcgcatacttcatgaatacaaggaatcttaagtnccaaggtggaaagggggtcaggtnaaaggaaaaggcctttaa

SEQ ID NO: 308777 - DNA, 1142 bp, Homo sapiens
aaaaaaaaaaaagaagaaggagaagaaattttaaaaaatgaacaaagtgtatatgacatatgggacaccataaagtgactaattcaaattttgagtgttccagaaggtgaagagaagcccaaaaggcatagaaaatatctatggcaagccccagcaatcataaagtcatccctgtgtatgtaggagtgaatataaaaggacttcatctcctcaacatggaaactaaggctttactcatcagtcttaagtatggttgttttatgtggcaattgggagatactgatacttgttttcagatccatagcatggaaaataaaatgagctttatagtacatacaaaacaggctggtctcgtggtaaaactgttaatgaagctaaatggacagttaatgcccactgaaagaaattcatgaaagagaagtaactgttactcaagccaccacattttgtaatgcagagttttttttccgtgaaagatttcttaaaatattacttttggccgagcatggtggctcacccctgtaattccagcactttgggaggctggggcaggcggatcacctgaagtcagagttcaagaccagcctggccaacatggtgaaaccctgtctctacaaaaatacaaaaattagctgggtgtggtggcgggcgcctataatcctagctactagggaggccaaggtgggagatcgcttaaacccaggaggtggaggttgtagtgagccaagattgcaccacggcacgctagcctgggtgacacagcaagactccatctccaaaaaaaaaaaaaaaattactttcaacaaggcatatagtctcttgtaatatatatgtatactattacattgtacagaatctgtacttatgtttggtgtgtaatataccaattagttttatataatatcctcataagctattctaatttttgagagaaacacaaaaagttatagattgatagtctgtataatattagacaaaatagtaagctttataaaaagttatttttggtaaatggtaaggaatttggggtggaatgtgatgagattaaaatgtagctttggtataacttcatgtgtatttcaaaatatactgaacgtcaacatgatttgaataaagaaaatgtattttctacttgaaccaca

SEQ ID NO: 308778 - DNA, 934 bp, Homo sapiens
gtttccaattatgttgcaggctttactcatcagtcttaagtatggttgttttatgtggcaattgggagatactgatacttgttttcagatccatagcatggaaaataaaatgagctttatagtacatacaaaacaggctggtctcgtggtaaaactgttaatgaagctaaatggacagttaatgcccactgaaagaaattcatgaaagagaagtaactgttactcaagccaccacattttgtaatgcagagttttttttccgtgaaagatttcttaaaatattacttttggccgagcatggtggctcacccctgtaattccagcactttgggaggctggggcaggcggatcacctgaagtcagagttcaagaccagcctggccaacatggtgaaaccctgtctctacaaaaatacaaaaattagctgggtgtggtggcgggcgcctataatcctagctactagggaggccaaggtgggagatcgcttaaacccaggaggtggaggttgtagtgagccaagattgcaccacggcacgctagcctgggtgacacagcaagactccatctccaaaaaaaaaaaaaaaattactttcaacaaggcatatagtctcttgtaatatatatgtatactattacattgtacagaatctgtacttatgtttggtgtgtaatataccaattagttttatataatatcctcataagctattctaatttttgagagaaacacaaaaagttatagattgatagtctgtataatattagacaaaatagtaagctttataaaaagttatttttggtaaatggtaaggaatttggggtggaatgtgatgagattaaaatgtagctttggtataacttcatgtgtatttcaaaatatactgaacgtcaacatgatttgaataaagaaaatgtattttctacttgaaccaca

SEQ ID NO: 308779 - DNA, 816 bp, Homo sapiens
gtctcctagtcgcctgccaccagcccctgagagactgcaggtccagtgaaaaggagcaggaacggcagcagcccggccgccgacccggaagctctttcaccgccaaccgcgaggctgcaaagggtgtgaacccggaagcgatttcatagccacggtaacggcggggtggaaagctaaggcctttgaagacctgggaccccgtagtttcgggagagggtgaggggtgaatggtgctgaggtgcgaggagagggaaggacagtaaagagcagcctcaccagaagtctttcatctcggtggtccaactcaggatctcagcctcattattttcttacccttctggagtgcatatgtgcctttacagtttctgtttgcaaacgctgtctagcatactaagaggatgttagcaaacctgttccatggacactaaatggcagttgtacatctcccctcatcagtcatagtgacaaccagaaatgccctccatattttccagtgatcccagtcttcaatgcgtctgtctcataatttgtaaacgtttattatcttgaagtcattgttaatctgtggtgaaaagtaattgctaaatagaaattctgagaagaaaaaggcctcatccttttcacatgatgtaggaaggtctgttgcatgagcaatgggaaatccagaaaacatagaagatgcatatgttgctgttattcgtccaaagaatactgccagtctcaattctcgggaatacagagctaagtcatatgaaattttcgttgcatgaagttcccattgaaggacaacagaaggaaggtgaagaaaataagctc

SEQ ID NO: 308780 - DNA, 324 bp, Homo sapiens
gagggtttttctgccacaggaagctgggccgggctgctgtgcctgggaggagggaaggaggaatgagaaagcggtgacggtccctgccccccctcgccaggtgactgtcccacccatttagttgaatgtagcggccagagaggcactcgcggcagcccgtacgggtgggacctctcggtgtccttcgggaaacaggaggagcaagttcgactccagcgagggaaaacggaggtgggagactgaaccatctccacatctagttgccccaggcaaggagtttatttttcacatgtagttacagagaaaccatagccactttttggg

SEQ ID NO: 308781 - DNA, 2372 bp, Homo sapiens
agaatggcctcggacacccaggcagtccctgacgtgtcggggaggagccgggcgcggaggtacgctgagtggagctcggggctgcgtaggggagctgagccgagcggctgggcgggcctggccgggccagcggaggggagacgtcggttgagcggcggcgaacatgcgcttttgacacattggaggctttcttgatcatggatggtgaagatataccagatttttcaagtttaaaggaggaaactgcttattggaaggaactttccttgaagtataagcaaagcttccaggaagctcgggatgagctagttgaattccaggaaggaagcagagaattagaagcagagttggaggcacaattagtacaggctgaacaaagaaatagagacttgcaggctgataaccaaagactgaaatatgaagtggaggcattaaaggagaagctagagcatcaatatgcacagagctataagcaggtctcagtgttagaagatgatttaagtcagactcgggccattaaggagcagttgcataagtatgtgagagagctggagcaggccaacgacgacctggagcgagccaaaagggcaacaatagtttcactggaagactttgaacaaaggctaaaccaggccattgaacgaaatgcatttttagaaagtgaacttgatgaaaaggaatctttgttggtctctgtacagaggttaaaggatgaagcaagagatttaaggcaagaactagcagttcgggaaagacaacaggaagtaactagaaagtcggctcctagctctccaactctagactgtgaaaagatggactccgccgtccaagcatcactttctttgccagctacccctgttggcaaaggaacggagaacacttttccttcaccgaaagctataccaaatggttttggtaccagtccactaactccctctgctaggatatcagcactaaacatcgtgggggatctcttacggaaagtaggggctttagaatccaaattagcagcttgcaggaattttgcaaaggaccaagcatcacgaaaatcctatatttcagggaatgttaactgtggggtgctgaatggcaatggcacaaagttctctcgatcagggcatacatctttcttcgacaaaggggcagtaaacggctttgaccccgctcctcctcctcctggtctgggctcctcgcgtccatcgtcagcgccgggtatgctgcctctcagtgtgtgagtgcctagcctccaggtgggggctcctgccctcctccaacaacccaggacacccacgcctcacccctcggtgcctgggcccagccccgtgcccctccgtctgcctccgcacggctggcagagggcaggctgcatgcagtggcggctactgggccctgcccagccccggaactctgcgcgatatcaatactggctattttctcttctcgccgtagtgccgttggtttcacatgattgcacttttgtgggtcgcaaggtgatacatacgtgtattacttggtcactggatgcagaagtacccattcatcacacctgccccatagcccccactctgctgtactgataggatttagttgtgttttaggacattgcaaatcttctagaagttctcccccaaatcaggtcaatgtgtgccctcctgagctcccacccaggcatctccagtgctcatgatcatgtgtcccccaactccacccctcacagtttgggcctgtttctggcaaagagtcaggaaggttactgaattagggaacattttctgcaccttctgattttacttaagcagctaccattccatggacttgcctcccagagcagcacaatgcccgtctgagccccacgtggcaggagcctctgggacggggcacacacaggcccagcctctgtgctgtctcctcctctgtgcgcctcagactcggggtgagggaggcgggcagcctctcgccagccttcccgtccttcagttcaacgacatctttggagtgtttttgttttctcttccaagggccgtcccgttgtgttaggaagggtgagtggctggttccagggtgggccggtgccagctccggggtggactgaacagcggcggctgtccctgtgcatcctttgattactctcatgctgcatttactgtttacatttgttttattgtacataggtttgtaaacattattgcctgagatatttgtatataacttgggctttgtagcttttatttattcagaacgcatacggcatgttaatgactctgatggtgtcctcctctgggcagctgtataggatcatcatgtggttacaaaaaatacttccctcaaaaaaattcttttaatgtggaaacaataaatttcacagaaaaaaa

SEQ ID NO: 308782 - DNA, 636 bp, Homo sapiens
gaaagttatacttaaataggaaattcatttttgagaaatagtaatttaggaagaagacctttatgacattttagatgtcactttgcttgatatatttgctccctctagtgagtattcctgcccttgtttgcaatattttacagatttaaggcaagaactagcagttcgggaaagacaacaggaagtaactagaaagtcggctcctagctctccaactctagactgtgaaaagatggactccgccgtccaagcatcactttctttgccagctacccctgttggcaaaggaacggagaacacttttccttcaccgaaaggtttgtaatgtcttttctttttgaggcgatgtgttagatgatcagcttacgggggtttgttgctgaaggcggttgctaaggtttaaagagtaattttagtttaaaagttggtgaagtctagtgctatgtgaaatagaagaaggaattgttttcctaggccactaatatataggaaacagtgaaatgatggttacatttaagatgagatttttaaaagttaaaggtttttaaggaaagtttattttttgatgatagcaatagattttgtgattacagccgtatgtttaggtagaaaattttaaaaacacaaaaaagaaaa

SEQ ID NO: 308783 - DNA, 453 bp, Homo sapiens
gtaacatcaacaacaaaacccaaatgtaaagggaactgcaagtgtaatcactcagcttttatttttctctagctataccaaatggttttggtaccagtccactaactccctctgctaggatatcagcactaaacatcgtgggggatctcttacggaaagtaggggtaagtttcaattatttatcactaggtgtgtccactgacaaggtattgaattatttcttaatttgaagtgagggaagaaagaaaggatactttcctgtggtaaaggctgtcatgaagctcagaagcaaaagcatccattgactagccaagtccagatgacacttcatgatgcccctgcagaagagcctgtaccttgaactctgaggttcccaccggagcattcttcctgttccccactcctgtttcaacagcacgatgcctctgtccttgtctagaatactttgtctaa

SEQ ID NO: 308784 - DNA, 2270 bp, Homo sapiens
gtgcctgaacggtcaatctagaggatcccgaacgggagacgtcggttgagcggcggcgaacatgcgcttttgacacattggaggctttcttgatcatggatggtgaagatataccagatttttcaagtttaaaggaggaaactgcttattggaaggaactttccttgaagtataagcaaagcttccaggaagctcgggatgagctagttgaattccaggaaggaagcagagaattagaagcagagttggaggcacaattagtacaggctgaacaaagaaatagagacttgcaggctgataaccaaagactgaaatatgaagtggaggcattaaaggagaagctagagcatcaatatgcacagagctataagcaggtctcagtgttagaagatgatttaagtcagactcgggccattaaggagcagttgcataagtatgtgagagagctggagcaggccaacgacgacctggagcgagccaaaagggcaacaatagtttcactggaagactttgaacaaaggctaaaccaggccattgaacgaaatgcatttttagaaagtgaacttgatgaaaaggaatctttgttggtctctgtacagaggttaaaggatgaagcaagagatttaaggcaagaactagcagttcgggaaagacaacaggaagtaactagaaagtcggctcctagctctccaactctagactgtgaaaagatggactccgccgtccaagcatcactttctttgccagctacccctgttggcaaaggaacggagaacacttttccttcaccgaaagctataccaaatggttttggtaccagtccactaactccctctgctaggatatcagcactaaacatcgtgggggatctcttacggaaagtaggggctttagaatccaaattagcagcttgcaggaattttgcaaaggaccaagcatcacgaaaatcctatatttcagggaatgttaactgtggggtgctgaatggcaatggcacaaagttctctcgatcagggcatacatctttcttcgacaaaggggcagtaaacggctttgaccccgctcctcctcctcctggtctgggctcctcgcgtccatcgtcagcgccgggtatgctgcctctcagtgtgtgagtgcctagcctccaggtgggggctcctgccctcctccaacaacccaggacacccacgcctcacccctcggtgcctgggcccagccccgtgcccctccgtctgcctccgcacggctggcagagggcaggctgcatgcagtggcggctactgggccctgcccagccccggaactctgcgcgatatcaatactggctattttctcttctcgccgtagtgccgttggtttcacatgattgcacttttgtgggtcgcaaggtgatacatacgtgtattacttggtcactggatgcagaagtacccattcatcacacctgccccatagcccccactctgctgtactgataggatttagttgtgttttaggacattgcaaatcttctagaagttctcccccaaatcaggtcaatgtgtgccctcctgagctcccacccaggcatctccagtgctcatgatcatgtgtcccccaactccacccctcacagtttgggcctgtttctggcaaagagtcaggaaggttactgaattagggaacattttctgcaccttctgattttacttaagcagctaccattccatggacttgcctcccagagcagcacaatgcccgtctgagccccacgtggcaggagcctctgggacggggcacacacaggcccagcctctgtgctgtctcctcctctgtgcgcctcagactcggggtgagggaggcgggcagcctctcgccagccttcccgtccttcagttcaacgacatctttggagtgtttttgttttctcttccaagggccgtcccgttgtgttaggaagggtgagtggctggttccagggtgggccggtgccagctccggggtggactgaacagcggcggctgtccctgtgcatcctttgattactctcatgctgcatttactgtttacatttgttttattgtacataggtttgtaaacattattgcctgagatatttgtatataacttgggctttgtagcttttatttattcagaacgcatacggcatgttaatgactctgatggtgtcctcctctgggcagctgtataggatcatcatgtggttacaaaaaatacttccctcaaaaaaattcttttaatgtggaaacaataaatttcacagaaaaaaa

SEQ ID NO: 308785 - DNA, 2788 bp, Homo sapiens
cggcgccgaggcctgcccttggggagccttcccggcccggggccgtgtctgaggctccgccggggcgggccgggccgggttccggggcggccagcctgggggcaactgttccaaccgctctaactgtcccctcccttccctggtccgatgtgtggccccccaggggcgcctgcaagggaacgattccggtggcctccggaagatgtgccccgttccgggtagggtgagggctggcggtgacggaggccgggacgtggcaccgtgggctggggcgctggcggcgcaaggagtggcccagtcggaggtggcagcggcgcgcccagcccgcctcctcctaccccctcttcgaaattccttcatttgcgagggtggcttggagcggggttgcattttgatctctcagtgcctctctcccatggggggcgagagcgcgagcagcccacgttgggctcggattggcattctcctgactcccgcccggaactgctaatcatcctccccctggagttcggcaaagtgtcaccaacgggctcgggttacttgtgctcgactcttttcttgctgtaagccatgagatgaccctttaagttttgcaaaggaggctttcttgatcatggatggtgaagatataccagatttttcaagtttaaaggaggaaactgcttattggaaggaactttccttgaagtataagcaaagcttccaggaagctcgggatgagctagttgaattccaggaaggaagcagagaattagaagcagagttggaggcacaattagtacaggctgaacaaagaaatagagacttgcaggctgataaccaaagactgaaatatgaagtggaggcattaaaggagaagctagagcatcaatatgcacagagctataagcaggtctcagtgttagaagatgatttaagtcagactcgggccattaaggagcagttgcataagtatgtgagagagctggagcaggccaacgacgacctggagcgagccaaaagggcaacaatagtttcactggaagactttgaacaaaggctaaaccaggccattgaacgaaatgcatttttagaaagtgaacttgatgaaaaggaatctttgttggtctctgtacagaggttaaaggatgaagcaagagatttaaggcaagaactagcagttcgggaaagacaacaggaagtaactagaaagtcggctcctagctctccaactctagactgtgaaaagatggactccgccgtccaagcatcactttctttgccagctacccctgttggcaaaggaacggagaacacttttccttcaccgaaagctataccaaatggttttggtaccagtccactaactccctctgctaggatatcagcactaaacatcgtgggggatctcttacggaaagtaggggctttagaatccaaattagcagcttgcaggaattttgcaaaggaccaagcatcacgaaaatcctatatttcagggaatgttaactgtggggtgctgaatggcaatggcacaaagttctctcgatcagggcatacatctttcttcgacaaaggggcagtaaacggctttgaccccgctcctcctcctcctggtctgggctcctcgcgtccatcgtcagcgccgggtatgctgcctctcagtgtgtgagtgcctagcctccaggtgggggctcctgccctcctccaacaacccaggacacccacgcctcacccctcggtgcctgggcccagccccgtgcccctccgtctgcctccgcacggctggcagagggcaggctgcatgcagtggcggctactgggccctgcccagccccggaactctgcgcgatatcaatactggctattttctcttctcgccgtagtgccgttggtttcacatgattgcacttttgtgggtcgcaaggtgatacatacgtgtattacttggtcactggatgcagaagtacccattcatcacacctgccccatagcccccactctgctgtactgataggatttagttgtgttttaggacattgcaaatcttctagaagttctcccccaaatcaggtcaatgtgtgccctcctgagctcccacccaggcatctccagtgctcatgatcatgtgtcccccaactccacccctcacagtttgggcctgtttctggcaaagagtcaggaaggttactgaattagggaacattttctgcaccttctgattttacttaagcagctaccattccatggacttgcctcccagagcagcacaatgcccgtctgagccccacgtggcaggagcctctgggacggggcacacacaggcccagcctctgtgctgtctcctcctctgtgcgcctcagactcggggtgagggaggcgggcagcctctcgccagccttcccgtccttcagttcaacgacatctttggagtgtttttgttttctcttccaagggccgtcccgttgtgttaggaagggtgagtggctggttccagggtgggccggtgccagctccggggtggactgaacagcggcggctgtccctgtgcatcctttgattactctcatgctgcatttactgtttacatttgttttattgtacataggtttgtaaacattattgcctgagatatttgtatataacttgggctttgtagcttttatttattcagaacgcatacggcatgttaatgactctgatggtgtcctcctctgggcagctgtataggatcatcatgtggttacaaaaaatacttccctcaaaaaaattcttttaatgtggaaacaataaatttcacagaaaaaaa

SEQ ID NO: 308786 - DNA, 2407 bp, Homo sapiens
agaatggcctcggacacccaggcagtccctgacgtgtcggggaggagccgggcgcggaggtacgctgagtggagctcggggctgcgtaggggagctgagccgagcggctgggcgggcctggccgggccagcggaggggagacgtcggttgagcggcggcgaacatgcgcttttgacacattggaggctttcttgatcatggatggtgaagatataccagatttttcaagtttaaaggaggaaactgcttattggaaggaactttccttgaagtataagcaaagcttccaggaagctcgggatgagctagttgaattccaggaaggaagcagagaattagaagcagagttggaggcacaattagtacaggctgaacaaagaaatagagacttgcaggctgataaccaaagactgaaatatgaagtggaggcattaaaggagaagctagagcatcaatatgcacagagctataagcaggtctcagtgttagaagatgatttaagtcagactcgggccattaaggagcagttgcataagtatgtgagagagctggagcaggccaacgacgacctggagcgagccaaaagggcaacaatagtttcactggaagactttgaacaaaggctaaaccaggccattgaacgaaatgcatttttagaaagtgaacttgatgaaaaggaatctttgttggtctctgtacagaggttaaaggatgaagcaagagatttaaggcaagaactagcagttcgggaaagacaacaggaagtaactagaaagtcggctcctagctctccaactctagactgtgaaaagatggactccgccgtccaagcatcactttctttgccagctacccctgttggcaaaggaacggagaacacttttccttcaccgaaagctataccaaatggttttggtaccagtccactaactccctctgctaggatatcagcactaaacatcgtgggggatctcttacggaaagtaggggctttagaatccaaattagcagcttgcaggaattttgcaaaggaccaagcatcacgaaaatcctatatttcagggaatgttaactgtggggtgctgaatggcaatggcacaaagttctctcgatcagggcatacatctttcttcgacaaagggcaagaaaaagtcatatttcccacgttgttcatggggcagtaaacggctttgaccccgctcctcctcctcctggtctgggctcctcgcgtccatcgtcagcgccgggtatgctgcctctcagtgtgtgagtgcctagcctccaggtgggggctcctgccctcctccaacaacccaggacacccacgcctcacccctcggtgcctgggcccagccccgtgcccctccgtctgcctccgcacggctggcagagggcaggctgcatgcagtggcggctactgggccctgcccagccccggaactctgcgcgatatcaatactggctattttctcttctcgccgtagtgccgttggtttcacatgattgcacttttgtgggtcgcaaggtgatacatacgtgtattacttggtcactggatgcagaagtacccattcatcacacctgccccatagcccccactctgctgtactgataggatttagttgtgttttaggacattgcaaatcttctagaagttctcccccaaatcaggtcaatgtgtgccctcctgagctcccacccaggcatctccagtgctcatgatcatgtgtcccccaactccacccctcacagtttgggcctgtttctggcaaagagtcaggaaggttactgaattagggaacattttctgcaccttctgattttacttaagcagctaccattccatggacttgcctcccagagcagcacaatgcccgtctgagccccacgtggcaggagcctctgggacggggcacacacaggcccagcctctgtgctgtctcctcctctgtgcgcctcagactcggggtgagggaggcgggcagcctctcgccagccttcccgtccttcagttcaacgacatctttggagtgtttttgttttctcttccaagggccgtcccgttgtgttaggaagggtgagtggctggttccagggtgggccggtgccagctccggggtggactgaacagcggcggctgtccctgtgcatcctttgattactctcatgctgcatttactgtttacatttgttttattgtacataggtttgtaaacattattgcctgagatatttgtatataacttgggctttgtagcttttatttattcagaacgcatacggcatgttaatgactctgatggtgtcctcctctgggcagctgtataggatcatcatgtggttacaaaaaatacttccctcaaaaaaattcttttaatgtggaaacaataaatttcacagaaaaaaa

SEQ ID NO: 308787 - DNA, 2145 bp, Homo sapiens
agaatggcctcggacacccaggcagtccctgacgtgtcggggaggagccgggcgcggaggtacgctgagtggagctcggggctgcgtaggggagctgagccgagcggctgggcgggcctggccgggccagcggaggggagacgtcggttgagcggcggcgaacatgcgcttttgacacattggaggctttcttgatcatggatggtgaagatataccagatttttcaagtttaaaggaggaaactgcttattggaaggaactttccttgaagtataagcaaagcttccaggaagctcgggatgagctagttgaattccaggaaggaagcagagaattagaagcagagttggaggcacaattagtacaggctgaacaaagaaatagagacttgcaggctgataaccaaagactgaaatatgaagtggaggcattaaaggagaagctagagcatcaatatgcacagagctataagcaggtctcagtgttagaagatgatttaagtcagactcgggccattaaggagcagttgcataagtatgtgagagagctggagcaggccaacgacgacctggagcgagccaaaagggcaacaatagtttcactggaagactttgaacaaaggctaaaccaggccattgaacgaaatgcatttttagaaagtgaacttgatgaaaaggaatctttgttggtctctgtacagaggttaaaggatgaagcaagagatttaaggcaagaactagcagttcgggaaagacaacaggaagtaactagaaagtcggctcctagctctccaactctagactgtgaaaagatggactccgccgtccaagcatcactttctttgccagctacccctgttggcaaaggaacggagaacacttttccttcaccgaaagctataccaaatggttttggtaccagtccactaactccctctgctaggatatcagcactaaacatcgtgggggatctcttacggaaagtaggggctttagaatccaaattagcagcttgcaggaattttgcaaaggaccaagcatcacgaaaatcctatatttcagggaatgttaactgtggggtgctgaatggcaatggcacaaagttctctcgatcagggcatacatctttcttcgacaaaggtgcagtggcggctactgggccctgcccagccccggaactctgcgcgatatcaatactggctattttctcttctcgccgtagtgccgttggtttcacatgattgcacttttgtgggtcgcaaggtgatacatacgtgtattacttggtcactggatgcagaagtacccattcatcacacctgccccatagcccccactctgctgtactgataggatttagttgtgttttaggacattgcaaatcttctagaagttctcccccaaatcaggtcaatgtgtgccctcctgagctcccacccaggcatctccagtgctcatgatcatgtgtcccccaactccacccctcacagtttgggcctgtttctggcaaagagtcaggaaggttactgaattagggaacattttctgcaccttctgattttacttaagcagctaccattccatggacttgcctcccagagcagcacaatgcccgtctgagccccacgtggcaggagcctctgggacggggcacacacaggcccagcctctgtgctgtctcctcctctgtgcgcctcagactcggggtgagggaggcgggcagcctctcgccagccttcccgtccttcagttcaacgacatctttggagtgtttttgttttctcttccaagggccgtcccgttgtgttaggaagggtgagtggctggttccagggtgggccggtgccagctccggggtggactgaacagcggcggctgtccctgtgcatcctttgattactctcatgctgcatttactgtttacatttgttttattgtacataggtttgtaaacattattgcctgagatatttgtatataacttgggctttgtagcttttatttattcagaacgcatacggcatgttaatgactctgatggtgtcctcctctgggcagctgtataggatcatcatgtggttacaaaaaatacttccctcaaaaaaattcttttaatgtggaaacaataaatttcacagaaaaaaa

SEQ ID NO: 308788 - DNA, 2625 bp, Homo sapiens
agaatggcctcggacacccaggcagtccctgacgtgtcggggaggagccgggcgcggaggtacgctgagtggagctcggggctgcgtaggggagctgagccgagcggctgggcgggcctggccgggccagcggaggggagacgtcggttgagcggcggcgaacatgcgcttttgacacattggaggctttcttgatcatggatggtgaagatataccagatttttcaagtttaaaggaggaaactgcttattggaaggaactttccttgaagtataagcaaagcttccaggaagctcgggatgagctagttgaattccaggaaggaagcagagaattagaagcagagttggaggcacaattagtacaggctgaacaaagaaatagagacttgcaggctgataaccaaagactgaaatatgaagtggaggcattaaaggagaagctagagcatcaatatgcacagagctataagcaggtctcagtgttagaagatgatttaagtcagactcgggccattaaggagcagttgcataagtatgtgagagagctggagcaggccaacgacgacctggagcgagccaaaagggcaacaatagtttcactggaagactttgaacaaaggctaaaccaggccattgaacgaaatgcatttttagaaagtgaacttgatgaaaaggaatctttgttggtctctgtacagaggttaaaggatgaagcaagagatttaaggcaagaactagcagttcgggaaagacaacaggaagtaactagaaagtcggctcctagctctccaactctagactgtgaaaagatggactccgccgtccaagcatcactttctttgccagctacccctgttggcaaaggaacggagaacacttttccttcaccgaaagctataccaaatggttttggtaccagtccactaactccctctgctaggatatcagcactaaacatcgtgggggatctcttacggaaagtaggggctttagaatccaaattagcagcttgcaggaattttgcaaaggaccaagcatcacgaaaatcctatatttcagggaatgttaactgtggggtgctgaatggcaatggcacaaagttctctcgatcagggcatacatctttcttcgacaaaggggcagtaaacggctttgaccccgctcctcctcctcctggtctgggctcctcgcgtccatcgtcagcgccgggtatgctgcctctcagtgtgtgagtgcctagcctccaggtgggggctcctgccctcctccaacaacccaggacacccacgcctcacccctcggtgcctgggcccagccccgtgcccctccgtctgcctccgcacggctggcagagggcaggctgcatgcagtggcggctactgggccctgcccagccccggaactctgcgcgatatcaatactggctattttctcttctcgccgtagtgccgttggtttcacatgattgcacttttgtgggtcgcaaggtgatacatacgtgtattacttggtcactggatgcagaagtacccattcatcacacctgccccatagcccccactctgctgtactgataggatttagttgtgttttaggacattgcaaatcttctagaagttctcccccaaatcaggtcaatgtgtgccctcctgagctcccacccaggcatctccagtgctcatgatcatgtgtcccccaactccacccctcacagtttgggcctgtttctggcaaagagtcaggaaggttactgaattagggaacattttctgcaccttctgattttacttaagcagctaccattccatggacttgcctcccagagcagcacaatgcccgtctgagccccacgtggcaggagcctctgggacggggcacacacaggcccagcctctgtgctgtctcctcctctgtgcgcctcagactcggggtgagggaggcgggcagcctctcgccagccttcccgtccttcagttcaacgacatctttggagtgtttttgttttctcttccaagggccgtcccgttgtgttaggaagggtgagtggctggttccagggtgggccggtgccagctccggggtggactgaacagcggcggctgtccctgtgcatcctttgattactctcatgctgcatttactgtttacatttgttttattgtacataggtttgtaaacattattgcctgagatatttgtatataacttgggctttgtagcttttatttattcagaacgcatacggcatgttaatgactctgatggtgtcctcctctgggcagctgtataggatcatcatgtggttacaaaaaatacttccctcaaaaaaattcttttaatgtggaaacaataaatttcacagaaaaaaaggattgacgttgctttattcagtctctgccatcccatgagaggagagctggggcccgtaaagccaggttccaacgtcactgctgctctgacatgggacacgcagctgtggaatgggacagagatcaggtggcctccggagatgtcttatgtgcggagcaggcgtcctcatgctgtttcttggcactggcttctgggcttggctgtgatttccaggagcagtttgagaatggcctgggccccatgtgaaaatct

SEQ ID NO: 308789 - DNA, 2888 bp, Homo sapiens
  misc_feature (2375)..(2375): n is a, c, g, or t
  misc_feature (2378)..(2379): n is a, c, g, or t
  misc_feature (2400)..(2400): n is a, c, g, or t
agaatggcctcggacacccaggcagtccctgacgtgtcggggaggagccgggcgcggaggtacgctgagtggagctcggggctgcgtaggggagctgagccgagcggctgggcgggcctggccgggccagcggaggggagacgtcggttgagcggcggcgaacatgcgcttttgacacattggaggctttcttgatcatggatggtgaagatataccagatttttcaagtttaaaggaggaaactgcttattggaaggaactttccttgaagtataagcaaagcttccaggaagctcgggatgagctagttgaattccaggaaggaagcagagaattagaagcagagttggaggcacaattagtacaggctgaacaaagaaatagagacttgcaggctgataaccaaagactgaaatatgaagtggaggcattaaaggagaagctagagcatcaatatgcacagagctataagcaggtctcagtgttagaagatgatttaagtcagactcgggccattaaggagcagttgcataagtatgtgagagagctggagcaggccaacgacgacctggagcgagccaaaagggcaacaatagtttcactggaagactttgaacaaaggctaaaccaggccattgaacgaaatgcatttttagaaagtgaacttgatgaaaaggaatctttgttggtctctgtacagaggttaaaggatgaagcaagagatttaaggcaagaactagcagttcgggaaagacaacaggaagtaactagaaagtcggctcctagctctccaactctagactgtgaaaagatggactccgccgtccaagcatcactttctttgccagctacccctgttggcaaaggaacggagaacacttttccttcaccgaaagctataccaaatggttttggtaccagtccactaactccctctgctaggatatcagcactaaacatcgtgggggatctcttacggaaagtaggggctttagaatccaaattagcagcttgcaggaattttgcaaaggaccaagcatcacgaaaatcctatatttcagggaatgttaactgtggggtgctgaatggcaatggcacaaagttctctcgatcagggcatacatctttcttcgacaaaggggcagtaaacggctttgaccccgctcctcctcctcctggtctgggctcctcgcgtccatcgtcagcgccgggtatgctgcctctcagtgtgtgagtgcctagcctccaggtgggggctcctgccctcctccaacaacccaggacacccacgcctcacccctcggtgcctgggcccagccccgtgcccctccgtctgcctccgcacggctggcagagggcaggctgcatgcagtggcggctactgggccctgcccagccccggaactctgcgcgatatcaatactggctattttctcttctcgccgtagtgccgttggtttcacatgattgcacttttgtgggtcgcaaggtgatacatacgtgtattacttggtcactggatgcagaagtacccattcatcacacctgccccatagcccccactctgctgtactgataggatttagttgtgttttaggacattgcaaatcttctagaagttctcccccaaatcaggtcaatgtgtgccctcctgagctcccacccaggcatctccagtgctcatgatcatgtgtcccccaactccacccctcacagtttgggcctgtttctggcaaagagtcaggaaggttactgaattagggaacattttctgcaccttctgattttacttaagcagctaccattccatggacttgcctcccagagcagcacaatgcccgtctgagccccacgtggcaggagcctctgggacggggcacacacaggcccagcctctgtgctgtctcctcctctgtgcgcctcagactcggggtgagggaggcgggcagcctctcgccagccttcccgtccttcagttcaacgacatctttggagtgtttttgttttctcttccaagggccgtcccgttgtgttaggaagggtgagtggctggttccagggtgggccggtgccagctccggggtggactgaacagcggcggctgtccctgtgcatcctttgattactctcatgctgcatttactgtttacatttgttttattgtacataggtttgtaaacattattgcctgagatatttgtatataacttgggctttgtagcttttatttattcagaacgcatacggcatgttaatgactctgatggtgtcctcctctgggcagctgtataggatcatcatgtggttacaaaaaatacttccctcaaaaaaattcttttaatgtggaaacaataaatttcacagaaaaaaaagnaannaaaaaaaaaaaaaaaaaaaanagaaaaaaaaaaaaaaaaaaaaaaaagagagggggcggcgcgcccccagaaagatctcccccgcggggggccccagcccgccgcgccccccgttcgcgtgggaccaggggtggcccccctattggcgaggcggcgatatttatagcaccgcggaggaccagtgggcgcgcagctgtttaaaccaactgctggaggaggggcgtaaaaacgcgggcacaccgtggggcgacacctggggagaaggagaccccttacactccgcgggggggggtgaaaccaatatgcgccggcgcacagaacacccccccacacagcagaacatatctacagagacgcccgtaggacaggacaacattaagagagtgtagaagcggggcaccacaggggggggggtcaacccacagcacgcgggctataccccgcgcccccggcgtcaagacaagagcgaggccccaccgagcgacagacacctgtcggcgacaaccgct

SEQ ID NO: 308790 - DNA, 746 bp, Homo sapiens
caagtccatggaatggtagctgcttaagtaaaatcagaaggtgcagaaaatgttccctaattcatgtgtcccccaactccacccctcacagtttgggcctgtttctggcaaagagtcaggaaggttactgaattagggaacattttctgcaccttctgattttacttaagcagctaccattccatggacttgcctcccagagcagcacaatgcccgtctgagccccacgtggcaggagcctctgggacggggcacacacaggcccagcctctgtgctgtctcctcctctgtgcgcctcagactcggggtgagggaggcgggcagcctctcgccagccttcccgtccttcagttcaacgacatctttggagtgtttttgttttctcttccaagggccgtcccgttgtgttaggaagggtgagtggctggttccagggtgggccggtgccagctccggggtggactgaacagcggcggctgtccctgtgcatcctttgattactctcatgctgcatttactgtttacatttgttttattgtacataggtttgtaaacattattgcctgagatatttgtatataacttgggctttgtagcttttatttattcagaacgcatacggcatgttaatgactctgatggtgtcctcctctgggcagctgtataggatcatcatgtggttacaaaaaatacttccctcaaaaaaattcttttaatgtggaaacaataaatttcacagaaaaaaa

SEQ ID NO: 308791 - DNA, 947 bp, Homo sapiens
agaatggcctcggacacccaggcagtccctgacgtgtcggggaggagccgggcgcggaggtacgctgagtggagctcggggctgcgtaggggagctgagccgagcggctgggcgggcctggccgggccagcggaggggagacgtcggttgagcggcggcgaacatgcgcttttgacacattggaggctttcttgatcatggatggtgaagatataccagatttttcaagtttaaaggaggaaactgcttattggaaggaactttccttgaagtataagcaaagcttccaggaagctcgggatgagctagttgaattccaggaaggttactgaattagggaacattttctgcaccttctgattttacttaagcagctaccattccatggacttgcctcccagagcagcacaatgcccgtctgagccccacgtggcaggagcctctgggacggggcacacacaggcccagcctctgtgctgtctcctcctctgtgcgcctcagactcggggtgagggaggcgggcagcctctcgccagccttcccgtccttcagttcaacgacatctttggagtgtttttgttttctcttccaagggccgtcccgttgtgttaggaagggtgagtggctggttccagggtgggccggtgccagctccggggtggactgaacagcggcggctgtccctgtgcatcctttgattactctcatgctgcatttactgtttacatttgttttattgtacataggtttgtaaacattattgcctgagatatttgtatataacttgggctttgtagcttttatttattcagaacgcatacggcatgttaatgactctgatggtgtcctcctctgggcagctgtataggatcatcatgtggttacaaaaaatacttccctcaaaaaaattcttttaatgtggaaacaataaatttcacagaaaaaaa

SEQ ID NO: 308792 - DNA, 1273 bp, Homo sapiens
agaatggcctcggacacccaggcagtccctgacgtgtcggggaggagccgggcgcggaggtacgctgagtggagctcggggctgcgtaggggagctgagccgagcggctgggcgggcctggccgggccagcggaggggagacgtcggttgagcggcggcgaacatgcgcttttgacacattggaggctttcttgatcatggatggtgaagatataccagatttttcaagtttaaaggaggaaactgcttattggaaggaactttccttgaagtataagcaaagcttccaggaagctcgggatgagctagttgaattccaggaaggaagcagagaattagaagcagagttggaggcacaattagtacaggctgaacaaagaaatagagacttgcaggctgataaccaaagactgaaatatgaagtggaggcattaaaggagaagctagagcatcaatatgcacagagctataagcaggtctcagtgttagaagatgatttaagtcagactcgggccattaaggagcagttgcataagtatgtgagagagctggagcaggccaacgacgacctggagcgagccaaaagggcaacaatagtttcactggaagactttgaacaaaggctaaaccaggccattgaacgaaatgcatttttagaaagtgaacttgatgaaaaggaatctttgttggtctctgtacagaggttaaaggatgaagcaagagatttaaggcaagaactagcagttcgggaaagacaacaggaagtaactagaaagtcggctcctagctctccaactctagactgtgaaaagatggactccgccgtccaagcatcactttctttgccagctacccctgttggcaaaggaacggagaacacttttccttcaccgaaagctataccaaatggttttggtaccagtccactaactccctctgctaggatatcagcactaaacatcgtgggggatctcttacggaaagtaggggctttagaatccaaattagcagcttgcaggaattttgcaaaggaccaagcatcacgaaaatcctatatttcagggaatgttaactgtggggtgctgaatggcaatggcacaaagttctctcgatcagggcatacatctttcttcgacaaaggggcagtaaacggctttgaccccgctcctcctcctcctctgggcagctgtataggatcatcatgtggttacaaaaaatacttccctcaaaaaaattcttttaatgtggaaacaataaatttcacagaaaaaaa

SEQ ID NO: 308793 - DNA, 1278 bp, Homo sapiens
agaatggcctcggacacccaggcagtccctgacgtgtcggggaggagccgggcgcggaggtacgctgagtggagctcggggctgcgtaggggagctgagccgagcggctgggcgggcctggccgggccagcggaggggagacgtcggttgagcggcggcgaacatgcgcttttgacacattggaggctttcttgatcatggatggtgaagatataccagatttttcaagtttaaaggaggaaactgcttattggaaggaactttccttgaagtataagcaaagcttccaggaagctcgggatgagctagttgaattccaggaaggaagcagagaattagaagcagagttggaggcacaattagtacaggctgaacaaagaaatagagacttgcaggctgataaccaaagactgaaatatgaagtggaggcattaaaggagaagctagagcatcaatatgcacagagctataagcaggtctcagtgttagaagatgatttaagtcagactcgggccattaaggagcagttgcataagtatgtgagagagctggagcaggccaacgacgacctggagcgagccaaaagggcaacaatagtttcactggaagactttgaacaaaggctaaaccaggccattgaacgaaatgcatttttagaaagtgaacttgatgaaaaggaatctttgttggtctctgtacagaggttaaaggatgaagcaagagatttaaggcaagaactagcagttcgggaaagacaacaggaagtaactagaaagtcggctcctagctctccaactctagactgtgaaaagatggactccgccgtccaagcatcactttctttgccagctacccctgttggcaaaggaacggagaacacttttccttcaccgaaagctataccaaatggttttggtaccagtccactaactccctctgctaggatatcagcactaaacatcgtgggggatctcttacggaaagtaggggtaagtttcaattatttatcactaggtgtgtccactgacaaggtattgaattatttcttaatttgaagtgagggaagaaagaaaggatactttcctgtggtaaaggctgtcatgaagctcagaagcaaaagcatccattgactagccaagtccagatgacacttcatgatgcccctgcagaagagcctgtaccttgaactctgaggttcccaccggagcattcttcctgttccccactcctgtttcaacagcacgatgcctctgtccttgtctagaatactttgtctaa

SEQ ID NO: 308794 - DNA, 1216 bp, Homo sapiens
agaatggcctcggacacccaggcagtccctgacgtgtcggggaggagccgggcgcggaggtacgctgagtggagctcggggctgcgtaggggagctgagccgagcggctgggcgggcctggccgggccagcggaggggagacgtcggttgagcggcggcgaacatgcgcttttgacacattggaggctttcttgatcatggatggtgaagatataccagatttttcaagtttaaaggaggaaactgcttattggaaggaactttccttgaagtataagcaaagcttccaggaagctcgggatgagctagttgaattccaggaaggaagcagagaattagaagcagagttggaggcacaattagtacaggctgaacaaagaaatagagacttgcaggctgataaccaaagactgaaatatgaagtggaggcattaaaggagaagctagagcatcaatatgcacagagctataagcaggtctcagtgttagaagatgatttaagtcagactcgggccattaaggagcagttgcataagtatgtgagagagctggagcaggccaacgacgacctggagcgagccaaaagggcaacaatagtttcactggaagactttgaacaaaggctaaaccaggccattgaacgaaatgcatttttagaaagtgaacttgatgaaaaggaatctttgttggtctctgtacagaggttaaaggatgaagcaagagatttaaggcaagaactagcagttcgggaaagacaacaggaagtaactagaaagtcggctcctagctctccaactctagactgtgaaaagatggactccgccgtccaagcatcactttctttgccagctacccctgttggcaaaggaacggagaacacttttccttcaccgaaaggtttgtaatgtcttttctttttgaggcgatgtgttagatgatcagcttacgggggtttgttgctgaaggcggttgctaaggtttaaagagtaattttagtttaaaagttggtgaagtctagtgctatgtgaaatagaagaaggaattgttttcctaggccactaatatataggaaacagtgaaatgatggttacatttaagatgagatttttaaaagttaaaggtttttaaggaaagtttattttttgatgatagcaatagattttgtgattacagccgtatgtttaggtagaaaattttaaaaacacaaaaaagaaaa

SEQ ID NO: 308795 - DNA, 604 bp, Homo sapiens
cgcttggagtctctcaaaaacactcttttttttcccataactttatgtagtttcttaggtaacatgtgctctatttttgtaagccactctgagttcttttgggctgtgtgtaggtgggcatggactaattttagggcgtgatgtggaaatagtattcgtattactgtttaatatgttctcctttcttttattaggcaagaaaaagtcatatttcccacgttgttcatgggtaactgaatttgtttgctgtgctctttttcattctttcttaatcctggtgtgtggtggaagacacattaacaatctggttttactaactgcatggggctgactcagctttaaccaacttacagcccatcagtgaactttcacggtcctgttcgacttgactgtatgccgttattagttcagctgtgagaaacaagaacaaattagttgcagtggtcctggggtggctgggagtagcatgccaggtggcacgcctgagatgggctagggcgctgtagtgttgatttcagagtctggcgatgggggtttgaggtcactgtcaggccctgggatcacctttgactgtcttcctgggactgggggtcttcccgttacc

SEQ ID NO: 308796 - DNA, 3488 bp, Homo sapiens
taaaaagcattaggcatataaatgtataaatatattttatcatgtacagtacaaaaatggaaccttatgcatgggccttaggaatacaggctagtatttcagcacagacttccctgcttgagttcttgctgatgcttgcaccgtgacagtgggcaccaacacagacgtgccacccaaccccctgcacacaccaccggccaccaggggcccccttgtgcgccttggctttataactcctctgggggtgatattggtggtgatcacagctcctagcataatgagagttccatttggtattgtcacacgtctcctgcctcgcttgggttgccatgtttgagcgatggccctgttgatttcaccctgccttttactgaatctgtaaattgttgtgcaattgtggttatagtagactgtagcacattgccttttctaaactgctacatgtttataatcttcatttttaaagtatgtgtaatttttttaagtatgtattctattcatatggtctgcttgtcagtgagccagacttgcttactatattcctttataataatgctagccacttcctggattctttagtaatgtgctgtatgcaagaactttccagtagcagtgaaggagggttgcctctccaagcttcctaagggatgctgccctgtgtggggatgcattgcagaggcactagtagcatgggggctagagtggggagcgagatgtaaaagggtggggggataggagaattccagagtgcttccagcattagggtcctgagaacttctgagttcagagaaacatgcaaagtgactaacaaaatagctacttacctttgcagttttacagaccctgggagctgctttgggagtgagaaaggcaaccctccaatgtgtttcaactttaaaatgttgaattcttttcagacatggtatctcatttattctccttttctagcgtttgttgaatttcaggcagaatgtcttacagaatgtcctagaaccagattatcatttaatctgaaacagctgaggaagggacagagaaggtacaagggcaaggcagcacaaaacagatcaggagaatgaagagggaatgctttggttttttgttttgttttgttttttctttttcaagtaactaaaacagcatctacatgtagagtgttgtggagagctgagaccagggtaaagtcaagtgcagcatcagtactgcgagacccaccagcccctggagagggtcagccgagaatctggtagtgaagcctgtctagggtcccggcaccctcaccctcagccacctgcagagaggccagggccccagagactagcctggttctgaagtgggcaggggtgctgccagagccctctgccccttatgttgagaccctgctttcaggacaggccagccgttggccaccatgtcacattctgagtgagtgtcacaggtccctaacaataattttctgatctggagcatatcagcagaatgcttagcctcaaggggcctggcagctgtaatgtttgatttatgatgagaactatccgaggccacccttggcctctaaataagctgctctagggagccgcctactttttgatgagaaattagaagagtacctaatgttgaaaacatgacatgcgctcttgggatctgctgttctctccagggctccagaacctgatacctgttaccaaagctaggaaagagctttatcacaagccttcactgtcctggcatgagaactggctgccaggctcagtgtaccccattaactgtgaatgaatctgagcttggtttcctttattgcttcctctgcaatatgattgctgaaacacattttaaaaattcagaagcttgtcactcctgttaatgggaggatcagtcacacatgtgtagtacaaggcggactttgtgtttgtttttggtgttaatttttagcattgtgtgtgttgcttccccaccctgaggagaggacaccatggcttactactcaggacaagtatgccccgctcagggtgtgatttcaggtggcttccaaacttgtacgcagtttaaagatggtggggacagactttgcctctacctagtgaaccccacttaaagaataaggagcatttgaatctcttggaaaaggccatgaagaataaagcagtcaaaaagaagtcctccatgttggtgccaaggacttgcgaggggaaataaaaatgttatccagcctgaccaacatggagaaaccccgtctccattaaaaatacaaaattagcctggcatggtggcgcatgcctgtaatcccagctactctggaggctgaggcaggagaatcgcttgaacccaggaggcggaggtcgcagtgagccgagatcatgccagtgcactccagcctgggtaacaagagtgaaactccgtgtccaaaaaaaaaaaaaaaaatgttactcatcctctctgaaagcaaaaaggaaaccctaacagctctgaactctggttttatttttcttgctgtatttgggtgaacattgtatgattaggcataatgttaaaaaaaaaaatttttttttggtagaaatgcaatcaccagtaaagaggtacgaaaaagctagcctctctcagagaccggggaggcagagtactactagaggaagtgaagttctgatggaatcatgcctgtcaaatgaggtcttgaagcggatgcccaaataaaagagtatattttatctaaatcttaagtgggtaacattttatgcagtttaaatgaatggaatattttcctcttgtttagttgtatctgtttgtatttttctttgatgaatgattggtcatgaggcctcttgccacactccagaaatacgtgtgcggctgcttttaagaactatgtgtctggtcacttatttctctaaaattatctcattgcctggcaatcagtcttctcttgtatacttgtcctagcacattatgtacatgggaaatgtaaacaaatgtgaaggaggaccagaaaaattagttaatatttaaaaaaatgtattgtgcattttggcttcacatgtttaactttttttaagaaaaaagttgcatgaatggaaaaaaaaatctgtatacagtatctgtaaaaactatcttatctgtttcaattccttgctcatatcccatataatctagaactaaatatggtgtgtggccatatttaaacacctgagagtcaagcagttgagactttgatttgaagcacctcatccttctttcaatgcgaacactatcatatggcattcttactgaggattttgtctaaccatatgttgccatgaattaactctgccgcctttcttaaggatcaaaaccagtttgatttgggaatcttcccctttccaaatgaaatagagatgcagtacttaactttccttggtgtttgtagatattgccttgtgtattccacttaaaaccgtaatctagtttgtaaaagagatggtgacgcatgtaaataaagcatcagtgacactcta

SEQ ID NO: 308797 - DNA, 2426 bp, Homo sapiens
tctaagcgcctctctctctctggttacactacacgctctctctagatacatatcttctttttcaagtaactaaaacagcatctacatgtagagtgttgtggagagctgagaccagggtaaagtcaagtgcagcatcagtactgcgagacccaccagcccctggagagggtcagccgagaatctggtagtgaagcctgtctagggtcccggcaccctcaccctcagccacctgcagagaggccagggccccagagactagcctggttctgaagtgggcaggggtgctgccagagccctctgccccttatgttgagaccctgctttcaggacaggccagccgttggccaccatgtcacattctgagtgagtgtcacaggtccctaacaataattttctgatctggagcatatcagcagaatgcttagcctcaaggggcctggcagctgtaatgtttgatttatgatgagaactatccgaggccacccttggcctctaaataagctgctctagggagccgcctactttttgatgagaaattagaagagtacctaatgttgaaaacatgacatgcgctcttgggatctgctgttctctccagggctccagaacctgatacctgttaccaaagctaggaaagagctttatcacaagccttcactgtcctggcatgagaactggctgccaggctcagtgtaccccattaactgtgaatgaatctgagcttggtttcctttattgcttcctctgcaatatgattgctgaaacacattttaaaaattcagaagcttgtcactcctgttaatgggaggatcagtcacacatgtgtagtacaaggcggactttgtgtttgtttttggtgttaatttttagcattgtgtgtgttgcttccccaccctgaggagaggacaccatggcttactactcaggacaagtatgccccgctcagggtgtgatttcaggtggcttccaaacttgtacgcagtttaaagatggtggggacagactttgcctctacctagtgaaccccacttaaagaataaggagcatttgaatctcttggaaaaggccatgaagaataaagcagtcaaaaagaagtcctccatgttggtgccaaggacttgcgaggggaaataaaaatgttatccagcctgaccaacatggagaaaccccgtctccattaaaaatacaaaattagcctggcatggtggcgcatgcctgtaatcccagctactctggaggctgaggcaggagaatcgcttgaacccaggaggcggaggtcgcagtgagccgagatcatgccagtgcactccagcctgggtaacaagagtgaaactccgtgtccaaaaaaaaaaaaaaaaatgttactcatcctctctgaaagcaaaaaggaaaccctaacagctctgaactctggttttatttttcttgctgtatttgggtgaacattgtatgattaggcataatgttaaaaaaaaaaatttttttttggtagaaatgcaatcaccagtaaagaggtacgaaaaagctagcctctctcagagaccggggaggcagagtactactagaggaagtgaagttctgatggaatcatgcctgtcaaatgaggtcttgaagcggatgcccaaataaaagagtatattttatctaaatcttaagtgggtaacattttatgcagtttaaatgaatggaatattttcctcttgtttagttgtatctgtttgtatttttctttgatgaatgattggtcatgaggcctcttgccacactccagaaatacgtgtgcggctgcttttaagaactatgtgtctggtcacttatttctctaaaattatctcattgcctggcaatcagtcttctcttgtatacttgtcctagcacattatgtacatgggaaatgtaaacaaatgtgaaggaggaccagaaaaattagttaatatttaaaaaaatgtattgtgcattttggcttcacatgtttaactttttttaagaaaaaagttgcatgaatggaaaaaaaaatctgtatacagtatctgtaaaaactatcttatctgtttcaattccttgctcatatcccatataatctagaactaaatatggtgtgtggccatatttaaacacctgagagtcaagcagttgagactttgatttgaagcacctcatccttctttcaatgcgaacactatcatatggcattcttactgaggattttgtctaaccatatgttgccatgaattaactctgccgcctttcttaaggatcaaaaccagtttgatttgggaatcttcccctttccaaatgaaatagagatgcagtacttaactttccttggtgtttgtagatattgccttgtgtattccacttaaaaccgtaatctagtttgtaaaagagatggtgacgcatgtaaataaagcatcagtgacactcta

SEQ ID NO: 308798 - DNA, 3920 bp, Homo sapiens
taaaaagcattaggcatataaatgtataaatatattttatcatgtacagtacaaaaatggaaccttatgcatgggccttaggaatacaggctagtatttcagcacagacttccctgcttgagttcttgctgatgcttgcaccgtgacagtgggcaccaacacagacgtgccacccaaccccctgcacacaccaccggccaccaggggcccccttgtgcgccttggctttataactcctctgggggtgatattggtggtgatcacagctcctagcataatgagagttccatttggtattgtcacacgtctcctgcctcgcttgggttgccatgtttgagcgatggccctgttgatttcaccctgccttttactgaatctgtaaattgttgtgcaattgtggttatagtagactgtagcacattgccttttctaaactgctacatgtttataatcttcatttttaaagtatgtgtaatttttttaagtatgtattctattcatatggtctgcttgtcagtgagccagacttgcttactatattcctttataataatgctagccacttcctggattctttagtaatgtgctgtatgcaagaactttccagtagcagtgaaggagggttgcctctccaagcttcctaagggatgctgccctgtgtggggatgcattgcagaggcactagtagcatgggggctagagtggggagcgagatgtaaaagggtggggggataggagaattccagagtgcttccagcattagggtcctgagaacttctgagttcagagaaacatgcaaagtgactaacaaaatagctacttacctttgcagttttacagaccctgggagctgctttgggagtgagaaaggcaaccctccaatgtgtttcaactttaaaatgttgaattcttttcagacatggtatctcatttattctccttttctagcgtttgttgaatttcaggcagaatgtcttacagaatgtcctagaaccagattatcatttaatctgaaacagctgaggaagggacagagaaggtacaagggcaaggcagcacaaaacagatcaggagaatgaagagggaatgctttggttttttgttttgttttgttttttctttttcaagtaactaaaacagcatctacatgtagagtgttgtggagagctgagaccagggtaaagtcaagtgcagcatcagtactgcgagacccaccagcccctggagagggtcagccgagaatctggtagtgaagcctgtctagggtcccggcaccctcaccctcagccacctgcagagaggccagggccccagagactagcctggttctgaagtgggcaggggtgctgccagagccctctgccccttatgttgagaccctgctttcaggacaggccagccgttggccaccatgtcacattctgagtgagtgtcacaggtccctaacaataattttctgatctggagcatatcagcagaatgcttagcctcaaggggcctggcagctgtaatgtttgatttatgatgagaactatccgaggccacccttggcctctaaataagctgctctagggagccgcctactttttgatgagaaattagaagagtacctaatgttgaaaacatgacatgcgctcttgggatctgctgttctctccagggctccagaacctgatacctgttaccaaagctaggaaagagctttatcacaagccttcactgtcctggcatgagaactggctgccaggctcagtgtaccccattaactgtgaatgaatctgagcttggtttcctttattgcttcctctgcaatatgattgctgaaacacattttaaaaattcagaagcttgtcactcctgttaatgggaggatcagtcacacatgtgtagtacaaggcggactttgtgtttgtttttggtgttaatttttagcattgtgtgtgttgcttccccaccctgaggagaggacaccatggcttactactcaggacaagtatgccccgctcagggtgtgatttcaggtggcttccaaacttgtacgcagtttaaagatggtggggacagactttgcctctacctagtgaaccccacttaaagaataaggagcatttgaatctcttggaaaaggccatgaagaataaagcagtcaaaaagaagtcctccatgttggtgccaaggacttgcgaggggaaataaaaatgttatccagcctgaccaacatggagaaaccccgtctccattaaaaatacaaaattagcctggcatggtggcgcatgcctgtaatcccagctactctggaggctgaggcaggagaatcgcttgaacccaggaggcggaggtcgcagtgagccgagatcatgccagtgcactccagcctgggtaacaagagtgaaactccgtgtccaaaaaaaaaaaaaaaaatgttactcatcctctctgaaagcaaaaaggaaaccctaacagctctgaactctggttttatttttcttgctgtatttgggtgaacattgtatgattaggcataatgttaaaaaaaaaaatttttttttggtagaaatgcaatcaccagtaaagaggtacgaaaaagctagcctctctcagagaccggggaggcagagtactactagaggaagtgaagttctgatggaatcatgcctgtcaaatgaggtcttgaagcggatgcccaaataaaagagtatattttatctaaatcttaagtgggtaacattttatgcagtttaaatgaatggaatattttcctcttgtttagttgtatctgtttgtatttttctttgatgaatgattggtcatgaggcctcttgccacactccagaaatacgtgtgcggctgcttttaagaactatgtgtctggtcacttatttctctaaaattatctcattgcctggcaatcagtcttctcttgtatacttgtcctagcacattatgtacatgggaaatgtaaacaaatgtgaaggaggaccagaaaaattagttaatatttaaaaaaatgtattgtgcattttggcttcacatgtttaactttttttaagaaaaaagttgcatgaatggaaaaaaaaatctgtatacagtatctgtaaaaactatcttatctgtttcaattccttgctcatatcccatataatctagaactaaatatggtgtgtggccatatttaaacacctgagagtcaagcagttgagactttgatttgaagcacctcatccttctttcaatgcgaacactatcatatggcattcttactgaggattttgtctaaccatatgttgccatgaattaactctgccgcctttcttaaggatcaaaaccagtttgatttgggaatcttcccctttccaaatgaaatagagatgcagtacttaactttccttggtgtttgtagatattgccttgtgtattccacttaaaaccgtaatctagtttgtaaaagagatggtgacgcatgtaaataaagcatcagtgacactctatcttactccaagaagtctctttgttctccctccccctttcttgaaccctaggaataaaatggcagtttctctcaaggtcttcctgtggaattcccccacaggctgggagagccacaaagctgagagactcttatcacaaaatctttaaatgaacctagtaaacgttttctctggcccgcttctgacctccacagacaacagacaacttaataaaggaagatttatggcatagttcatggtggctgatagccacttttggtgtgttctgagtcatgttgcccagggagctttgaataagtggggagttgggacttagagacggccctcactgagcgtctgaggttttaacttgtcggttgcttgacctggatgaggtcttcctcacctgagtccaacacatgaacgttggttggcaacagtgccctcctgccc

SEQ ID NO: 308799 - DNA, 3435 bp, Homo sapiens
taaaaagcattaggcatataaatgtataaatatattttatcatgtacagtacaaaaatggaaccttatgcatgggccttaggaatacaggctagtatttcagcacagacttccctgcttgagttcttgctgatgcttgcaccgtgacagtgggcaccaacacagacgtgccacccaaccccctgcacacaccaccggccaccaggggcccccttgtgcgccttggctttataactcctctgggggtgatattggtggtgatcacagctcctagcataatgagagttccatttggtattgtcacacgtctcctgcctcgcttgggttgccatgtttgagcgatggccctgttgatttcaccctgccttttactgaatctgtaaattgttgtgcaattgtggttatagtagactgtagcacattgccttttctaaactgctacatgtttataatcttcatttttaaagtatgtgtaatttttttaagtatgtattctattcatatggtctgcttgtcagtgagccagacttgcttactatattcctttataataatgctagccacttcctggattctttagtaatgtgctgtatgcaagaactttccagtagcagtgaaggagggttgcctctccaagcttcctaagggatgctgccctgtgtggggatgcattgcagaggcactagtagcatgggggctagagtggggagcgagatgtaaaagggtggggggataggagaattccagagtgcttccagcattagggtcctgagaacttctgagttcagagaaacatgcaaagtgactaacaaaatagctacttacctttgcagttttacagaccctgggagctgctttgggagtgagaaaggcaaccctccaatgtgtttcaactttaaaatgttgaattcttttcagacatggtatctcatttattctccttttctagcgtttgttgaatttcaggcagaatgtcttacagaatgtcctagaaccagattatcatttaatctgaaacagctgaggaagggacagagaaggtacaagggcaaggcagcacaaaacagatcaggagaatgaagagggaatgctttggttttttgttttgttttgttttttctttttcaagtaactaaaacagcatctacatgtagagtgttgtggagagctgagaccagggtaaagtcaagtgcagcatcagtactgcgagacccaccagcccctggagagggtcagccgagaatctggtagtgaagcctgtctagggtcccggcaccctcaccctcagccacctgcagagaggccagggccccagagactagcctggttctgaagtgggcaggggtgctgccagagccctctgccccttatgttgagaccctgctttcaggacaggccagccgttggccaccatgtcacattctgagtgagtgtcacaggtccctaacaataattttctgatctggagcatatcagcagaatgcttagcctcaaggggcctggcagctgtaatgtttgatttatgatgagaactatccgaggccacccttggcctctaaataagctgctctagggagccgcctactttttgatgagaaattagaagagtacctaatgttgaaaacatgacatgcgctcttgggatctgctgttctctccagggctccagaacctgatacctgttaccaaagctaggaaagagctttatcacaagccttcactgtcctggcatgagaactggctgccaggctcagtgtaccccattaactgtgaatgaatctgagcttggtttcctttattgcttcctctgcaatatgattgctgaaacacattttaaaaattcagaagcttgtcactcctgttaatgggaggatcagtcacacatgtgtagtacaaggcggactttgtgtttgtttttggtgttaatttttagcattgtgtgtgttgcttccccaccctgaggagaggacaccatggcttactactcaggacaagtatgccccgctcagggtgtgatttcaggtggcttccaaacttgtacgcagtttaaagatggtggggacagactttgcctctacctagtgaaccccacttaaagaataaggagcatttgaatctcttggaaaaggccatgaagaataaagcagtcaaaaagaagtcctccatgttggtgccaaggacttgcgaggggaaataaaaatgttatccagcctgaccaacatggagaaaccccgtctccattaaaaatacaaaattagcctggcatggtggcgcatgcctgtaatcccagctactctggaggctgaggcaggagaatcgcttgaacccaggaggcggaggtcgcagtgagccgagatcatgccagtgcactccagcctgggtaacaagagtgaaactccgtgtccaaaaaaaaaaaaaaaaatgttactcatcctctctgaaagcaaaaaggaaaccctaacagctctgaactctggttttatttttcttgctgtatttgggtgaacattgtatgattaggcataatgttaaaaaaaaaaatttttttttggtagaaatgcaatcaccagtaaagaggtacgaaaaagctagcctctctcagagaccggggaggcagagtactactagaggaagtgaagttctgatggaatcatgcctgtcaaatgaggtcttgaagcggatgcccaaataaaagagtatattttatctaaatcttaagtgggtaacattttatgcagtttaaatgaatggaatattttcctcttgtttagttgtatctgtttgtatttttctttgatgaatgattggtcatgaggcctcttgccacactccagaaatacgtgtgcggctgcttttaagaactatgtgtctggtcacttatttctctaaaattatctcattgcctggcaatcagtcttctcttgtatacttgtcctagcacattatgtacatgggaaatgtaaacaaatgtgaaggaggaccagaaaaattagttaatatttaaaaaaatgtattgtgcattttggcttcacatgtttaactttttttaagaaaaaagttgcatgaatggaaaaaaaaatctgtatacagtatctgtataaatatggtgtgtggccatatttaaacacctgagagtcaagcagttgagactttgatttgaagcacctcatccttctttcaatgcgaacactatcatatggcattcttactgaggattttgtctaaccatatgttgccatgaattaactctgccgcctttcttaaggatcaaaaccagtttgatttgggaatcttcccctttccaaatgaaatagagatgcagtacttaactttccttggtgtttgtagatattgccttgtgtattccacttaaaaccgtaatctagtttgtaaaagagatggtgacgcatgtaaataaagcatcagtgacactcta

SEQ ID NO: 308800 - DNA, 1064 bp, Homo sapiens
tcactaaatgatgccaaataaaagagtatattttatctacatcttaagtgggtaacatttatgcagtttaaatgaatggaatattttcctcttgtatagttgtatctgtttgtatttttctttgatgaatgattggtcatgaggcctcttgccacactccagaaatacgtgtgcggctgcttttaagaactatgtgtctggtcacttatttctctaaaattatctcattgcctgtcaaatgaggtcttgaagcggatgcccaaataaaagagtatattttatctaaatcttaagtgggtaacattttatgcagtttaaatgaatggaatattttcctcttgtttagttgtatctgtttgtatttttctttgatgaatgattggtcatgaggcctcttgccacactccagaaatacgtgtgcggctgcttttaagaactatgtgtctggtcacttatttctctaaaattatctcattgcctggcaatcagtcttctcttgtatacttgtcctagcacattatgtacatgggaaatgtaaacaaatgtgaaggaggaccagaaaaattagttaatatttaaaaaaatgtattgtgcattttggcttcacatgtttaactttttttaagaaaaaagttgcatgaatggaaaaaaaaatctgtatacagtatctgtaaaaactatcttatctgtttcaattccttgctcatatcccatataatctagaactaaatatggtgtgtggccatatttaaacacctgagagtcaagcagttgagactttgatttgaagcacctcatccttctttcaatgcgaacactatcatatggcattcttactgaggattttgtctaaccatatgttgccatgaattaactctgccgcctttcttaaggatcaaaaccagtttgatttgggaatcttcccctttccaaatgaaatagagatgcagtacttaactttccttggtgtttgtagatattgccttgtgtattccacttaaaaccgtaatctagtttgtaaaagagatggtgacgcatgtaaataaagcatcagtgacactcta

SEQ ID NO: 308801 - DNA, 2316 bp, Homo sapiens
taaaaagcattaggcatataaatgtataaatatattttatcatgtacagtacaaaaatggaaccttatgcatgggccttaggaatacaggctagtatttcagcacagacttccctgcttgagttcttgctgatgcttgcaccgtgacagtgggcaccaacacagacgtgccacccaaccccctgcacacaccaccggccaccaggggcccccttgtgcgccttggctttataactcctctgggggtgatattggtggtgatcacagctcctagcataatgagagttccatttggtattgtcacacgtctcctgcctcgcttgggttgccatgtttgagcgatggccctgttgatttcaccctgccttttactgaatctgtaaattgttgtgcaattgtggttatagtagactgtagcacattgccttttctaaactgctacatgtttataatcttcatttttaaagtatgtgtaatttttttaagtatgtattctattcatatggtctgcttgtcagtgagccagacttgcttactatattcctttataataatgctagccacttcctggattctttagtaatgtgctgtatgcaagaactttccagtagcagtgaaggagggttgcctctccaagcttcctaagggatgctgccctgtgtggggatgcattgcagaggcactagtagcatgggggctagagtggggagcgagatgtaaaagggtggggggataggagaattccagagtgcttccagcattagggtcctgagaacttctgagttcagagaaacatgcaaagtgactaacaaaatagctacttacctttgcagttttacagaccctgggagctgctttgggagtgagaaaggcaaccctccaatgtgtttcaactttaaaatgttgaattcttttcagacatggtatctcatttattctccttttctagcgtttgttgaatttcaggcagaatgtcttacagaatgtcctagaaccagattatcatttaatctgaaacagctgaggaagggacagagaaggtacaagggcaaggcagcacaaaacagatcaggagaatgaagagggaatgctttggttttttgttttgttttgttttttctttttcaagtaactaaaacagcatctacatgtagagtgttgtggagagctgagaccagggtaaagtcaagtgcagcatcagtactgcgagacccaccagcccctggagagggtcagccgagaatctggtagtgaagcctgtctagggtcccggcaccctcaccctcagccacctgcagagaggccagggccccagagactagcctggttctgaagtgggcaggggtgctgccagagccctctgccccttatgttgagaccctgctttcaggacaggccagccgttggccaccatgtcacattctgagtgagtgtcacaggtccctaacaataattttctgatctggagcatatcagcagaatgcttagcctcaaggggcctggcagctgtaatgtttgatttatgatgagaactatccgaggccacccttggcctctaaataagctgctctagggagccgcctactttttgatgagaaattagaagagtacctaatgttgaaaacatgacatgcgctcttgggatctgctgttctctccagggctccagaacctgatacctgttaccaaagctaggaaagagctttatcacaagccttcactgtcctggcatgagaactggctgccaggctcagtgtaccccattaactgtgaatgaatctgagcttggtttcctttattgcttcctctgcaatatgattgctgaaacacattttaaaaattcagaagcttgtcactcctgttaatgggaggatcagtcacacatgtgtagtacaaggcggactttgtgtttgtttttggtgttaatttttagcattgtgtgtgttgcttccccaccctgaggagaggacaccatggcttactactcaggacaagtatgccccgctcagggtgtgatttcaggtggcttccaaacttgtacgcagtttaaagatggtggggacagactttgcctctacctagtgaaccccacttaaagaataaggagcatttgaatctcttggaaaaggccatgaagaacgtcacagcatgattgacagtagtttatcagaaaattgcattagcagccatagctgcctttatgtctggtgtgatcctcacagctgtggctgttattacagtccagcttagaagacaatacgtcaggaaatatgacgagaagctgaggaacgaaagaaacttcgacaagagaatggcg

SEQ ID NO: 308802 - DNA, 1124 bp, Homo sapiens
tttttctgagacagagtctcaccctgttgcccaggctggagtgcagtgacagcgatcttggctcactgcaagctccgcctcccgggttcacgccattcttctgcctcagcctcctgagcagctatgactacaggtgcccaccaccatgcctggctaatttttttatatttttattagagacagggtttcaccatgttagccaggttggtcttgatctcctgaccttgtgatccgcccgccttggcctcccaaagtgctgggattacaggccaccgtacccggccaggctatttttttgttttgtttttgtttactactgtattgcttttctctttttcatatttattgagcacctactatatgccagtcaccatgctagatgctttagtaacatgaaggtttcaaactaagaaaagctcaacaaagagccctttagaaaggtaacagttttcctgtgtattgggggagtgggtctcataaggttgtatgatgagaagcgcaagtaattgttttgttttttttttgagacaatgtcttgctctgtcgatcaggctggagtgcagtggcgtcatctcagctcgctacaacctccacctcctgggtttaagtgattctctggcctcagcctcctgagtagctgagattacaggcacgcgccaccacgcccggctaatttttgtatttttagtagagacagggtttcactatgttggtcaggctgatcttgaactcccggcctcaggtgatctgcctgccttggcctcccaaactgctgggattacaggcatgagccaccacgcccagcctggctaaggttcattatccccatctttcagatgaggaggcacacaactctccccagatcccacgtcacagagaatgcaggtctgagtctgttccttgagctcagggtcttggcaatggtgatgctttggagctgcagaatcctctgttggggatggggctgccctgtgcattatagtacgtttagcaacatccctagcttccacctactaaatgccactagcactccttcagatgagaccatcgttgcaacgatggtcctcagcttctattatgtcagaagatacttctaatcactctgcattccttgtctcatttgt

SEQ ID NO: 308803 - DNA, 919 bp, Homo sapiens
tttttctgagacagagtctcaccctgttgcccaggctggagtgcagtgacagcgatcttggctcactgcaagctccgcctcccgggttcacgccattcttctgcctcagcctcctgagcagctatgactacaggtgcccaccaccatgcctggctaatttttttatatttttattagagacagggtttcaccatgttagccaggttggtcttgatctcctgaccttgtgatccgcccgccttggcctcccaaagtgctgggattacaggccaccgtacccggccaggctatttttttgttttgtttttgtttactactgtattgcttttctctttttcatatttattgagcacctactatatgccagtcaccatgctagatgctttagtaacatgaaggtttcaaactaagaaaagctcaacaaagagccctttagaaaggtaacagttttcctgtgtattgggggagtgggtctcataaggttgtatgatgagaagcgcaagtaattgttttgttttttttttgagacaatgtcttgctctgtcgatcaggctggagtgcagtggcgtcatctcagctcgctacaacctccacctcctgggtttaagtgattctctggcctcagcctcctgagtagctgagattacaggcattagctaccacacctggccaaggcccaggtttcgacagaaagggagagaaaacctgccagagatgccatttcggagccactctgcttggcagggacctgtgttcccctcatgcaggttcatccttagagggctgcggtcttatctggttgtgcaaaagtcccacaacctttctggattgatagtttgtggtgaaataaacaattttagtttgtttggagaatcttttgtatacaaaatacaaataaaacctaaatcaaagaaacaga

SEQ ID NO: 308804 - DNA, 1221 bp, Homo sapiens
aggggaaaagagcccatggtgtgcagaaaaccatgcgtcatgattcttatttcctgctcgcagctttgactctctgcctcatctcttcctggaagtgtcttggaagttaggcgactgcacagggaaaggttcgctgcagtgcttgcaggcctgcacccatttattcatccggtggatatttgctgggtgcccggcctggggatccatggtgagcgaggaaggcatggtattgaagtggtatgcctgcatgaccttggcgggggcgcatggcatagagaggacaggcttcagaacaggcaggcaagggctgaaatcctatctctgccaccgaacagctaatgaccccagcaagcaatttcacatccccgaactttcctgtttcctcatgtgtcaaatggggatgatctcgagacgactctccagagtaaccacgtgaagcacctagcacaggggctgacgcaaacagctgggcatcggaggagcctccagggttgtgacctccagtggcttattttccttttgggatcttctctcctagatcctcccctttaattccctgtgaaatttaccactttcatattgaatcgttggcacacagggctaactgcttgttcacctgaaggaagctacagagttcaggtttcttttttctttctttctttcttttttgcttttttaagatgatcttgctccgtcacccaggctggagtgcagtggcgtaatcatggcttcctgcagcctcaaactcctgggctcaatgagttccttgagatcttccatcctcagcttcccaagtagctagtagtagtagtggcttgcaccaacgctcctgccctaattttcaatatttttttgtagagataggatctcactgtgttacccaagctagacttgaactcctggcctcaagcgatccttccgccttggcctcccaaagtgttgggattacaggcattagctaccacacctggccaaggcccaggtttcgacagaaagggagagaaaacctgccagagatgccatttcggagccactctgcttggcagggacctgtgttcccctcatgcaggttcatccttagagggctgcggtcttatctggttgtgcaaaagtcccacaacctttctggattgatagtttgtggtgaaataaacaattttagtttgtttggagaatcttttgtatacaaaatacaaataaaacctaaatcaaagaaacaga

SEQ ID NO: 308805 - DNA, 1236 bp, Homo sapiens
tttttctgagacagagtctcaccctgttgcccaggctggagtgcagtgacagcgatcttggctcactgcaagctccgcctcccgggttcacgccattcttctgcctcagcctcctgagcagctatgactacaggtgcccaccaccatgcctggctaatttttttatatttttattagagacagggtttcaccatgttagccaggttggtcttgatctcctgaccttgtgatccgcccgccttggcctcccaaagtgctgggattacaggccaccgtacccggccaggctatttttttgttttgtttttgtttactactgtattgcttttctctttttcatatttattgagcacctactatatgccagtcaccatgctagatgctttagtaacatgaaggtttcaaactaagaaaagctcaacaaagagccctttagaaaggtaacagttttcctgtgtattgggggagtgggtctcataaggttgtatgatgagaagcgcaagtaattgttttgttttttttttgagacaatgtcttgctctgtcgatcaggctggagtgcagtggcgtcatctcagctcgctacaacctccacctcctgggtttaagtgattctctggcctcagcctcctgagtagctgagattacaggcacgcgccaccacgcccggctaatttttgtatttttagtagagacagggtttcactatgttggtcaggctgatcttgaactcccggcctcaggtgatctgcctgccttggcctcccaaactgctgggattacaggcatgagccaccacgcccagcctggctaaggttcattatccccatctttcagatgaggaggcacacaactctccccagatcccacgtcacagagaatgcaggtctgagtctgttccttgagctcagggtcttggcaatggtgatgctttggagctgcagaatcctctgttggggatggggctgccctgtgcattatagtacgtttagcaacatccctagcttccacctactaaatgccactagcactccttcagatgagaccaccaaaaatgtctccagatgttaccacatgtcccctgggggggtaaaagtgccccggtggagagcactggctcttttcttcacagtcctgacctggtggcctgcacaggccacttctccgaagtgtttcaatgcactctctgccctgggtaccttggacacagcaccctggcccagagaggttggctgac

SEQ ID NO: 308806 - DNA, 649 bp, Homo sapiens
aggggaaaagagcccatggtgtgcagaaaaccatgcgtcatgattcttatttcctgctcgcagctttgactctctgcctcatctcttcctggaagtgtcttggaagttaggcgactgcacagggaaaggttcgctgcagtgcttgcaggcctgcacccatttattcatccggtggatatttgctgggtgcccggcctggggatccatggtgagcgaggaaggcatggtattgaagtggtatgcctgcatgaccttggcgggggcgcatggcatagagaggacaggcttcagaacaggcaggcaagggctgaaatcctatctctgccaccgaacaagctagactccatctcaaaaacaaacaaacaaaaaaacaaaagcaaaaaccagtcttagctcacaggctgtgccaaaacaggcagtgggctggatttggtcctcaagcctgggcttgctgacctctggcctaggacacctctcctttatgcctccgctcccaacacggactctcaactctcatgtttaccttgtcattgttctgtcaagaggaattcactagtctcactcctccaaccagaccgctgccactaaggcttcttctgaacagaaattctggatttgttctcacccatttcataaatgtacataagca

SEQ ID NO: 308807 - DNA, 3125 bp, Homo sapiens
aaagtgggaagcgtgaaggagggaccctgaggtagagggtcaggggttagtgaggccggaagtgagtgtaataaagtttctccagggaggcagggcccggggagaaagttggagcggtaacctaagctggcagtggcgtgatccggcaccaaatcggcccgcggtgcggtgcggagactccatgaggccctggacatgaacaagctgagtggaggcggcgggcgcaggactcgggtggaagggggccagcttgggggcgaggagtggacccgccacgggagctttgtcaataagcccacgcggggctggctgcatcccaacgacaaagtcatgggacccggggtttcctacttggttcggtacatgggttgtgtggaggtcctccagtcaatgcgtgccctggacttcaacacccggactcaggtcaccagggaggccatcagtctggtgtgtgaggctgtgccgggtgctaagggggcgacaaggaggagaaagccctgtagccgcccgctcagctctatcctggggaggagtaacctgaaatttgctggaatgccaatcactctcaccgtctccaccagcagcctcaacctcatggccgcagactgcaaacagatcatcgccaaccaccacatgcaatctatctcatttgcatccggcggggatccggacacagccgagtatgtcgcctatgttgccaaagaccctgtgaatcagagagcctgccacattctggagtgtcccgaagggcttgcccaggatgtcatcagcaccattggccaggccttcgagttgcgcttcaaacaatacctcaggaacccacccaaactggtcacccctcatgacaggatggctggctttgatggctcagcatgggatgaggaggaggaagagccacctgaccatcagtactataatgacttcccggggaaggaaccccccttggggggggtggtagacatgaggcttcgggaaggagccgctccaggggctgctcgacccactgcacccaatgcccagacccccagccacttgggagctacattgcctgtaggacagcctgttgggggagatccagaagtccgcaaacagatgccacctccaccaccctgtccagcaggcagagagctttttgatgatccctcctatgtcaacgtccagaacctagacaaggcccggcaagcagtgggtggtgctgggccccccaatcctgctatcaatggcagtgcaccccgggacctgtttgacatgaagcccttcgaagatgctcttcgcgtgcctccacctccccagtcggtgtccatggctgagcagctccgaggggagccctggttccatgggaagctgagccggcgggaggctgaggcactgctgcagctcaatggggacttcctggtacgggagagcacgaccacacctggccagtatgtgctcactggcttgcagagtgggcagcctaagcatttgctactggtggaccctgagggtgtggttcggactaaggatcaccgctttgaaagtgtcagtcaccttatcagctaccacatggacaatcacttgcccatcatctctgcgggcagcgaactgtgtctacagcaacctgtggagcggaaactgtgatctgccctagcgctctcttccagaagatgccctccaatcctttccaccctattccctaactctcgggacctcgtttgggagtgttctgtgggcttggccttgtgtcagagctgggagtagcatggactctgggtttcatatccagctgagtgagagggtttgagtcaaaagcctgggtgagaatcctgcctctccccaaacattaatcaccaaagtattaatgtacagagtggcccctcacctgggcctttcctgtgccaacctgatgccccttccccaagaaggtgagtgcttgtcatggaaaatgtcctgtggtgacaggcccagtggaacagtcacccttctgggcaagggggaacaaatcacacctctgggcttcagggtatcccagacccctctcaacacccgccccccccatgtttaaactttgtgcctttgaccatctcttaggtctaatgatattttatgcaaacagttcttggacccctgaattcaatgacagggatgccaacaccttcttggcttctgggacctgtgttcttgctgagcaccctctccggtttgggttgggataacagaggcaggagtggcagctgtcccctctccctggggatatgcaacccttagagattgccccagagccccactcccggccaggcgggagatggacccctcccttgctcagtgcctcctggccggggcccctcaccccaaggggtctgtatatacatttcataaggcctgccctcccatgttgcatgcctatgtactctacgccaaagtgcagcccttcctcctgaagcctctgccctgcctccctttctgggagggcggggtgggggtgactgaatttgggcctcttgtacagttaactctcccaggtggattttgtggaggtgagaaaaggggcattgagactataaagcagtagacaatccccacataccatctgtagagttggaactgcattcttttaaagttttatatgcatatattttagggctgtagacttactttcctattttcttttccattgcttattcttgagcacaaaatgataatcaattattacatttatacatcacctttttgacttttccaagcccttttacagctcttggcattttcctcgcctaggcctgtgaggtaactgggatcgcaccttttataccagagacctgaggcagatgaaatttatttccatctaggactagaaaaacttgggtctcttaccgcgagactgagaggcagaagtcagcccgaatgcctgtcagtttcatggaggggaaacgcaaaacctgcagttcctgagtaccttctacaggcccggcccagcctaggcccggggtggccacaccacagcaagccggccccccctcttttggccttgtggataagggagagttgaccgttttcatcctggcctccttttgctgtttggatgtttccacgggtctcacttataccaaagggaaaactcttcattaaagtccgtatttcttcta

SEQ ID NO: 308808 - DNA, 774 bp, Homo sapiens
aagaggctccacgttgggcggggatggggcctgaaactgtctgggtctgagctggggagcggaagccacttgtccctctccctccccaggacttctgtgactcctgggccacagaggtccaaccaggctaagggcctggggataccccctgcctggcccccttgcccaaactggcaggggggccaggctgggcagcagcccctctttcacctcaactatggatctcctgccccccaagcccaagtacaatccactccggaatgagtctctgtcatcgctggaggaaggggcttctgggtccacccccccggaggagctgccttccccatcagcttcatccctggggcccatcctgcctcctctgcctggggacgatagtcccactaccctgtgctccttcttcccccggatgagcaacctgaggctggccaacccggctggggggcgcccagggtctaagggggagccaggaagggcagctgatgatggggaggggatcgtaggggcagccatgccagactcaggccccctacccctcctccaggacatgaacaagctgagtggaggcggcgggcgcaggactcgggtggaagggggccagcttgggggcgaggagtggacccgccacgggagctttgtcaataagcccacgcggggctggctgcatcccaacgacaaagtcatgggaccgggttccacatgggcggacagggtggggaggccccagccaggtcccggcgtcaccgcgtcggtccgggcccaccggggtgggcc

SEQ ID NO: 308809 - DNA, 7174 bp, Homo sapiens
aagaggctccacgttgggcggggatggggcctgaaactgtctgggtctgagctggggagcggaagccacttgtccctctccctccccaggacttctgtgactcctgggccacagaggtccaaccaggctaagggcctggggataccccctgcctggcccccttgcccaaactggcaggggggccaggctgggcagcagcccctctttcacctcaactatggatctcctgccccccaagcccaagtacaatccactccggaatgagtctctgtcatcgctggaggaaggggcttctgggtccacccccccggaggagctgccttccccatcagcttcatccctggggcccatcctgcctcctctgcctggggacgatagtcccactaccctgtgctccttcttcccccggatgagcaacctgaggctggccaacccggctggggggcgcccagggtctaagggggagccaggaagggcagctgatgatggggaggggatcgtaggggcagccatgccagactcaggccccctacccctcctccaggacatgaacaagctgagtggaggcggcgggcgcaggactcgggtggaagggggccagcttgggggcgaggagtggacccgccacgggagctttgtcaataagcccacgcggggctggctgcatcccaacgacaaagtcatgggacccggggtttcctacttggttcggtacatgggttgtgtggaggtcctccagtcaatgcgtgccctggacttcaacacccggactcaggtcaccagggaggccatcagtctggtgtgtgaggctgtgccgggtgctaagggggcgacaaggaggagaaagccctgtagccgcccgctcagctctatcctggggaggagtaacctgaaatttgctggaatgccaatcactctcaccgtctccaccagcagcctcaacctcatggccgcagactgcaaacagatcatcgccaaccaccacatgcaatctatctcatttgcatccggcggggatccggacacagccgagtatgtcgcctatgttgccaaagaccctgtgaatcagagagcctgccacattctggagtgtcccgaagggcttgcccaggatgtcatcagcaccattggccaggccttcgagttgcgcttcaaacaatacctcaggaacccacccaaactggtcacccctcatgacaggatggctggctttgatggctcagcatgggatgaggaggaggaagagccacctgaccatcagtactataatgacttcccggggaaggaaccccccttggggggggtggtagacatgaggcttcgggaaggagccgctccaggggctgctcgacccactgcacccaatgcccagacccccagccacttgggagctacattgcctgtaggacagcctgttgggggagatccagaagtccgcaaacagatgccacctccaccaccctgtccagcaggcagagagctttttgatgatccctcctatgtcaacgtccagaacctagacaaggcccggcaagcagtgggtggtgctgggccccccaatcctgctatcaatggcagtgcaccccgggacctgtttgacatgaagcccttcgaagatgctcttcgcgtgcctccacctccccagtcggtgtccatggctgagcagctccgaggggagccctggttccatgggaagctgagccggcgggaggctgaggcactgctgcagctcaatggggacttcctggtacgggagagcacgaccacacctggccagtatgtgctcactggcttgcagagtgggcagcctaagcatttgctactggtggaccctgagggtgtggttcggactaaggatcaccgctttgaaagtgtcagtcaccttatcagctaccacatggacaatcacttgcccatcatctctgcgggcagcgaactgtgtctacagcaacctgtggagcggaaactgtgatctgccctagcgctctcttccagaagatgccctccaatcctttccaccctattccctaactctcgggacctcgtttgggagtgttctgtgggcttggccttgtgtcagagctgggagtagcatggactctgggtttcatatccagctgagtgagagggtttgagtcaaaagcctgggtgagaatcctgcctctccccaaacattaatcaccaaagtattaatgtacagagtggcccctcacctgggcctttcctgtgccaacctgatgccccttccccaagaaggtgagtgcttgtcatggaaaatgtcctgtggtgacaggcccagtggaacagtcacccttctgggcaagggggaacaaatcacacctctgggcttcagggtatcccagacccctctcaacacccgccccccccatgtttaaactttgtgcctttgaccatctcttaggtctaatgatattttatgcaaacagttcttggacccctgaattcaatgacagggatgccaacaccttcttggcttctgggacctgtgttcttgctgagcaccctctccggtttgggttgggataacagaggcaggagtggcagctgtcccctctccctggggatatgcaacccttagagattgccccagagccccactcccggccaggcgggagatggacccctcccttgctcagtgcctcctggccggggcccctcaccccaaggggtctgtatatacatttcataaggcctgccctcccatgttgcatgcctatgtactctacgccaaagtgcagcccttcctcctgaagcctctgccctgcctccctttctgggagggcggggtgggggtgactgaatttgggcctcttgtacagttaactctcccaggtggattttgtggaggtgagaaaaggggcattgagactataaagcagtagacaatccccacataccatctgtagagttggaactgcattcttttaaagttttatatgcatatattttagggctgtagacttactttcctattttcttttccattgcttattcttgagcacaaaatgataatcaattattacatttatacatcacctttttgacttttccaagcccttttacagctcttggcattttcctcgcctaggcctgtgaggtaactgggatcgcaccttttataccagagacctgaggcagatgaaatttatttccatctaggactagaaaaacttgggtctcttaccgcgagactgagaggcagaagtcagcccgaatgcctgtcagtttcatggaggggaaacgcaaaacctgcagttcctgagtaccttctacaggcccggcccagcctaggcccggggtggccacaccacagcaagccggccccccctcttttggccttgtggataagggagagttgaccgttttcatcctggcctccttttgctgtttggatgtttccacgggtctcacttataccaaagggaaaactcttcattaaagtccgtatttcttctacctctgcctcttaacccttctgggaagcctattgtgtacgccgcgggccctcagcggcagacggggaggcgggaggtcgcggccgcccagggaagctgggggtctgcagagtttgggtgcggcagagtggggcgtttcgcgccaccgtccccatggggatgtcgtgtccgcagagggggctggctccgggtgggtcgaggcgggagccgggcctgcccggcgccccagcaccggcccccgggctacctgggcctcccgggtgcgccttcggctcgcgcgcgcccctccgcggcggctccaccgcccgggatggtacggtccggcagccgggccgcgcgctgccgcccctcggtgagctggtgtgggccgccgctagcggagacgaccctttccactcgcgtggtgccgtggtaagcctcgtccctcgcccgccgcctgttttcaggcgtagcgtctcgtccggtccttgctccccctccccgcagcgctcagtggtggtggccgcgacgagttccggttccggttgctgccgccgctggcgggcggcgagtctggagagagcgcgcagtttgcgcggcggctcggcgcttccctgtcgtcgcactttgtggttgctgcagctcgggggcctgggctgcccctgacaccccttctgggcgatggtgcagcccaagggcgcctccatcccccgccgctgccgctaacccgggtcccccactccatggccgcctcggcgccgcccccaccggacaagctggagggaggtggcggccccgcaccgccccctgcgccgcccagcaccgggaggaagcagggcaaggccggtctgcaaatgaagagtccagaaaagaagcgaaggaagtcaaatactcagggccctgcatactcacatctgacggagtttgcaccacccccaactcccatggtggatcacctggttgcatccaacccttttgaagatgacttcggagcccccaaagtgggggttgcagcccctccattccttggcagtcctgtgcccttcggaggcttccgtgtgcaggggggcatggcgggccaggtacccccaggctacagcactggaggtggagggggcccccagccactccgtcgacagccaccccccttccctcccaatcctatgggccctgctttcaacatgcccccccagggtcctggctacccacccccaggcaacatgaactttcccagccaacccttcaaccagcctctgggtcaaaactttagtcctcccagtgggcagatgatgccgggcccagtggggggatttggtcccatgatctcacccaccatgggacagcctcccagagcagagctgggcccaccttctctgtcccaacgatttgctcagccaggggctccttttggcccttctcctctccagagacctggtcaggggctccccagcctgccgcctaacacaagtccctttcctggtccggaccctggctttcctggccctggtggtgaggatggggggaagcccttgaatccacctgcttctactgcttttccccaggagccccactcaggctccccggctgctgctgttaatgggaaccagcccagtttccccccgaacagcagtgggcggggtgggggcactccagatgccaacagcttggcaccccctggcaaggcaggtgggggctccgggccccagcctcccccaggcttggtgtacccatgtggtgcctgtcggagtgaggtgaacgatgaccaggatgccattctgtgtgaggcctcctgccagaaatggttccaccgtgagtgcacaggcatgactgagagcgcctatgggctgctgaccactgaagcttctgccgtctgggcctgcgatctctgcctcaagaccaaggagatccagtctgtctacatccgtgagggcatggggcagctggtggctgctaacgatgggtgacgctggtgaagtggcccagggaagtgcacatgtctctccctgctcttccagggtgatttttttgatgtttggctcttggtccttgtttccactggctttccatccccatggggcagaaacagtggctcctgggagcagaaaaggaattgaggtgggcaggcagaagagcctggattgctcactgttttgggaaacttacatgttgagatctacagagatccaggaaaccaaagccctgctgagcagagccattttgtggctatttctggaggcccaggagtgtggctgcaagagaaaaggggctggaggaagatccggagggcaggggtgttccctctgctgatgatggatgcccctaacacctgtgcctaacacccctactgaaccccacagctccagccttagtttttggagtcaagtgttaaaggtttctggccagaggaattggggtcttgccatccctgcaatagcccttttatgggctctgggagacagctttagggaataaatggggattttcccctttttctacccactcctttgcttcctccaagacttacccaactccttccccctcagagaaccaaatagcctgaggaagcaggagagttcctggttatggcagtttcttggtgatttggggcttcaagacagtaggtgagagatgctgtcaggacgtatcttcttcataccaaagtcactggtcctttctcagcctctctcgtgcttttctcctaatgaccatatttttgccaaaaattgggatatgttatctgacagaccagaatatttgaagtttgggctgtcctgaaagtctggactttggtggtaccctcctcccccagcccatctgttgcacattatactccgtgtgttcttcaactttcggcgcccttattcccctgccttcctggcttgattgaaggaaagcttgaaaaggcgcagagccctatacctcatttcctccatgataaaaggatccaagtgaggccctgtcacagcctgtgggtaggggatgcggcgggatcctcattgccatggtactcaaaggtagaagagcctggagtttgttgcttctctttgctattctttcatatcctcttgggcctggtgattaattagcaattctcattcctctcagccaaaggcctgcactgggctttatttgtctttttttattttttaagcactgcctgccagagatgggcctggggcctgatgaggaccttagcgctgctcgttctccttttctgttcatgcacacattcctccatggggtggggaaggcaggcatggggtgtggccctcggagaagttaggagtcccccagctcaagatacagtggcaaagacctagtggtcccctacccccacttctctcagttcctggcatgaggagagaagaccctgctctggtggagctgacaacctttgaggctgggaggagagcagcctctgggcatcgttcccagtgtccctcacactaaaacggcgtagatggcaaccccccacccccaccccgctgctcaactcttgtgtttgttgttctgtttgccccatttatctgttgctgtttttgtgttgtcttcccctgctccgcattttgtaaaatggcccctgggggagtgtttttgctggatctgctccctctcgctctctcactccactactttttggaacaaagtgatggcagaatgcggtggtggtgggggtcttttgtactgttggattaataaaatgattttaaaatcccaga

SEQ ID NO: 308810 - DNA, 6822 bp, Homo sapiens
aaagtgggaagcgtgaaggagggaccctgaggtagagggtcaggggttagtgaggccggaagtgagtgtaataaagtttctccagggaggcagggcccggggagaaagttggagcggtaacctaagctggcagtggcgtgatccggcaccaaatcggcccgcggtgcggtgcggagactccatgaggccctggacatgaacaagctgagtggaggcggcgggcgcaggactcgggtggaagggggccagcttgggggcgaggagtggacccgccacgggagctttgtcaataagcccacgcggggctggctgcatcccaacgacaaagtcatgggacccggggtttcctacttggttcggtacatgggttgtgtggaggtcctccagtcaatgcgtgccctggacttcaacacccggactcaggtcaccagggaggccatcagtctggtgtgtgaggctgtgccgggtgctaagggggcgacaaggaggagaaagccctgtagccgcccgctcagctctatcctggggaggagtaacctgaaatttgctggaatgccaatcactctcaccgtctccaccagcagcctcaacctcatggccgcagactgcaaacagatcatcgccaaccaccacatgcaatctatctcatttgcatccggcggggatccggacacagccgagtatgtcgcctatgttgccaaagaccctgtgaatcagagagcctgccacattctggagtgtcccgaagggcttgcccaggatgtcatcagcaccattggccaggccttcgagttgcgcttcaaacaatacctcaggaacccacccaaactggtcacccctcatgacaggatggctggctttgatggctcagcatgggatgaggaggaggaagagccacctgaccatcagtactataatgacttcccggggaaggaaccccccttggggggggtggtagacatgaggcttcgggaaggagccgctccaggggctgctcgacccactgcacccaatgcccagacccccagccacttgggagctacattgcctgtaggacagcctgttgggggagatccagaagtccgcaaacagatgccacctccaccaccctgtccagcaggcagagagctttttgatgatccctcctatgtcaacgtccagaacctagacaaggcccggcaagcagtgggtggtgctgggccccccaatcctgctatcaatggcagtgcaccccgggacctgtttgacatgaagcccttcgaagatgctcttcgcgtgcctccacctccccagtcggtgtccatggctgagcagctccgaggggagccctggttccatgggaagctgagccggcgggaggctgaggcactgctgcagctcaatggggacttcctggtacgggagagcacgaccacacctggccagtatgtgctcactggcttgcagagtgggcagcctaagcatttgctactggtggaccctgagggtgtggttcggactaaggatcaccgctttgaaagtgtcagtcaccttatcagctaccacatggacaatcacttgcccatcatctctgcgggcagcgaactgtgtctacagcaacctgtggagcggaaactgtgatctgccctagcgctctcttccagaagatgccctccaatcctttccaccctattccctaactctcgggacctcgtttgggagtgttctgtgggcttggccttgtgtcagagctgggagtagcatggactctgggtttcatatccagctgagtgagagggtttgagtcaaaagcctgggtgagaatcctgcctctccccaaacattaatcaccaaagtattaatgtacagagtggcccctcacctgggcctttcctgtgccaacctgatgccccttccccaagaaggtgagtgcttgtcatggaaaatgtcctgtggtgacaggcccagtggaacagtcacccttctgggcaagggggaacaaatcacacctctgggcttcagggtatcccagacccctctcaacacccgccccccccatgtttaaactttgtgcctttgaccatctcttaggtctaatgatattttatgcaaacagttcttggacccctgaattcaatgacagggatgccaacaccttcttggcttctgggacctgtgttcttgctgagcaccctctccggtttgggttgggataacagaggcaggagtggcagctgtcccctctccctggggatatgcaacccttagagattgccccagagccccactcccggccaggcgggagatggacccctcccttgctcagtgcctcctggccggggcccctcaccccaaggggtctgtatatacatttcataaggcctgccctcccatgttgcatgcctatgtactctacgccaaagtgcagcccttcctcctgaagcctctgccctgcctccctttctgggagggcggggtgggggtgactgaatttgggcctcttgtacagttaactctcccaggtggattttgtggaggtgagaaaaggggcattgagactataaagcagtagacaatccccacataccatctgtagagttggaactgcattcttttaaagttttatatgcatatattttagggctgtagacttactttcctattttcttttccattgcttattcttgagcacaaaatgataatcaattattacatttatacatcacctttttgacttttccaagcccttttacagctcttggcattttcctcgcctaggcctgtgaggtaactgggatcgcaccttttataccagagacctgaggcagatgaaatttatttccatctaggactagaaaaacttgggtctcttaccgcgagactgagaggcagaagtcagcccgaatgcctgtcagtttcatggaggggaaacgcaaaacctgcagttcctgagtaccttctacaggcccggcccagcctaggcccggggtggccacaccacagcaagccggccccccctcttttggccttgtggataagggagagttgaccgttttcatcctggcctccttttgctgtttggatgtttccacgggtctcacttataccaaagggaaaactcttcattaaagtccgtatttcttctacctctgcctcttaacccttctgggaagcctattgtgtacgccgcgggccctcagcggcagacggggaggcgggaggtcgcggccgcccagggaagctgggggtctgcagagtttgggtgcggcagagtggggcgtttcgcgccaccgtccccatggggatgtcgtgtccgcagagggggctggctccgggtgggtcgaggcgggagccgggcctgcccggcgccccagcaccggcccccgggctacctgggcctcccgggtgcgccttcggctcgcgcgcgcccctccgcggcggctccaccgcccgggatggtacggtccggcagccgggccgcgcgctgccgcccctcggtgagctggtgtgggccgccgctagcggagacgaccctttccactcgcgtggtgccgtggtaagcctcgtccctcgcccgccgcctgttttcaggcgtagcgtctcgtccggtccttgctccccctccccgcagcgctcagtggtggtggccgcgacgagttccggttccggttgctgccgccgctggcgggcggcgagtctggagagagcgcgcagtttgcgcggcggctcggcgcttccctgtcgtcgcactttgtggttgctgcagctcgggggcctgggctgcccctgacaccccttctgggcgatggtgcagcccaagggcgcctccatcccccgccgctgccgctaacccgggtcccccactccatggccgcctcggcgccgcccccaccggacaagctggagggaggtggcggccccgcaccgccccctgcgccgcccagcaccgggaggaagcagggcaaggccggtctgcaaatgaagagtccagaaaagaagcgaaggaagtcaaatactcagggccctgcatactcacatctgacggagtttgcaccacccccaactcccatggtggatcacctggttgcatccaacccttttgaagatgacttcggagcccccaaagtgggggttgcagcccctccattccttggcagtcctgtgcccttcggaggcttccgtgtgcaggggggcatggcgggccaggtacccccaggctacagcactggaggtggagggggcccccagccactccgtcgacagccaccccccttccctcccaatcctatgggccctgctttcaacatgcccccccagggtcctggctacccacccccaggcaacatgaactttcccagccaacccttcaaccagcctctgggtcaaaactttagtcctcccagtgggcagatgatgccgggcccagtggggggatttggtcccatgatctcacccaccatgggacagcctcccagagcagagctgggcccaccttctctgtcccaacgatttgctcagccaggggctccttttggcccttctcctctccagagacctggtcaggggctccccagcctgccgcctaacacaagtccctttcctggtccggaccctggctttcctggccctggtggtgaggatggggggaagcccttgaatccacctgcttctactgcttttccccaggagccccactcaggctccccggctgctgctgttaatgggaaccagcccagtttccccccgaacagcagtgggcggggtgggggcactccagatgccaacagcttggcaccccctggcaaggcaggtgggggctccgggccccagcctcccccaggcttggtgtacccatgtggtgcctgtcggagtgaggtgaacgatgaccaggatgccattctgtgtgaggcctcctgccagaaatggttccaccgtgagtgcacaggcatgactgagagcgcctatgggctgctgaccactgaagcttctgccgtctgggcctgcgatctctgcctcaagaccaaggagatccagtctgtctacatccgtgagggcatggggcagctggtggctgctaacgatgggtgacgctggtgaagtggcccagggaagtgcacatgtctctccctgctcttccagggtgatttttttgatgtttggctcttggtccttgtttccactggctttccatccccatggggcagaaacagtggctcctgggagcagaaaaggaattgaggtgggcaggcagaagagcctggattgctcactgttttgggaaacttacatgttgagatctacagagatccaggaaaccaaagccctgctgagcagagccattttgtggctatttctggaggcccaggagtgtggctgcaagagaaaaggggctggaggaagatccggagggcaggggtgttccctctgctgatgatggatgcccctaacacctgtgcctaacacccctactgaaccccacagctccagccttagtttttggagtcaagtgttaaaggtttctggccagaggaattggggtcttgccatccctgcaatagcccttttatgggctctgggagacagctttagggaataaatggggattttcccctttttctacccactcctttgcttcctccaagacttacccaactccttccccctcagagaaccaaatagcctgaggaagcaggagagttcctggttatggcagtttcttggtgatttggggcttcaagacagtaggtgagagatgctgtcaggacgtatcttcttcataccaaagtcactggtcctttctcagcctctctcgtgcttttctcctaatgaccatatttttgccaaaaattgggatatgttatctgacagaccagaatatttgaagtttgggctgtcctgaaagtctggactttggtggtaccctcctcccccagcccatctgttgcacattatactccgtgtgttcttcaactttcggcgcccttattcccctgccttcctggcttgattgaaggaaagcttgaaaaggcgcagagccctatacctcatttcctccatgataaaaggatccaagtgaggccctgtcacagcctgtgggtaggggatgcggcgggatcctcattgccatggtactcaaaggtagaagagcctggagtttgttgcttctctttgctattctttcatatcctcttgggcctggtgattaattagcaattctcattcctctcagccaaaggcctgcactgggctttatttgtctttttttattttttaagcactgcctgccagagatgggcctggggcctgatgaggaccttagcgctgctcgttctccttttctgttcatgcacacattcctccatggggtggggaaggcaggcatggggtgtggccctcggagaagttaggagtcccccagctcaagatacagtggcaaagacctagtggtcccctacccccacttctctcagttcctggcatgaggagagaagaccctgctctggtggagctgacaacctttgaggctgggaggagagcagcctctgggcatcgttcccagtgtccctcacactaaaacggcgtagatggcaaccccccacccccaccccgctgctcaactcttgtgtttgttgttctgtttgccccatttatctgttgctgtttttgtgttgtcttcccctgctccgcattttgtaaaatggcccctgggggagtgtttttgctggatctgctccctctcgctctctcactccactactttttggaacaaagtgatggcagaatgcggtggtggtgggggtcttttgtactgttggattaataaaatgattttaaaatcccaga

SEQ ID NO: 308811 - DNA, 7120 bp, Homo sapiens
aagaggctccacgttgggcggggatggggcctgaaactgtctgggtctgagctggggagcggaagccacttgtccctctccctccccaggacttctgtgactcctgggccacagaggtccaaccaggctaagggcctggggataccccctgcctggcccccttgcccaaactggcaggggggccaggctgggcagcagcccctctttcacctcaactatggatctcctgccccccaagcccaagtacaatccactccggaatgagtctctgtcatcgctggaggaaggggcttctgggtccacccccccggaggagctgccttccccatcagcttcatccctggggcccatcctgcctcctctgcctggggacgatagtcccactaccctgtgctccttcttcccccggatgagcaacctgaggctggccaacccggctggggggcgcccagggtctaagggggagccaggaagggcagctgatgatggggaggggatcgtaggggcagccatgccagactcaggccccctacccctcctccaggacatgaacaagctgagtggaggcggcgggcgcaggactcgggtggaagggggccagcttgggggcgaggagtggacccgccacgggagctttgtcaataagcccacgcggggctggctgcatcccaacgacaaagtcatgggacccggggtttcctacttggttcggtacatgggttgtgtggaggtcctccagtcaatgcgtgccctggacttcaacacccggactcaggtcaccagggaggccatcagtctggtgtgtgaggctgtgccgggtgctaagggggcgacaaggaggagaaagccctgtagccgcccgctcagctctatcctggggaggagtaacctgaaatttgctggaatgccaatcactctcaccgtctccaccagcagcctcaacctcatggccgcagactgcaaacaggacacagccgagtatgtcgcctatgttgccaaagaccctgtgaatcagagagcctgccacattctggagtgtcccgaagggcttgcccaggatgtcatcagcaccattggccaggccttcgagttgcgcttcaaacaatacctcaggaacccacccaaactggtcacccctcatgacaggatggctggctttgatggctcagcatgggatgaggaggaggaagagccacctgaccatcagtactataatgacttcccggggaaggaaccccccttggggggggtggtagacatgaggcttcgggaaggagccgctccaggggctgctcgacccactgcacccaatgcccagacccccagccacttgggagctacattgcctgtaggacagcctgttgggggagatccagaagtccgcaaacagatgccacctccaccaccctgtccagcaggcagagagctttttgatgatccctcctatgtcaacgtccagaacctagacaaggcccggcaagcagtgggtggtgctgggccccccaatcctgctatcaatggcagtgcaccccgggacctgtttgacatgaagcccttcgaagatgctcttcgcgtgcctccacctccccagtcggtgtccatggctgagcagctccgaggggagccctggttccatgggaagctgagccggcgggaggctgaggcactgctgcagctcaatggggacttcctggtacgggagagcacgaccacacctggccagtatgtgctcactggcttgcagagtgggcagcctaagcatttgctactggtggaccctgagggtgtggttcggactaaggatcaccgctttgaaagtgtcagtcaccttatcagctaccacatggacaatcacttgcccatcatctctgcgggcagcgaactgtgtctacagcaacctgtggagcggaaactgtgatctgccctagcgctctcttccagaagatgccctccaatcctttccaccctattccctaactctcgggacctcgtttgggagtgttctgtgggcttggccttgtgtcagagctgggagtagcatggactctgggtttcatatccagctgagtgagagggtttgagtcaaaagcctgggtgagaatcctgcctctccccaaacattaatcaccaaagtattaatgtacagagtggcccctcacctgggcctttcctgtgccaacctgatgccccttccccaagaaggtgagtgcttgtcatggaaaatgtcctgtggtgacaggcccagtggaacagtcacccttctgggcaagggggaacaaatcacacctctgggcttcagggtatcccagacccctctcaacacccgccccccccatgtttaaactttgtgcctttgaccatctcttaggtctaatgatattttatgcaaacagttcttggacccctgaattcaatgacagggatgccaacaccttcttggcttctgggacctgtgttcttgctgagcaccctctccggtttgggttgggataacagaggcaggagtggcagctgtcccctctccctggggatatgcaacccttagagattgccccagagccccactcccggccaggcgggagatggacccctcccttgctcagtgcctcctggccggggcccctcaccccaaggggtctgtatatacatttcataaggcctgccctcccatgttgcatgcctatgtactctacgccaaagtgcagcccttcctcctgaagcctctgccctgcctccctttctgggagggcggggtgggggtgactgaatttgggcctcttgtacagttaactctcccaggtggattttgtggaggtgagaaaaggggcattgagactataaagcagtagacaatccccacataccatctgtagagttggaactgcattcttttaaagttttatatgcatatattttagggctgtagacttactttcctattttcttttccattgcttattcttgagcacaaaatgataatcaattattacatttatacatcacctttttgacttttccaagcccttttacagctcttggcattttcctcgcctaggcctgtgaggtaactgggatcgcaccttttataccagagacctgaggcagatgaaatttatttccatctaggactagaaaaacttgggtctcttaccgcgagactgagaggcagaagtcagcccgaatgcctgtcagtttcatggaggggaaacgcaaaacctgcagttcctgagtaccttctacaggcccggcccagcctaggcccggggtggccacaccacagcaagccggccccccctcttttggccttgtggataagggagagttgaccgttttcatcctggcctccttttgctgtttggatgtttccacgggtctcacttataccaaagggaaaactcttcattaaagtccgtatttcttctacctctgcctcttaacccttctgggaagcctattgtgtacgccgcgggccctcagcggcagacggggaggcgggaggtcgcggccgcccagggaagctgggggtctgcagagtttgggtgcggcagagtggggcgtttcgcgccaccgtccccatggggatgtcgtgtccgcagagggggctggctccgggtgggtcgaggcgggagccgggcctgcccggcgccccagcaccggcccccgggctacctgggcctcccgggtgcgccttcggctcgcgcgcgcccctccgcggcggctccaccgcccgggatggtacggtccggcagccgggccgcgcgctgccgcccctcggtgagctggtgtgggccgccgctagcggagacgaccctttccactcgcgtggtgccgtggtaagcctcgtccctcgcccgccgcctgttttcaggcgtagcgtctcgtccggtccttgctccccctccccgcagcgctcagtggtggtggccgcgacgagttccggttccggttgctgccgccgctggcgggcggcgagtctggagagagcgcgcagtttgcgcggcggctcggcgcttccctgtcgtcgcactttgtggttgctgcagctcgggggcctgggctgcccctgacaccccttctgggcgatggtgcagcccaagggcgcctccatcccccgccgctgccgctaacccgggtcccccactccatggccgcctcggcgccgcccccaccggacaagctggagggaggtggcggccccgcaccgccccctgcgccgcccagcaccgggaggaagcagggcaaggccggtctgcaaatgaagagtccagaaaagaagcgaaggaagtcaaatactcagggccctgcatactcacatctgacggagtttgcaccacccccaactcccatggtggatcacctggttgcatccaacccttttgaagatgacttcggagcccccaaagtgggggttgcagcccctccattccttggcagtcctgtgcccttcggaggcttccgtgtgcaggggggcatggcgggccaggtacccccaggctacagcactggaggtggagggggcccccagccactccgtcgacagccaccccccttccctcccaatcctatgggccctgctttcaacatgcccccccagggtcctggctacccacccccaggcaacatgaactttcccagccaacccttcaaccagcctctgggtcaaaactttagtcctcccagtgggcagatgatgccgggcccagtggggggatttggtcccatgatctcacccaccatgggacagcctcccagagcagagctgggcccaccttctctgtcccaacgatttgctcagccaggggctccttttggcccttctcctctccagagacctggtcaggggctccccagcctgccgcctaacacaagtccctttcctggtccggaccctggctttcctggccctggtggtgaggatggggggaagcccttgaatccacctgcttctactgcttttccccaggagccccactcaggctccccggctgctgctgttaatgggaaccagcccagtttccccccgaacagcagtgggcggggtgggggcactccagatgccaacagcttggcaccccctggcaaggcaggtgggggctccgggccccagcctcccccaggcttggtgtacccatgtggtgcctgtcggagtgaggtgaacgatgaccaggatgccattctgtgtgaggcctcctgccagaaatggttccaccgtgagtgcacaggcatgactgagagcgcctatgggctgctgaccactgaagcttctgccgtctgggcctgcgatctctgcctcaagaccaaggagatccagtctgtctacatccgtgagggcatggggcagctggtggctgctaacgatgggtgacgctggtgaagtggcccagggaagtgcacatgtctctccctgctcttccagggtgatttttttgatgtttggctcttggtccttgtttccactggctttccatccccatggggcagaaacagtggctcctgggagcagaaaaggaattgaggtgggcaggcagaagagcctggattgctcactgttttgggaaacttacatgttgagatctacagagatccaggaaaccaaagccctgctgagcagagccattttgtggctatttctggaggcccaggagtgtggctgcaagagaaaaggggctggaggaagatccggagggcaggggtgttccctctgctgatgatggatgcccctaacacctgtgcctaacacccctactgaaccccacagctccagccttagtttttggagtcaagtgttaaaggtttctggccagaggaattggggtcttgccatccctgcaatagcccttttatgggctctgggagacagctttagggaataaatggggattttcccctttttctacccactcctttgcttcctccaagacttacccaactccttccccctcagagaaccaaatagcctgaggaagcaggagagttcctggttatggcagtttcttggtgatttggggcttcaagacagtaggtgagagatgctgtcaggacgtatcttcttcataccaaagtcactggtcctttctcagcctctctcgtgcttttctcctaatgaccatatttttgccaaaaattgggatatgttatctgacagaccagaatatttgaagtttgggctgtcctgaaagtctggactttggtggtaccctcctcccccagcccatctgttgcacattatactccgtgtgttcttcaactttcggcgcccttattcccctgccttcctggcttgattgaaggaaagcttgaaaaggcgcagagccctatacctcatttcctccatgataaaaggatccaagtgaggccctgtcacagcctgtgggtaggggatgcggcgggatcctcattgccatggtactcaaaggtagaagagcctggagtttgttgcttctctttgctattctttcatatcctcttgggcctggtgattaattagcaattctcattcctctcagccaaaggcctgcactgggctttatttgtctttttttattttttaagcactgcctgccagagatgggcctggggcctgatgaggaccttagcgctgctcgttctccttttctgttcatgcacacattcctccatggggtggggaaggcaggcatggggtgtggccctcggagaagttaggagtcccccagctcaagatacagtggcaaagacctagtggtcccctacccccacttctctcagttcctggcatgaggagagaagaccctgctctggtggagctgacaacctttgaggctgggaggagagcagcctctgggcatcgttcccagtgtccctcacactaaaacggcgtagatggcaaccccccacccccaccccgctgctcaactcttgtgtttgttgttctgtttgccccatttatctgttgctgtttttgtgttgtcttcccctgctccgcattttgtaaaatggcccctgggggagtgtttttgctggatctgctccctctcgctctctcactccactactttttggaacaaagtgatggcagaatgcggtggtggtgggggtcttttgtactgttggattaataaaatgattttaaaatcccaga

SEQ ID NO: 308812 - DNA, 7038 bp, Homo sapiens
aaagtgggaagcgtgaaggagggaccctgaggtagagggtcaggggttagtgaggccggaagtgagtgtaataaagtttctccagggaggcagggcccggggagaaagttggagcggtaacctaagctggcagtggcgtgatccggcaccaaatcggcccgcggtgcggtgcggagactccatgaggccctgacggagtttcgctcttatcgtccaggctggagtgcaatggtgcgatctcggctcactgcaacctccgcctcctgagttcaagtgattctcctgcctcagcctcctgagtagctgggattacaggcgcccaccaccacgcccggctaatttttgtatttttagtagagacggggtttccccatgttggctaggctagcctcgaactcctgacctcaggacatgaacaagctgagtggaggcggcgggcgcaggactcgggtggaagggggccagcttgggggcgaggagtggacccgccacgggagctttgtcaataagcccacgcggggctggctgcatcccaacgacaaagtcatgggacccggggtttcctacttggttcggtacatgggttgtgtggaggtcctccagtcaatgcgtgccctggacttcaacacccggactcaggtcaccagggaggccatcagtctggtgtgtgaggctgtgccgggtgctaagggggcgacaaggaggagaaagccctgtagccgcccgctcagctctatcctggggaggagtaacctgaaatttgctggaatgccaatcactctcaccgtctccaccagcagcctcaacctcatggccgcagactgcaaacagatcatcgccaaccaccacatgcaatctatctcatttgcatccggcggggatccggacacagccgagtatgtcgcctatgttgccaaagaccctgtgaatcagagagcctgccacattctggagtgtcccgaagggcttgcccaggatgtcatcagcaccattggccaggccttcgagttgcgcttcaaacaatacctcaggaacccacccaaactggtcacccctcatgacaggatggctggctttgatggctcagcatgggatgaggaggaggaagagccacctgaccatcagtactataatgacttcccggggaaggaaccccccttggggggggtggtagacatgaggcttcgggaaggagccgctccaggggctgctcgacccactgcacccaatgcccagacccccagccacttgggagctacattgcctgtaggacagcctgttgggggagatccagaagtccgcaaacagatgccacctccaccaccctgtccagcaggcagagagctttttgatgatccctcctatgtcaacgtccagaacctagacaaggcccggcaagcagtgggtggtgctgggccccccaatcctgctatcaatggcagtgcaccccgggacctgtttgacatgaagcccttcgaagatgctcttcgcgtgcctccacctccccagtcggtgtccatggctgagcagctccgaggggagccctggttccatgggaagctgagccggcgggaggctgaggcactgctgcagctcaatggggacttcctggtacgggagagcacgaccacacctggccagtatgtgctcactggcttgcagagtgggcagcctaagcatttgctactggtggaccctgagggtgtggttcggactaaggatcaccgctttgaaagtgtcagtcaccttatcagctaccacatggacaatcacttgcccatcatctctgcgggcagcgaactgtgtctacagcaacctgtggagcggaaactgtgatctgccctagcgctctcttccagaagatgccctccaatcctttccaccctattccctaactctcgggacctcgtttgggagtgttctgtgggcttggccttgtgtcagagctgggagtagcatggactctgggtttcatatccagctgagtgagagggtttgagtcaaaagcctgggtgagaatcctgcctctccccaaacattaatcaccaaagtattaatgtacagagtggcccctcacctgggcctttcctgtgccaacctgatgccccttccccaagaaggtgagtgcttgtcatggaaaatgtcctgtggtgacaggcccagtggaacagtcacccttctgggcaagggggaacaaatcacacctctgggcttcagggtatcccagacccctctcaacacccgccccccccatgtttaaactttgtgcctttgaccatctcttaggtctaatgatattttatgcaaacagttcttggacccctgaattcaatgacagggatgccaacaccttcttggcttctgggacctgtgttcttgctgagcaccctctccggtttgggttgggataacagaggcaggagtggcagctgtcccctctccctggggatatgcaacccttagagattgccccagagccccactcccggccaggcgggagatggacccctcccttgctcagtgcctcctggccggggcccctcaccccaaggggtctgtatatacatttcataaggcctgccctcccatgttgcatgcctatgtactctacgccaaagtgcagcccttcctcctgaagcctctgccctgcctccctttctgggagggcggggtgggggtgactgaatttgggcctcttgtacagttaactctcccaggtggattttgtggaggtgagaaaaggggcattgagactataaagcagtagacaatccccacataccatctgtagagttggaactgcattcttttaaagttttatatgcatatattttagggctgtagacttactttcctattttcttttccattgcttattcttgagcacaaaatgataatcaattattacatttatacatcacctttttgacttttccaagcccttttacagctcttggcattttcctcgcctaggcctgtgaggtaactgggatcgcaccttttataccagagacctgaggcagatgaaatttatttccatctaggactagaaaaacttgggtctcttaccgcgagactgagaggcagaagtcagcccgaatgcctgtcagtttcatggaggggaaacgcaaaacctgcagttcctgagtaccttctacaggcccggcccagcctaggcccggggtggccacaccacagcaagccggccccccctcttttggccttgtggataagggagagttgaccgttttcatcctggcctccttttgctgtttggatgtttccacgggtctcacttataccaaagggaaaactcttcattaaagtccgtatttcttctacctctgcctcttaacccttctgggaagcctattgtgtacgccgcgggccctcagcggcagacggggaggcgggaggtcgcggccgcccagggaagctgggggtctgcagagtttgggtgcggcagagtggggcgtttcgcgccaccgtccccatggggatgtcgtgtccgcagagggggctggctccgggtgggtcgaggcgggagccgggcctgcccggcgccccagcaccggcccccgggctacctgggcctcccgggtgcgccttcggctcgcgcgcgcccctccgcggcggctccaccgcccgggatggtacggtccggcagccgggccgcgcgctgccgcccctcggtgagctggtgtgggccgccgctagcggagacgaccctttccactcgcgtggtgccgtggtaagcctcgtccctcgcccgccgcctgttttcaggcgtagcgtctcgtccggtccttgctccccctccccgcagcgctcagtggtggtggccgcgacgagttccggttccggttgctgccgccgctggcgggcggcgagtctggagagagcgcgcagtttgcgcggcggctcggcgcttccctgtcgtcgcactttgtggttgctgcagctcgggggcctgggctgcccctgacaccccttctgggcgatggtgcagcccaagggcgcctccatcccccgccgctgccgctaacccgggtcccccactccatggccgcctcggcgccgcccccaccggacaagctggagggaggtggcggccccgcaccgccccctgcgccgcccagcaccgggaggaagcagggcaaggccggtctgcaaatgaagagtccagaaaagaagcgaaggaagtcaaatactcagggccctgcatactcacatctgacggagtttgcaccacccccaactcccatggtggatcacctggttgcatccaacccttttgaagatgacttcggagcccccaaagtgggggttgcagcccctccattccttggcagtcctgtgcccttcggaggcttccgtgtgcaggggggcatggcgggccaggtacccccaggctacagcactggaggtggagggggcccccagccactccgtcgacagccaccccccttccctcccaatcctatgggccctgctttcaacatgcccccccagggtcctggctacccacccccaggcaacatgaactttcccagccaacccttcaaccagcctctgggtcaaaactttagtcctcccagtgggcagatgatgccgggcccagtggggggatttggtcccatgatctcacccaccatgggacagcctcccagagcagagctgggcccaccttctctgtcccaacgatttgctcagccaggggctccttttggcccttctcctctccagagacctggtcaggggctccccagcctgccgcctaacacaagtccctttcctggtccggaccctggctttcctggccctggtggtgaggatggggggaagcccttgaatccacctgcttctactgcttttccccaggagccccactcaggctccccggctgctgctgttaatgggaaccagcccagtttccccccgaacagcagtgggcggggtgggggcactccagatgccaacagcttggcaccccctggcaaggcaggtgggggctccgggccccagcctcccccaggcttggtgtacccatgtggtgcctgtcggagtgaggtgaacgatgaccaggatgccattctgtgtgaggcctcctgccagaaatggttccaccgtgagtgcacaggcatgactgagagcgcctatgggctgctgaccactgaagcttctgccgtctgggcctgcgatctctgcctcaagaccaaggagatccagtctgtctacatccgtgagggcatggggcagctggtggctgctaacgatgggtgacgctggtgaagtggcccagggaagtgcacatgtctctccctgctcttccagggtgatttttttgatgtttggctcttggtccttgtttccactggctttccatccccatggggcagaaacagtggctcctgggagcagaaaaggaattgaggtgggcaggcagaagagcctggattgctcactgttttgggaaacttacatgttgagatctacagagatccaggaaaccaaagccctgctgagcagagccattttgtggctatttctggaggcccaggagtgtggctgcaagagaaaaggggctggaggaagatccggagggcaggggtgttccctctgctgatgatggatgcccctaacacctgtgcctaacacccctactgaaccccacagctccagccttagtttttggagtcaagtgttaaaggtttctggccagaggaattggggtcttgccatccctgcaatagcccttttatgggctctgggagacagctttagggaataaatggggattttcccctttttctacccactcctttgcttcctccaagacttacccaactccttccccctcagagaaccaaatagcctgaggaagcaggagagttcctggttatggcagtttcttggtgatttggggcttcaagacagtaggtgagagatgctgtcaggacgtatcttcttcataccaaagtcactggtcctttctcagcctctctcgtgcttttctcctaatgaccatatttttgccaaaaattgggatatgttatctgacagaccagaatatttgaagtttgggctgtcctgaaagtctggactttggtggtaccctcctcccccagcccatctgttgcacattatactccgtgtgttcttcaactttcggcgcccttattcccctgccttcctggcttgattgaaggaaagcttgaaaaggcgcagagccctatacctcatttcctccatgataaaaggatccaagtgaggccctgtcacagcctgtgggtaggggatgcggcgggatcctcattgccatggtactcaaaggtagaagagcctggagtttgttgcttctctttgctattctttcatatcctcttgggcctggtgattaattagcaattctcattcctctcagccaaaggcctgcactgggctttatttgtctttttttattttttaagcactgcctgccagagatgggcctggggcctgatgaggaccttagcgctgctcgttctccttttctgttcatgcacacattcctccatggggtggggaaggcaggcatggggtgtggccctcggagaagttaggagtcccccagctcaagatacagtggcaaagacctagtggtcccctacccccacttctctcagttcctggcatgaggagagaagaccctgctctggtggagctgacaacctttgaggctgggaggagagcagcctctgggcatcgttcccagtgtccctcacactaaaacggcgtagatggcaaccccccacccccaccccgctgctcaactcttgtgtttgttgttctgtttgccccatttatctgttgctgtttttgtgttgtcttcccctgctccgcattttgtaaaatggcccctgggggagtgtttttgctggatctgctccctctcgctctctcactccactactttttggaacaaagtgatggcagaatgcggtggtggtgggggtcttttgtactgttggattaataaaatgattttaaaatcccaga

SEQ ID NO: 308813 - DNA, 7611 bp, Homo sapiens
aagaggctccacgttgggcggggatggggcctgaaactgtctgggtctgagctggggagcggaagccacttgtccctctccctccccaggacttctgtgactcctgggccacagaggtccaaccaggctaagggcctggggataccccctgcctggcccccttgcccaaactggcaggggggccaggctgggcagcagcccctctttcacctcaactatggatctcctgccccccaagcccaagtacaatccactccggaatgagtctctgtcatcgctggaggaaggggcttctgggtccacccccccggaggagctgccttccccatcagcttcatccctggggcccatcctgcctcctctgcctggggacgatagtcccactaccctgtgctccttcttcccccggatgagcaacctgaggctggccaacccggctggggggcgcccagggtctaagggggagccaggaagggcagctgatgatggggaggggatcgtaggggcagccatgccagactcaggccccctacccctcctccaggacatgaacaagctgagtggaggcggcgggcgcaggactcgggtggaagggggccagcttgggggcgaggagtggacccgccacgggagctttgtcaataagcccacgcggggctggctgcatcccaacgacaaagtcatgggacccggggtttcctacttggttcggtacatgggttgtgtggaggtcctccagtcaatgcgtgccctggacttcaacacccggactcaggtcaccagggaggccatcagtctggtgtgtgaggctgtgccgggtgctaagggggcgacaaggaggagaaagccctgtagccgcccgctcagctctatcctggggaggagtaacctgaaatttgctggaatgccaatcactctcaccgtctccaccagcagcctcaacctcatggccgcagactgcaaacagatcatcgccaaccaccacatgcaatctatctcatttgcatccggcggggatccggacacagccgagtatgtcgcctatgttgccaaagaccctgtgaatcagagagcctgccacattctggagtgtcccgaagggcttgcccaggatgtcatcagcaccattggccaggccttcgagttgcgcttcaaacaatacctcaggaacccacccaaactggtcacccctcatgacaggatggctggctttgatggctcagcatgggatgaggaggaggaagagccacctgaccatcagtactataatgacttcccggggaaggaaccccccttggggggggtggtagacatgaggcttcgggaaggagccgctccaggggctgctcgacccactgcacccaatgcccagacccccagccacttgggagctacattgcctgtaggacagcctgttgggggagatccagaagtccgcaaacagatgccacctccaccaccctgtccagcaggcagagagctttttgatgatccctcctatgtcaacgtccagaacctagacaaggcccggcaagcagtgggtggtgctgggccccccaatcctgctatcaatggcagtgcaccccgggacctgtttgacatgaagcccttcgaagatgctcttcgcgtgcctccacctccccagtcggtgtccatggctgagcagctccgaggggagccctggttccatgggaagctgagccggcgggaggctgaggcactgctgcagctcaatggggacttcctggtacgggagagcacgaccacacctggccagtatgtgctcactggcttgcagagtgggcagcctaagcatttgctactggtggaccctgagggtgtgagatggggtttcgccatgttgcccaagctgttcttgaactcccgggctcaagtgatccgcctccctcggcctcccagagtgctgggattacaggcacggaccaccatgcccagcctccacatctttttttgcactgtgtatactcttctgagacatgccaacttcctccaggtcaagaaaggggtatatagctctcagcttcactctttcagggctgatgtcgcctttgccttttctcacttcactgacctgtctattcctacaactgtctctttctagagaagcctcaatgatcaggattgacaggccacactctcccccaccatttttttctcctccttcaagcctcttgtctgtttcaccctcttccaccttggaggctgaggtcttatttgactcttcacctgaattgaccttcttccttcccaccctcccaggttcggactaaggatcaccgctttgaaagtgtcagtcaccttatcagctaccacatggacaatcacttgcccatcatctctgcgggcagcgaactgtgtctacagcaacctgtggagcggaaactgtgatctgccctagcgctctcttccagaagatgccctccaatcctttccaccctattccctaactctcgggacctcgtttgggagtgttctgtgggcttggccttgtgtcagagctgggagtagcatggactctgggtttcatatccagctgagtgagagggtttgagtcaaaagcctgggtgagaatcctgcctctccccaaacattaatcaccaaagtattaatgtacagagtggcccctcacctgggcctttcctgtgccaacctgatgccccttccccaagaaggtgagtgcttgtcatggaaaatgtcctgtggtgacaggcccagtggaacagtcacccttctgggcaagggggaacaaatcacacctctgggcttcagggtatcccagacccctctcaacacccgccccccccatgtttaaactttgtgcctttgaccatctcttaggtctaatgatattttatgcaaacagttcttggacccctgaattcaatgacagggatgccaacaccttcttggcttctgggacctgtgttcttgctgagcaccctctccggtttgggttgggataacagaggcaggagtggcagctgtcccctctccctggggatatgcaacccttagagattgccccagagccccactcccggccaggcgggagatggacccctcccttgctcagtgcctcctggccggggcccctcaccccaaggggtctgtatatacatttcataaggcctgccctcccatgttgcatgcctatgtactctacgccaaagtgcagcccttcctcctgaagcctctgccctgcctccctttctgggagggcggggtgggggtgactgaatttgggcctcttgtacagttaactctcccaggtggattttgtggaggtgagaaaaggggcattgagactataaagcagtagacaatccccacataccatctgtagagttggaactgcattcttttaaagttttatatgcatatattttagggctgtagacttactttcctattttcttttccattgcttattcttgagcacaaaatgataatcaattattacatttatacatcacctttttgacttttccaagcccttttacagctcttggcattttcctcgcctaggcctgtgaggtaactgggatcgcaccttttataccagagacctgaggcagatgaaatttatttccatctaggactagaaaaacttgggtctcttaccgcgagactgagaggcagaagtcagcccgaatgcctgtcagtttcatggaggggaaacgcaaaacctgcagttcctgagtaccttctacaggcccggcccagcctaggcccggggtggccacaccacagcaagccggccccccctcttttggccttgtggataagggagagttgaccgttttcatcctggcctccttttgctgtttggatgtttccacgggtctcacttataccaaagggaaaactcttcattaaagtccgtatttcttctacctctgcctcttaacccttctgggaagcctattgtgtacgccgcgggccctcagcggcagacggggaggcgggaggtcgcggccgcccagggaagctgggggtctgcagagtttgggtgcggcagagtggggcgtttcgcgccaccgtccccatggggatgtcgtgtccgcagagggggctggctccgggtgggtcgaggcgggagccgggcctgcccggcgccccagcaccggcccccgggctacctgggcctcccgggtgcgccttcggctcgcgcgcgcccctccgcggcggctccaccgcccgggatggtacggtccggcagccgggccgcgcgctgccgcccctcggtgagctggtgtgggccgccgctagcggagacgaccctttccactcgcgtggtgccgtggtaagcctcgtccctcgcccgccgcctgttttcaggcgtagcgtctcgtccggtccttgctccccctccccgcagcgctcagtggtggtggccgcgacgagttccggttccggttgctgccgccgctggcgggcggcgagtctggagagagcgcgcagtttgcgcggcggctcggcgcttccctgtcgtcgcactttgtggttgctgcagctcgggggcctgggctgcccctgacaccccttctgggcgatggtgcagcccaagggcgcctccatcccccgccgctgccgctaacccgggtcccccactccatggccgcctcggcgccgcccccaccggacaagctggagggaggtggcggccccgcaccgccccctgcgccgcccagcaccgggaggaagcagggcaaggccggtctgcaaatgaagagtccagaaaagaagcgaaggaagtcaaatactcagggccctgcatactcacatctgacggagtttgcaccacccccaactcccatggtggatcacctggttgcatccaacccttttgaagatgacttcggagcccccaaagtgggggttgcagcccctccattccttggcagtcctgtgcccttcggaggcttccgtgtgcaggggggcatggcgggccaggtacccccaggctacagcactggaggtggagggggcccccagccactccgtcgacagccaccccccttccctcccaatcctatgggccctgctttcaacatgcccccccagggtcctggctacccacccccaggcaacatgaactttcccagccaacccttcaaccagcctctgggtcaaaactttagtcctcccagtgggcagatgatgccgggcccagtggggggatttggtcccatgatctcacccaccatgggacagcctcccagagcagagctgggcccaccttctctgtcccaacgatttgctcagccaggggctccttttggcccttctcctctccagagacctggtcaggggctccccagcctgccgcctaacacaagtccctttcctggtccggaccctggctttcctggccctggtggtgaggatggggggaagcccttgaatccacctgcttctactgcttttccccaggagccccactcaggctccccggctgctgctgttaatgggaaccagcccagtttccccccgaacagcagtgggcggggtgggggcactccagatgccaacagcttggcaccccctggcaaggcaggtgggggctccgggccccagcctcccccaggcttggtgtacccatgtggtgcctgtcggagtgaggtgaacgatgaccaggatgccattctgtgtgaggcctcctgccagaaatggttccaccgtgagtgcacaggcatgactgagagcgcctatgggctgctgaccactgaagcttctgccgtctgggcctgcgatctctgcctcaagaccaaggagatccagtctgtctacatccgtgagggcatggggcagctggtggctgctaacgatgggtgacgctggtgaagtggcccagggaagtgcacatgtctctccctgctcttccagggtgatttttttgatgtttggctcttggtccttgtttccactggctttccatccccatggggcagaaacagtggctcctgggagcagaaaaggaattgaggtgggcaggcagaagagcctggattgctcactgttttgggaaacttacatgttgagatctacagagatccaggaaaccaaagccctgctgagcagagccattttgtggctatttctggaggcccaggagtgtggctgcaagagaaaaggggctggaggaagatccggagggcaggggtgttccctctgctgatgatggatgcccctaacacctgtgcctaacacccctactgaaccccacagctccagccttagtttttggagtcaagtgttaaaggtttctggccagaggaattggggtcttgccatccctgcaatagcccttttatgggctctgggagacagctttagggaataaatggggattttcccctttttctacccactcctttgcttcctccaagacttacccaactccttccccctcagagaaccaaatagcctgaggaagcaggagagttcctggttatggcagtttcttggtgatttggggcttcaagacagtaggtgagagatgctgtcaggacgtatcttcttcataccaaagtcactggtcctttctcagcctctctcgtgcttttctcctaatgaccatatttttgccaaaaattgggatatgttatctgacagaccagaatatttgaagtttgggctgtcctgaaagtctggactttggtggtaccctcctcccccagcccatctgttgcacattatactccgtgtgttcttcaactttcggcgcccttattcccctgccttcctggcttgattgaaggaaagcttgaaaaggcgcagagccctatacctcatttcctccatgataaaaggatccaagtgaggccctgtcacagcctgtgggtaggggatgcggcgggatcctcattgccatggtactcaaaggtagaagagcctggagtttgttgcttctctttgctattctttcatatcctcttgggcctggtgattaattagcaattctcattcctctcagccaaaggcctgcactgggctttatttgtctttttttattttttaagcactgcctgccagagatgggcctggggcctgatgaggaccttagcgctgctcgttctccttttctgttcatgcacacattcctccatggggtggggaaggcaggcatggggtgtggccctcggagaagttaggagtcccccagctcaagatacagtggcaaagacctagtggtcccctacccccacttctctcagttcctggcatgaggagagaagaccctgctctggtggagctgacaacctttgaggctgggaggagagcagcctctgggcatcgttcccagtgtccctcacactaaaacggcgtagatggcaaccccccacccccaccccgctgctcaactcttgtgtttgttgttctgtttgccccatttatctgttgctgtttttgtgttgtcttcccctgctccgcattttgtaaaatggcccctgggggagtgtttttgctggatctgctccctctcgctctctcactccactactttttggaacaaagtgatggcagaatgcggtggtggtgggggtcttttgtactgttggattaataaaatgattttaaaatcccaga

SEQ ID NO: 308814 - DNA, 6692 bp, Homo sapiens
tgggctctcgggcctgtgttgtgaccgagctacgcgcgtagccaagtcgcatgcgcgctggactttagccatccgagttgcagcgcggcgggcgcaggactcgggtggaagggggccagcttgggggcgaggagtggacccgccacgggagctttgtcaataagcccacgcggggctggctgcatcccaacgacaaagtcatgggacccggggtttcctacttggttcggtacatgggttgtgtggaggtcctccagtcaatgcgtgccctggacttcaacacccggactcaggtcaccagggaggccatcagtctggtgtgtgaggctgtgccgggtgctaagggggcgacaaggaggagaaagccctgtagccgcccgctcagctctatcctggggaggagtaacctgaaatttgctggaatgccaatcactctcaccgtctccaccagcagcctcaacctcatggccgcagactgcaaacagatcatcgccaaccaccacatgcaatctatctcatttgcatccggcggggatccggacacagccgagtatgtcgcctatgttgccaaagaccctgtgaatcagagagcctgccacattctggagtgtcccgaagggcttgcccaggatgtcatcagcaccattggccaggccttcgagttgcgcttcaaacaatacctcaggaacccacccaaactggtcacccctcatgacaggatggctggctttgatggctcagcatgggatgaggaggaggaagagccacctgaccatcagtactataatgacttcccggggaaggaaccccccttggggggggtggtagacatgaggcttcgggaaggagccgctccaggggctgctcgacccactgcacccaatgcccagacccccagccacttgggagctacattgcctgtaggacagcctgttgggggagatccagaagtccgcaaacagatgccacctccaccaccctgtccagcaggcagagagctttttgatgatccctcctatgtcaacgtccagaacctagacaaggcccggcaagcagtgggtggtgctgggccccccaatcctgctatcaatggcagtgcaccccgggacctgtttgacatgaagcccttcgaagatgctcttcgcgtgcctccacctccccagtcggtgtccatggctgagcagctccgaggggagccctggttccatgggaagctgagccggcgggaggctgaggcactgctgcagctcaatggggacttcctggtacgggagagcacgaccacacctggccagtatgtgctcactggcttgcagagtgggcagcctaagcatttgctactggtggaccctgagggtgtggttcggactaaggatcaccgctttgaaagtgtcagtcaccttatcagctaccacatggacaatcacttgcccatcatctctgcgggcagcgaactgtgtctacagcaacctgtggagcggaaactgtgatctgccctagcgctctcttccagaagatgccctccaatcctttccaccctattccctaactctcgggacctcgtttgggagtgttctgtgggcttggccttgtgtcagagctgggagtagcatggactctgggtttcatatccagctgagtgagagggtttgagtcaaaagcctgggtgagaatcctgcctctccccaaacattaatcaccaaagtattaatgtacagagtggcccctcacctgggcctttcctgtgccaacctgatgccccttccccaagaaggtgagtgcttgtcatggaaaatgtcctgtggtgacaggcccagtggaacagtcacccttctgggcaagggggaacaaatcacacctctgggcttcagggtatcccagacccctctcaacacccgccccccccatgtttaaactttgtgcctttgaccatctcttaggtctaatgatattttatgcaaacagttcttggacccctgaattcaatgacagggatgccaacaccttcttggcttctgggacctgtgttcttgctgagcaccctctccggtttgggttgggataacagaggcaggagtggcagctgtcccctctccctggggatatgcaacccttagagattgccccagagccccactcccggccaggcgggagatggacccctcccttgctcagtgcctcctggccggggcccctcaccccaaggggtctgtatatacatttcataaggcctgccctcccatgttgcatgcctatgtactctacgccaaagtgcagcccttcctcctgaagcctctgccctgcctccctttctgggagggcggggtgggggtgactgaatttgggcctcttgtacagttaactctcccaggtggattttgtggaggtgagaaaaggggcattgagactataaagcagtagacaatccccacataccatctgtagagttggaactgcattcttttaaagttttatatgcatatattttagggctgtagacttactttcctattttcttttccattgcttattcttgagcacaaaatgataatcaattattacatttatacatcacctttttgacttttccaagcccttttacagctcttggcattttcctcgcctaggcctgtgaggtaactgggatcgcaccttttataccagagacctgaggcagatgaaatttatttccatctaggactagaaaaacttgggtctcttaccgcgagactgagaggcagaagtcagcccgaatgcctgtcagtttcatggaggggaaacgcaaaacctgcagttcctgagtaccttctacaggcccggcccagcctaggcccggggtggccacaccacagcaagccggccccccctcttttggccttgtggataagggagagttgaccgttttcatcctggcctccttttgctgtttggatgtttccacgggtctcacttataccaaagggaaaactcttcattaaagtccgtatttcttctacctctgcctcttaacccttctgggaagcctattgtgtacgccgcgggccctcagcggcagacggggaggcgggaggtcgcggccgcccagggaagctgggggtctgcagagtttgggtgcggcagagtggggcgtttcgcgccaccgtccccatggggatgtcgtgtccgcagagggggctggctccgggtgggtcgaggcgggagccgggcctgcccggcgccccagcaccggcccccgggctacctgggcctcccgggtgcgccttcggctcgcgcgcgcccctccgcggcggctccaccgcccgggatggtacggtccggcagccgggccgcgcgctgccgcccctcggtgagctggtgtgggccgccgctagcggagacgaccctttccactcgcgtggtgccgtggtaagcctcgtccctcgcccgccgcctgttttcaggcgtagcgtctcgtccggtccttgctccccctccccgcagcgctcagtggtggtggccgcgacgagttccggttccggttgctgccgccgctggcgggcggcgagtctggagagagcgcgcagtttgcgcggcggctcggcgcttccctgtcgtcgcactttgtggttgctgcagctcgggggcctgggctgcccctgacaccccttctgggcgatggtgcagcccaagggcgcctccatcccccgccgctgccgctaacccgggtcccccactccatggccgcctcggcgccgcccccaccggacaagctggagggaggtggcggccccgcaccgccccctgcgccgcccagcaccgggaggaagcagggcaaggccggtctgcaaatgaagagtccagaaaagaagcgaaggaagtcaaatactcagggccctgcatactcacatctgacggagtttgcaccacccccaactcccatggtggatcacctggttgcatccaacccttttgaagatgacttcggagcccccaaagtgggggttgcagcccctccattccttggcagtcctgtgcccttcggaggcttccgtgtgcaggggggcatggcgggccaggtacccccaggctacagcactggaggtggagggggcccccagccactccgtcgacagccaccccccttccctcccaatcctatgggccctgctttcaacatgcccccccagggtcctggctacccacccccaggcaacatgaactttcccagccaacccttcaaccagcctctgggtcaaaactttagtcctcccagtgggcagatgatgccgggcccagtggggggatttggtcccatgatctcacccaccatgggacagcctcccagagcagagctgggcccaccttctctgtcccaacgatttgctcagccaggggctccttttggcccttctcctctccagagacctggtcaggggctccccagcctgccgcctaacacaagtccctttcctggtccggaccctggctttcctggccctggtggtgaggatggggggaagcccttgaatccacctgcttctactgcttttccccaggagccccactcaggctccccggctgctgctgttaatgggaaccagcccagtttccccccgaacagcagtgggcggggtgggggcactccagatgccaacagcttggcaccccctggcaaggcaggtgggggctccgggccccagcctcccccaggcttggtgtacccatgtggtgcctgtcggagtgaggtgaacgatgaccaggatgccattctgtgtgaggcctcctgccagaaatggttccaccgtgagtgcacaggcatgactgagagcgcctatgggctgctgaccactgaagcttctgccgtctgggcctgcgatctctgcctcaagaccaaggagatccagtctgtctacatccgtgagggcatggggcagctggtggctgctaacgatgggtgacgctggtgaagtggcccagggaagtgcacatgtctctccctgctcttccagggtgatttttttgatgtttggctcttggtccttgtttccactggctttccatccccatggggcagaaacagtggctcctgggagcagaaaaggaattgaggtgggcaggcagaagagcctggattgctcactgttttgggaaacttacatgttgagatctacagagatccaggaaaccaaagccctgctgagcagagccattttgtggctatttctggaggcccaggagtgtggctgcaagagaaaaggggctggaggaagatccggagggcaggggtgttccctctgctgatgatggatgcccctaacacctgtgcctaacacccctactgaaccccacagctccagccttagtttttggagtcaagtgttaaaggtttctggccagaggaattggggtcttgccatccctgcaatagcccttttatgggctctgggagacagctttagggaataaatggggattttcccctttttctacccactcctttgcttcctccaagacttacccaactccttccccctcagagaaccaaatagcctgaggaagcaggagagttcctggttatggcagtttcttggtgatttggggcttcaagacagtaggtgagagatgctgtcaggacgtatcttcttcataccaaagtcactggtcctttctcagcctctctcgtgcttttctcctaatgaccatatttttgccaaaaattgggatatgttatctgacagaccagaatatttgaagtttgggctgtcctgaaagtctggactttggtggtaccctcctcccccagcccatctgttgcacattatactccgtgtgttcttcaactttcggcgcccttattcccctgccttcctggcttgattgaaggaaagcttgaaaaggcgcagagccctatacctcatttcctccatgataaaaggatccaagtgaggccctgtcacagcctgtgggtaggggatgcggcgggatcctcattgccatggtactcaaaggtagaagagcctggagtttgttgcttctctttgctattctttcatatcctcttgggcctggtgattaattagcaattctcattcctctcagccaaaggcctgcactgggctttatttgtctttttttattttttaagcactgcctgccagagatgggcctggggcctgatgaggaccttagcgctgctcgttctccttttctgttcatgcacacattcctccatggggtggggaaggcaggcatggggtgtggccctcggagaagttaggagtcccccagctcaagatacagtggcaaagacctagtggtcccctacccccacttctctcagttcctggcatgaggagagaagaccctgctctggtggagctgacaacctttgaggctgggaggagagcagcctctgggcatcgttcccagtgtccctcacactaaaacggcgtagatggcaaccccccacccccaccccgctgctcaactcttgtgtttgttgttctgtttgccccatttatctgttgctgtttttgtgttgtcttcccctgctccgcattttgtaaaatggcccctgggggagtgtttttgctggatctgctccctctcgctctctcactccactactttttggaacaaagtgatggcagaatgcggtggtggtgggggtcttttgtactgttggattaataaaatgattttaaaatcccaga

SEQ ID NO: 308815 - DNA, 7154 bp, Homo sapiens
aagaggctccacgttgggcggggatggggcctgaaactgtctgggtctgagctggggagcggaagccacttgtccctctccctccccaggacttctgtgactcctgggccacagaggtccaaccaggctaagggcctggggataccccctgcctggcccccttgcccaaactggcaggggggccaggctgggcagcagcccctctttcacctcaactatggatctcctgccccccaagcccaagtacaatccactccggaatgagtctctgtcatcgctggaggaaggggcttctgggtccacccccccggaggagctgccttccccatcagcttcatccctggggcccatcctgcctcctctgcctggggacgatagtcccactaccctgtgctccttcttcccccggatgagcaacctgaggctggccaacccggctggggggcgcccagggtctaagggggagccaggaagggcagctgatgatggggaggggatcgtaggggcagccatgccagactcaggccccctacccctcctccaggacatgaacaagctgagtggaggcggcgggcgcaggactcgggtggaagggggccagcttgggggcgaggagtggacccgccacgggagctttgtcaataagcccacgcggggctggctgcatcccaacgacaaagtcatgggacccggggtttcctacttggttcggtacatgggttgtgtggaggtcctccagtcaatgcgtgccctggacttcaacacccggactcaggtcaccagggaggccatcagtctggtgtgtgaggctgtgccgggtgctaagggggcgacaaggaggagaaagccctgtagccgcccgctcagctctatcctggggaggagtaacctgaaatttgctggaatgccaatcactctcaccgtctccaccagcagcctcaacctcatggccgcagactgcaaacagatcatcgccaaccaccacatgcaatctatctcatttgcatccggcggggatccggacacagccgagtatgtcgcctatgttgccaaagaccctgtgaatcagagagcctgccacattctggagtgtcccgaagggcttgcccaggatgtcatcagcaccattggccaggccttcgagttgcgcttcaaacaatacctcaggaacccacccaaactggtcacccctcatgacaggatggctggctttgatggctcagcatgggatgaggaggaggaagagccacctgaccatcagtactataatgacttcccggggaaggaaccccccttggggggggtggtagacatgaggcttcgggaaggagccgctccaggggctgctcgacccactgcacccaatgcccagacccccagccacttgggagctacattgcctgtaggacagcctgttgggggagatccagaagtccgcaaacagatgccacctccaccaccctgtccagcaggcagagagctttttgatgatccctcctatgtcaacgtccagaacctagacaaggcccggcaagcagtgggtggtgctgggccccccaatcctgctatcaatggcagtgcaccccgggacctgtttgacatgaagcccttcgaagatgctcttcgcgtgcctccacctccccagtcggtgtccatggctgagcagctccgaggggagccctggttccatgggaagctgagccggcgggaggctgaggcactgctgcagctcaatggggacttcctggtacgggagagcacgaccacacctggccagtatgtgctcactggcttgcagagtgggcagcctaagcatttgctactggtggaccctgagggtgtggttcggactaaggatcaccgctttgaaagtgtcagtcaccttatcagctaccacatggacaatcacttgcccatcatctctgcgggcagcgaactgtgtctacagcaacctgtggagcggaaactgtgatctgccctagcgctctcttccagaagatgccctccaatcctttccaccctattccctaactctcgggacctcgtttgggagtgttctgtgggcttggccttgtgtcagagctgggagtagcatggactctgggtttcatatccagctgagtgagagggtttgagtcaaaagcctgggtgagaatcctgcctctccccaaacattaatcaccaaagtattaatgtacagagtggcccctcacctgggcctttcctgtgccaacctgatgccccttccccaagaaggtgagtgcttgtcatggaaaatgtcctgtggtgacaggcccagtggaacagtcacccttctgggcaagggggaacaaatcacacctctgggcttcagggtatcccagacccctctcaacacccgccccccccatgtttaaactttgtgcctttgaccatctcttaggtctaatgatattttatgcaaacagttcttggacccctgaattcaatgacagggatgccaacaccttcttggcttctgggacctgtgttcttgctgagcaccctctccggtttgggttgggataacagaggcaggagtggcagctgtcccctctccctggggatatgcaacccttagagattgccccagagccccactcccggccaggcgggagatggacccctcccttgctcagtgcctcctggccggggcccctcaccccaaggggtctgtatatacatttcataaggcctgccctcccatgttgcatgcctatgtactctacgccaaagtgcagcccttcctcctgaagcctctgccctgcctccctttctgggagggcggggtgggggtgactgaatttgggcctcttgtacagttaactctcccaggtggattttgtggaggtgagaaaaggggcattgagactataaagcagtagacaatccccacataccatctgtagagttggaactgcattcttttaaagttttatatgcatatattttagggctgtagacttactttcctattttcttttccattgcttattcttgagcacaaaatgataatcaattattacatttatacatcacctttttgacttttccaagcccttttacagctcttggcattttcctcgcctaggcctgtgaggtaactgggatcgcaccttttataccagagacctgaggcagatgaaatttatttccatctaggactagaaaaacttgggtctcttaccgcgagactgagaggcagaagtcagcccgaatgcctgtcagtttcatggaggggaaacgcaaaacctgcagttcctgagtaccttctacaggcccggcccagcctaggcccggggtggccacaccacagcaagccggccccccctcttttggccttgtggataagggagagttgaccgttttcatcctggcctccttttgctgtttggatgtttccacgggtctcacttataccaaagggaaaactcttcattaaagtccgtatttcttctacctctgcctcttaacccttctgggaagcctattgtgtacgccgcgggccctcagcggcagacggggaggcgggaggtcgcggccgcccagggaagctgggggtctgcagagtttgggtgcggcagagtggggcgtttcgcgccaccgtccccatggggatgtcgtgtccgcagagggggctggctccgggtgggtcgaggcgggagccgggcctgcccggcgccccagcaccggcccccgggctacctgggcctcccgggtgcgccttcggctcgcgcgcgcccctccgcggcggctccaccgcccgggatggtacggtccggcagccgggccgcgcgctgccgcccctcggtgagctggtgtgggccgccgctagcggagacgaccctttccactcgcgtggtgccgtggtaagcctcgtccctcgcccgccgcctgttttcaggcgtagcgtctcgtccggtccttgctccccctccccgcagcgctcagtggtggtggccgcgacgagttccggttccggttgctgccgccgctggcgggcggcgagtctggagagagcgcgcagtttgcgcggcggctcggcgcttccctgtcgtcgcactttgtggttgctgcagctcgggggcctgggctgcccctgacaccccttctgggcgatggtgcagcccaagggcgcctccatcccccgccgctgccgctaacccgggtcccccactccatggccgcctcggcgccgcccccaccggacaagctggagggaggtggcggccccgcaccgccccctgcgccgcccagcaccgggaggaagcagggcaaggccggtctgcaaatgaagagtccagaaaagaagcgaaggaagtcaaatactcagggccctgcatactcacatctgacggagtttgcaccacccccaactcccatggtggatcacctggttgcatccaacccttttgaagatgacttcggagcccccaaagtgggggttgcagcccctccattccttggcagtcctgtgcccttcggaggcttccgtgtgcaggggggcatggcgggccaggtacccccaggctacagcactggaggtggagggggcccccagccactccgtcgacagccaccccccttccctcccaatcctatgggccctgctttcaacatgcccccccagggtcctggctacccacccccaggcaacatgaactttcccagccaacccttcaaccagcctctgggtcaaaactttagtcctcccagtgggcagatgatgccgggcccagtggggggatttggtcccatgatctcacccaccatgggacagcctcccagagcagagctgggcccaccttctctgtcccaacgatttgctcagccaggggctccttttggcccttctcctctccagagacctggtcaggggctccccagcctgccgcctaacacaagtccctttcctggtccggaccctggctttcctggccctggtggtgaggatggggggaagcccttgaatccacctgcttctactgcttttccccaggagccccactcaggctccccggctgctgctgttaatgggaaccagcccagtttccccccgaacagcagtgggcggggtgggggcactccagatgccaacagcttggcaccccctggcaaggcaggtgggggctccgggccccagcctcccccaggcttggtgtacccatgtggtgcctgtcggagtgaggtgaacgatgaccaggatgccattctgtgtgaggcctcctgccagaaatggttccaccgtgagtgcacaggcatgactgagagcgcctatgggctgctgaccactgaagcttctgccgtctgggcctgcgatctctgcctcaagaccaaggagatccagtctgtctacatccgtgagggcatggggcagctggtggctgctaacgatgggtgacgctggtgaagtggcccagggaagtgcacatgtctctccctgctcttccagggtgatttttttgatgtttggctcttggtccttgtttccactggctttccatccccatggggcagaaacagtggctcctgggagcagaaaaggaattgaggtgggcaggcagaagagcctggattgctcactgttttgggaaacttacatgttgagatctacagagatccaggaaaccaaagccctgctgagcagagccattttgtggctatttctggaggcccaggagtgtggctgcaagagaaaaggggctggaggaagatccggagggcaggggtgttccctctgctgatgatggatgcccctaacacctgtgcctaacacccctactgaaccccacagctccagccttagtttttggagtcaagtgttaaaggtttctggccagaggaattggggtcttgccatccctgcaatagcccttttatgggctctgggagacagctttagggaataaatggggattttcccctttttctacccactcctttgcttcctccaagacttacccaactccttccccctcagagaaccaaatagcctgaggaagcaggagagttcctggttatggcagtttcttggtgatttggggcttcaagacagtaggtgagagatgctgtcaggacgtatcttcttcataccaaagtcactggtcctttctcagcctctctcgtgcttttctcctaatgaccatatttttgccaaaaattgggatatgttatctgacagaccagaatatttgaagtttgggctgtcctgaaagtctggactttggtggtaccctcctcccccagcccatctgttgcacattatactccgtgtgttcttcaactttcggcgcccttattcccctgccttcctggcttgattgaaggaaagcttgaaaaggcgcagagccctatacctcatttcctccatgataaaaggatccaagtgaggccctgtcacagcctgtgggtaggggatgcggcgggatcctcattgccatggtactcaaaggtagaagagcctggagtttgttgcttctctttgctattctttcatatcctcttgggcctggtgattaattagcaattctcattcctctcagccaaaggcctgcactgggctttatttgtctttttttattttttaagcactgcctgccagagatgggcctggggcctgatgaggaccttagcgctgctcgttctccttttctgttcatgcacacattcctccatggggtgtggccctcggagaagttaggagtcccccagctcaagatacagtggcaaagacctagtggtcccctacccccacttctctcagttcctggcatgaggagagaagaccctgctctggtggagctgacaacctttgaggctgggaggagagcagcctctgggcatcgttcccagtgtccctcacactaaaacggcgtagatggcaaccccccacccccaccccgctgctcaactcttgtgtttgttgttctgtttgccccatttatctgttgctgtttttgtgttgtcttcccctgctccgcattttgtaaaatggcccctgggggagtgtttttgctggatctgctccctctcgctctctcactccactactttttggaacaaagtgatggcagaatgcggtggtggtgggggtcttttgtactgttggattaataaaatgattttaaaatcccaga

SEQ ID NO: 308816 - DNA, 6575 bp, Homo sapiens
aagaggctccacgttgggcggggatggggcctgaaactgtctgggtctgagctggggagcggaagccacttgtccctctccctccccaggacttctgtgactcctgggccacagaggtccaaccaggctaagggcctggggataccccctgcctggcccccttgcccaaactggcaggggggccaggctgggcagcagcccctctttcacctcaactatggatctcctgccccccaagcccaagtacaatccactccggaatgagtctctgtcatcgctggaggagtaacctgaaatttgctggaatgccaatcactctcaccgtctccaccagcagcctcaacctcatggccgcagactgcaaacagatcatcgccaaccaccacatgcaatctatctcatttgcatccggcggggatccggacacagccgagtatgtcgcctatgttgccaaagaccctgtgaatcagagagcctgccacattctggagtgtcccgaagggcttgcccaggatgtcatcagcaccattggccaggccttcgagttgcgcttcaaacaatacctcaggaacccacccaaactggtcacccctcatgacaggatggctggctttgatggctcagcatgggatgaggaggaggaagagccacctgaccatcagtactataatgacttcccggggaaggaaccccccttggggggggtggtagacatgaggcttcgggaaggagccgctccaggggctgctcgacccactgcacccaatgcccagacccccagccacttgggagctacattgcctgtaggacagcctgttgggggagatccagaagtccgcaaacagatgccacctccaccaccctgtccagcaggcagagagctttttgatgatccctcctatgtcaacgtccagaacctagacaaggcccggcaagcagtgggtggtgctgggccccccaatcctgctatcaatggcagtgcaccccgggacctgtttgacatgaagcccttcgaagatgctcttcgcgtgcctccacctccccagtcggtgtccatggctgagcagctccgaggggagccctggttccatgggaagctgagccggcgggaggctgaggcactgctgcagctcaatggggacttcctggtacgggagagcacgaccacacctggccagtatgtgctcactggcttgcagagtgggcagcctaagcatttgctactggtggaccctgagggtgtggttcggactaaggatcaccgctttgaaagtgtcagtcaccttatcagctaccacatggacaatcacttgcccatcatctctgcgggcagcgaactgtgtctacagcaacctgtggagcggaaactgtgatctgccctagcgctctcttccagaagatgccctccaatcctttccaccctattccctaactctcgggacctcgtttgggagtgttctgtgggcttggccttgtgtcagagctgggagtagcatggactctgggtttcatatccagctgagtgagagggtttgagtcaaaagcctgggtgagaatcctgcctctccccaaacattaatcaccaaagtattaatgtacagagtggcccctcacctgggcctttcctgtgccaacctgatgccccttccccaagaaggtgagtgcttgtcatggaaaatgtcctgtggtgacaggcccagtggaacagtcacccttctgggcaagggggaacaaatcacacctctgggcttcagggtatcccagacccctctcaacacccgccccccccatgtttaaactttgtgcctttgaccatctcttaggtctaatgatattttatgcaaacagttcttggacccctgaattcaatgacagggatgccaacaccttcttggcttctgggacctgtgttcttgctgagcaccctctccggtttgggttgggataacagaggcaggagtggcagctgtcccctctccctggggatatgcaacccttagagattgccccagagccccactcccggccaggcgggagatggacccctcccttgctcagtgcctcctggccggggcccctcaccccaaggggtctgtatatacatttcataaggcctgccctcccatgttgcatgcctatgtactctacgccaaagtgcagcccttcctcctgaagcctctgccctgcctccctttctgggagggcggggtgggggtgactgaatttgggcctcttgtacagttaactctcccaggtggattttgtggaggtgagaaaaggggcattgagactataaagcagtagacaatccccacataccatctgtagagttggaactgcattcttttaaagttttatatgcatatattttagggctgtagacttactttcctattttcttttccattgcttattcttgagcacaaaatgataatcaattattacatttatacatcacctttttgacttttccaagcccttttacagctcttggcattttcctcgcctaggcctgtgaggtaactgggatcgcaccttttataccagagacctgaggcagatgaaatttatttccatctaggactagaaaaacttgggtctcttaccgcgagactgagaggcagaagtcagcccgaatgcctgtcagtttcatggaggggaaacgcaaaacctgcagttcctgagtaccttctacaggcccggcccagcctaggcccggggtggccacaccacagcaagccggccccccctcttttggccttgtggataagggagagttgaccgttttcatcctggcctccttttgctgtttggatgtttccacgggtctcacttataccaaagggaaaactcttcattaaagtccgtatttcttctacctctgcctcttaacccttctgggaagcctattgtgtacgccgcgggccctcagcggcagacggggaggcgggaggtcgcggccgcccagggaagctgggggtctgcagagtttgggtgcggcagagtggggcgtttcgcgccaccgtccccatggggatgtcgtgtccgcagagggggctggctccgggtgggtcgaggcgggagccgggcctgcccggcgccccagcaccggcccccgggctacctgggcctcccgggtgcgccttcggctcgcgcgcgcccctccgcggcggctccaccgcccgggatggtacggtccggcagccgggccgcgcgctgccgcccctcggtgagctggtgtgggccgccgctagcggagacgaccctttccactcgcgtggtgccgtggtaagcctcgtccctcgcccgccgcctgttttcaggcgtagcgtctcgtccggtccttgctccccctccccgcagcgctcagtggtggtggccgcgacgagttccggttccggttgctgccgccgctggcgggcggcgagtctggagagagcgcgcagtttgcgcggcggctcggcgcttccctgtcgtcgcactttgtggttgctgcagctcgggggcctgggctgcccctgacaccccttctgggcgatggtgcagcccaagggcgcctccatcccccgccgctgccgctaacccgggtcccccactccatggccgcctcggcgccgcccccaccggacaagctggagggaggtggcggccccgcaccgccccctgcgccgcccagcaccgggaggaagcagggcaaggccggtctgcaaatgaagagtccagaaaagaagcgaaggaagtcaaatactcagggccctgcatactcacatctgacggagtttgcaccacccccaactcccatggtggatcacctggttgcatccaacccttttgaagatgacttcggagcccccaaagtgggggttgcagcccctccattccttggcagtcctgtgcccttcggaggcttccgtgtgcaggggggcatggcgggccaggtacccccaggctacagcactggaggtggagggggcccccagccactccgtcgacagccaccccccttccctcccaatcctatgggccctgctttcaacatgcccccccagggtcctggctacccacccccaggcaacatgaactttcccagccaacccttcaaccagcctctgggtcaaaactttagtcctcccagtgggcagatgatgccgggcccagtggggggatttggtcccatgatctcacccaccatgggacagcctcccagagcagagctgggcccaccttctctgtcccaacgatttgctcagccaggggctccttttggcccttctcctctccagagacctggtcaggggctccccagcctgccgcctaacacaagtccctttcctggtccggaccctggctttcctggccctggtggtgaggatggggggaagcccttgaatccacctgcttctactgcttttccccaggagccccactcaggctccccggctgctgctgttaatgggaaccagcccagtttccccccgaacagcagtgggcggggtgggggcactccagatgccaacagcttggcaccccctggcaaggcaggtgggggctccgggccccagcctcccccaggcttggtgtacccatgtggtgcctgtcggagtgaggtgaacgatgaccaggatgccattctgtgtgaggcctcctgccagaaatggttccaccgtgagtgcacaggcatgactgagagcgcctatgggctgctgaccactgaagcttctgccgtctgggcctgcgatctctgcctcaagaccaaggagatccagtctgtctacatccgtgagggcatggggcagctggtggctgctaacgatgggtgacgctggtgaagtggcccagggaagtgcacatgtctctccctgctcttccagggtgatttttttgatgtttggctcttggtccttgtttccactggctttccatccccatggggcagaaacagtggctcctgggagcagaaaaggaattgaggtgggcaggcagaagagcctggattgctcactgttttgggaaacttacatgttgagatctacagagatccaggaaaccaaagccctgctgagcagagccattttgtggctatttctggaggcccaggagtgtggctgcaagagaaaaggggctggaggaagatccggagggcaggggtgttccctctgctgatgatggatgcccctaacacctgtgcctaacacccctactgaaccccacagctccagccttagtttttggagtcaagtgttaaaggtttctggccagaggaattggggtcttgccatccctgcaatagcccttttatgggctctgggagacagctttagggaataaatggggattttcccctttttctacccactcctttgcttcctccaagacttacccaactccttccccctcagagaaccaaatagcctgaggaagcaggagagttcctggttatggcagtttcttggtgatttggggcttcaagacagtaggtgagagatgctgtcaggacgtatcttcttcataccaaagtcactggtcctttctcagcctctctcgtgcttttctcctaatgaccatatttttgccaaaaattgggatatgttatctgacagaccagaatatttgaagtttgggctgtcctgaaagtctggactttggtggtaccctcctcccccagcccatctgttgcacattatactccgtgtgttcttcaactttcggcgcccttattcccctgccttcctggcttgattgaaggaaagcttgaaaaggcgcagagccctatacctcatttcctccatgataaaaggatccaagtgaggccctgtcacagcctgtgggtaggggatgcggcgggatcctcattgccatggtactcaaaggtagaagagcctggagtttgttgcttctctttgctattctttcatatcctcttgggcctggtgattaattagcaattctcattcctctcagccaaaggcctgcactgggctttatttgtctttttttattttttaagcactgcctgccagagatgggcctggggcctgatgaggaccttagcgctgctcgttctccttttctgttcatgcacacattcctccatggggtggggaaggcaggcatggggtgtggccctcggagaagttaggagtcccccagctcaagatacagtggcaaagacctagtggtcccctacccccacttctctcagttcctggcatgaggagagaagaccctgctctggtggagctgacaacctttgaggctgggaggagagcagcctctgggcatcgttcccagtgtccctcacactaaaacggcgtagatggcaaccccccacccccaccccgctgctcaactcttgtgtttgttgttctgtttgccccatttatctgttgctgtttttgtgttgtcttcccctgctccgcattttgtaaaatggcccctgggggagtgtttttgctggatctgctccctctcgctctctcactccactactttttggaacaaagtgatggcagaatgcggtggtggtgggggtcttttgtactgttggattaataaaatgattttaaaatcccaga

SEQ ID NO: 308817 - DNA, 6468 bp, Homo sapiens
cagccttttacccttctctggctttcccctctccccactgtcctcacagatcacagcctcaaactgaaggtgtctggcttcataactagcaccacctccaatctctgcctgtggaaagtcccctgccatctttcgaggtccagctcaaacgcgacctcctctggcaggccttctttgatgtccagcccacgtctttcttttcttccgaacgcccacacccgttggtccttccctggctctggatactgtaggctcccacagatcatcgccaaccaccacatgcaatctatctcatttgcatccggcggggatccggacacagccgagtatgtcgcctatgttgccaaagaccctgtgaatcagagagcctgccacattctggagtgtcccgaagggcttgcccaggatgtcatcagcaccattggccaggccttcgagttgcgcttcaaacaatacctcaggaacccacccaaactggtcacccctcatgacaggatggctggctttgatggctcagcatgggatgaggaggaggaagagccacctgaccatcagtactataatgacttcccggggaaggaaccccccttggggggggtggtagacatgaggcttcgggaaggagccgctccaggggctgctcgacccactgcacccaatgcccagacccccagccacttgggagctacattgcctgtaggacagcctgttgggggagatccagaagtccgcaaacagatgccacctccaccaccctgtccagcaggcagagagctttttgatgatccctcctatgtcaacgtccagaacctagacaaggcccggcaagcagtgggtggtgctgggccccccaatcctgctatcaatggcagtgcaccccgggacctgtttgacatgaagcccttcgaagatgctcttcgcgtgcctccacctccccagtcggtgtccatggctgagcagctccgaggggagccctggttccatgggaagctgagccggcgggaggctgaggcactgctgcagctcaatggggacttcctggtacgggagagcacgaccacacctggccagtatgtgctcactggcttgcagagtgggcagcctaagcatttgctactggtggaccctgagggtgtggttcggactaaggatcaccgctttgaaagtgtcagtcaccttatcagctaccacatggacaatcacttgcccatcatctctgcgggcagcgaactgtgtctacagcaacctgtggagcggaaactgtgatctgccctagcgctctcttccagaagatgccctccaatcctttccaccctattccctaactctcgggacctcgtttgggagtgttctgtgggcttggccttgtgtcagagctgggagtagcatggactctgggtttcatatccagctgagtgagagggtttgagtcaaaagcctgggtgagaatcctgcctctccccaaacattaatcaccaaagtattaatgtacagagtggcccctcacctgggcctttcctgtgccaacctgatgccccttccccaagaaggtgagtgcttgtcatggaaaatgtcctgtggtgacaggcccagtggaacagtcacccttctgggcaagggggaacaaatcacacctctgggcttcagggtatcccagacccctctcaacacccgccccccccatgtttaaactttgtgcctttgaccatctcttaggtctaatgatattttatgcaaacagttcttggacccctgaattcaatgacagggatgccaacaccttcttggcttctgggacctgtgttcttgctgagcaccctctccggtttgggttgggataacagaggcaggagtggcagctgtcccctctccctggggatatgcaacccttagagattgccccagagccccactcccggccaggcgggagatggacccctcccttgctcagtgcctcctggccggggcccctcaccccaaggggtctgtatatacatttcataaggcctgccctcccatgttgcatgcctatgtactctacgccaaagtgcagcccttcctcctgaagcctctgccctgcctccctttctgggagggcggggtgggggtgactgaatttgggcctcttgtacagttaactctcccaggtggattttgtggaggtgagaaaaggggcattgagactataaagcagtagacaatccccacataccatctgtagagttggaactgcattcttttaaagttttatatgcatatattttagggctgtagacttactttcctattttcttttccattgcttattcttgagcacaaaatgataatcaattattacatttatacatcacctttttgacttttccaagcccttttacagctcttggcattttcctcgcctaggcctgtgaggtaactgggatcgcaccttttataccagagacctgaggcagatgaaatttatttccatctaggactagaaaaacttgggtctcttaccgcgagactgagaggcagaagtcagcccgaatgcctgtcagtttcatggaggggaaacgcaaaacctgcagttcctgagtaccttctacaggcccggcccagcctaggcccggggtggccacaccacagcaagccggccccccctcttttggccttgtggataagggagagttgaccgttttcatcctggcctccttttgctgtttggatgtttccacgggtctcacttataccaaagggaaaactcttcattaaagtccgtatttcttctacctctgcctcttaacccttctgggaagcctattgtgtacgccgcgggccctcagcggcagacggggaggcgggaggtcgcggccgcccagggaagctgggggtctgcagagtttgggtgcggcagagtggggcgtttcgcgccaccgtccccatggggatgtcgtgtccgcagagggggctggctccgggtgggtcgaggcgggagccgggcctgcccggcgccccagcaccggcccccgggctacctgggcctcccgggtgcgccttcggctcgcgcgcgcccctccgcggcggctccaccgcccgggatggtacggtccggcagccgggccgcgcgctgccgcccctcggtgagctggtgtgggccgccgctagcggagacgaccctttccactcgcgtggtgccgtggtaagcctcgtccctcgcccgccgcctgttttcaggcgtagcgtctcgtccggtccttgctccccctccccgcagcgctcagtggtggtggccgcgacgagttccggttccggttgctgccgccgctggcgggcggcgagtctggagagagcgcgcagtttgcgcggcggctcggcgcttccctgtcgtcgcactttgtggttgctgcagctcgggggcctgggctgcccctgacaccccttctgggcgatggtgcagcccaagggcgcctccatcccccgccgctgccgctaacccgggtcccccactccatggccgcctcggcgccgcccccaccggacaagctggagggaggtggcggccccgcaccgccccctgcgccgcccagcaccgggaggaagcagggcaaggccggtctgcaaatgaagagtccagaaaagaagcgaaggaagtcaaatactcagggccctgcatactcacatctgacggagtttgcaccacccccaactcccatggtggatcacctggttgcatccaacccttttgaagatgacttcggagcccccaaagtgggggttgcagcccctccattccttggcagtcctgtgcccttcggaggcttccgtgtgcaggggggcatggcgggccaggtacccccaggctacagcactggaggtggagggggcccccagccactccgtcgacagccaccccccttccctcccaatcctatgggccctgctttcaacatgcccccccagggtcctggctacccacccccaggcaacatgaactttcccagccaacccttcaaccagcctctgggtcaaaactttagtcctcccagtgggcagatgatgccgggcccagtggggggatttggtcccatgatctcacccaccatgggacagcctcccagagcagagctgggcccaccttctctgtcccaacgatttgctcagccaggggctccttttggcccttctcctctccagagacctggtcaggggctccccagcctgccgcctaacacaagtccctttcctggtccggaccctggctttcctggccctggtggtgaggatggggggaagcccttgaatccacctgcttctactgcttttccccaggagccccactcaggctccccggctgctgctgttaatgggaaccagcccagtttccccccgaacagcagtgggcggggtgggggcactccagatgccaacagcttggcaccccctggcaaggcaggtgggggctccgggccccagcctcccccaggcttggtgtacccatgtggtgcctgtcggagtgaggtgaacgatgaccaggatgccattctgtgtgaggcctcctgccagaaatggttccaccgtgagtgcacaggcatgactgagagcgcctatgggctgctgaccactgaagcttctgccgtctgggcctgcgatctctgcctcaagaccaaggagatccagtctgtctacatccgtgagggcatggggcagctggtggctgctaacgatgggtgacgctggtgaagtggcccagggaagtgcacatgtctctccctgctcttccagggtgatttttttgatgtttggctcttggtccttgtttccactggctttccatccccatggggcagaaacagtggctcctgggagcagaaaaggaattgaggtgggcaggcagaagagcctggattgctcactgttttgggaaacttacatgttgagatctacagagatccaggaaaccaaagccctgctgagcagagccattttgtggctatttctggaggcccaggagtgtggctgcaagagaaaaggggctggaggaagatccggagggcaggggtgttccctctgctgatgatggatgcccctaacacctgtgcctaacacccctactgaaccccacagctccagccttagtttttggagtcaagtgttaaaggtttctggccagaggaattggggtcttgccatccctgcaatagcccttttatgggctctgggagacagctttagggaataaatggggattttcccctttttctacccactcctttgcttcctccaagacttacccaactccttccccctcagagaaccaaatagcctgaggaagcaggagagttcctggttatggcagtttcttggtgatttggggcttcaagacagtaggtgagagatgctgtcaggacgtatcttcttcataccaaagtcactggtcctttctcagcctctctcgtgcttttctcctaatgaccatatttttgccaaaaattgggatatgttatctgacagaccagaatatttgaagtttgggctgtcctgaaagtctggactttggtggtaccctcctcccccagcccatctgttgcacattatactccgtgtgttcttcaactttcggcgcccttattcccctgccttcctggcttgattgaaggaaagcttgaaaaggcgcagagccctatacctcatttcctccatgataaaaggatccaagtgaggccctgtcacagcctgtgggtaggggatgcggcgggatcctcattgccatggtactcaaaggtagaagagcctggagtttgttgcttctctttgctattctttcatatcctcttgggcctggtgattaattagcaattctcattcctctcagccaaaggcctgcactgggctttatttgtctttttttattttttaagcactgcctgccagagatgggcctggggcctgatgaggaccttagcgctgctcgttctccttttctgttcatgcacacattcctccatggggtggggaaggcaggcatggggtgtggccctcggagaagttaggagtcccccagctcaagatacagtggcaaagacctagtggtcccctacccccacttctctcagttcctggcatgaggagagaagaccctgctctggtggagctgacaacctttgaggctgggaggagagcagcctctgggcatcgttcccagtgtccctcacactaaaacggcgtagatggcaaccccccacccccaccccgctgctcaactcttgtgtttgttgttctgtttgccccatttatctgttgctgtttttgtgttgtcttcccctgctccgcattttgtaaaatggcccctgggggagtgtttttgctggatctgctccctctcgctctctcactccactactttttggaacaaagtgatggcagaatgcggtggtggtgggggtcttttgtactgttggattaataaaatgattttaaaatcccaga

SEQ ID NO: 308818 - DNA, 6768 bp, Homo sapiens
aaagtgggaagcgtgaaggagggaccctgaggtagagggtcaggggttagtgaggccggaagtgagtgtaataaagtttctccagggaggcagggcccggggagaaagttggagcggtaacctaagctggcagtggcgtgatccggcaccaaatcggcccgcggtgcggtgcggagactccatgaggccctggacatgaacaagctgagtggaggcggcgggcgcaggactcgggtggaagggggccagcttgggggcgaggagtggacccgccacgggagctttgtcaataagcccacgcggggctggctgcatcccaacgacaaagtcatgggacccggggtttcctacttggttcggtacatgggttgtgtggaggtcctccagtcaatgcgtgccctggacttcaacacccggactcaggtcaccagggaggccatcagtctggtgtgtgaggctgtgccgggtgctaagggggcgacaaggaggagaaagccctgtagccgcccgctcagctctatcctggggaggagtaacctgaaatttgctggaatgccaatcactctcaccgtctccaccagcagcctcaacctcatggccgcagactgcaaacaggacacagccgagtatgtcgcctatgttgccaaagaccctgtgaatcagagagcctgccacattctggagtgtcccgaagggcttgcccaggatgtcatcagcaccattggccaggccttcgagttgcgcttcaaacaatacctcaggaacccacccaaactggtcacccctcatgacaggatggctggctttgatggctcagcatgggatgaggaggaggaagagccacctgaccatcagtactataatgacttcccggggaaggaaccccccttggggggggtggtagacatgaggcttcgggaaggagccgctccaggggctgctcgacccactgcacccaatgcccagacccccagccacttgggagctacattgcctgtaggacagcctgttgggggagatccagaagtccgcaaacagatgccacctccaccaccctgtccagcaggcagagagctttttgatgatccctcctatgtcaacgtccagaacctagacaaggcccggcaagcagtgggtggtgctgggccccccaatcctgctatcaatggcagtgcaccccgggacctgtttgacatgaagcccttcgaagatgctcttcgcgtgcctccacctccccagtcggtgtccatggctgagcagctccgaggggagccctggttccatgggaagctgagccggcgggaggctgaggcactgctgcagctcaatggggacttcctggtacgggagagcacgaccacacctggccagtatgtgctcactggcttgcagagtgggcagcctaagcatttgctactggtggaccctgagggtgtggttcggactaaggatcaccgctttgaaagtgtcagtcaccttatcagctaccacatggacaatcacttgcccatcatctctgcgggcagcgaactgtgtctacagcaacctgtggagcggaaactgtgatctgccctagcgctctcttccagaagatgccctccaatcctttccaccctattccctaactctcgggacctcgtttgggagtgttctgtgggcttggccttgtgtcagagctgggagtagcatggactctgggtttcatatccagctgagtgagagggtttgagtcaaaagcctgggtgagaatcctgcctctccccaaacattaatcaccaaagtattaatgtacagagtggcccctcacctgggcctttcctgtgccaacctgatgccccttccccaagaaggtgagtgcttgtcatggaaaatgtcctgtggtgacaggcccagtggaacagtcacccttctgggcaagggggaacaaatcacacctctgggcttcagggtatcccagacccctctcaacacccgccccccccatgtttaaactttgtgcctttgaccatctcttaggtctaatgatattttatgcaaacagttcttggacccctgaattcaatgacagggatgccaacaccttcttggcttctgggacctgtgttcttgctgagcaccctctccggtttgggttgggataacagaggcaggagtggcagctgtcccctctccctggggatatgcaacccttagagattgccccagagccccactcccggccaggcgggagatggacccctcccttgctcagtgcctcctggccggggcccctcaccccaaggggtctgtatatacatttcataaggcctgccctcccatgttgcatgcctatgtactctacgccaaagtgcagcccttcctcctgaagcctctgccctgcctccctttctgggagggcggggtgggggtgactgaatttgggcctcttgtacagttaactctcccaggtggattttgtggaggtgagaaaaggggcattgagactataaagcagtagacaatccccacataccatctgtagagttggaactgcattcttttaaagttttatatgcatatattttagggctgtagacttactttcctattttcttttccattgcttattcttgagcacaaaatgataatcaattattacatttatacatcacctttttgacttttccaagcccttttacagctcttggcattttcctcgcctaggcctgtgaggtaactgggatcgcaccttttataccagagacctgaggcagatgaaatttatttccatctaggactagaaaaacttgggtctcttaccgcgagactgagaggcagaagtcagcccgaatgcctgtcagtttcatggaggggaaacgcaaaacctgcagttcctgagtaccttctacaggcccggcccagcctaggcccggggtggccacaccacagcaagccggccccccctcttttggccttgtggataagggagagttgaccgttttcatcctggcctccttttgctgtttggatgtttccacgggtctcacttataccaaagggaaaactcttcattaaagtccgtatttcttctacctctgcctcttaacccttctgggaagcctattgtgtacgccgcgggccctcagcggcagacggggaggcgggaggtcgcggccgcccagggaagctgggggtctgcagagtttgggtgcggcagagtggggcgtttcgcgccaccgtccccatggggatgtcgtgtccgcagagggggctggctccgggtgggtcgaggcgggagccgggcctgcccggcgccccagcaccggcccccgggctacctgggcctcccgggtgcgccttcggctcgcgcgcgcccctccgcggcggctccaccgcccgggatggtacggtccggcagccgggccgcgcgctgccgcccctcggtgagctggtgtgggccgccgctagcggagacgaccctttccactcgcgtggtgccgtggtaagcctcgtccctcgcccgccgcctgttttcaggcgtagcgtctcgtccggtccttgctccccctccccgcagcgctcagtggtggtggccgcgacgagttccggttccggttgctgccgccgctggcgggcggcgagtctggagagagcgcgcagtttgcgcggcggctcggcgcttccctgtcgtcgcactttgtggttgctgcagctcgggggcctgggctgcccctgacaccccttctgggcgatggtgcagcccaagggcgcctccatcccccgccgctgccgctaacccgggtcccccactccatggccgcctcggcgccgcccccaccggacaagctggagggaggtggcggccccgcaccgccccctgcgccgcccagcaccgggaggaagcagggcaaggccggtctgcaaatgaagagtccagaaaagaagcgaaggaagtcaaatactcagggccctgcatactcacatctgacggagtttgcaccacccccaactcccatggtggatcacctggttgcatccaacccttttgaagatgacttcggagcccccaaagtgggggttgcagcccctccattccttggcagtcctgtgcccttcggaggcttccgtgtgcaggggggcatggcgggccaggtacccccaggctacagcactggaggtggagggggcccccagccactccgtcgacagccaccccccttccctcccaatcctatgggccctgctttcaacatgcccccccagggtcctggctacccacccccaggcaacatgaactttcccagccaacccttcaaccagcctctgggtcaaaactttagtcctcccagtgggcagatgatgccgggcccagtggggggatttggtcccatgatctcacccaccatgggacagcctcccagagcagagctgggcccaccttctctgtcccaacgatttgctcagccaggggctccttttggcccttctcctctccagagacctggtcaggggctccccagcctgccgcctaacacaagtccctttcctggtccggaccctggctttcctggccctggtggtgaggatggggggaagcccttgaatccacctgcttctactgcttttccccaggagccccactcaggctccccggctgctgctgttaatgggaaccagcccagtttccccccgaacagcagtgggcggggtgggggcactccagatgccaacagcttggcaccccctggcaaggcaggtgggggctccgggccccagcctcccccaggcttggtgtacccatgtggtgcctgtcggagtgaggtgaacgatgaccaggatgccattctgtgtgaggcctcctgccagaaatggttccaccgtgagtgcacaggcatgactgagagcgcctatgggctgctgaccactgaagcttctgccgtctgggcctgcgatctctgcctcaagaccaaggagatccagtctgtctacatccgtgagggcatggggcagctggtggctgctaacgatgggtgacgctggtgaagtggcccagggaagtgcacatgtctctccctgctcttccagggtgatttttttgatgtttggctcttggtccttgtttccactggctttccatccccatggggcagaaacagtggctcctgggagcagaaaaggaattgaggtgggcaggcagaagagcctggattgctcactgttttgggaaacttacatgttgagatctacagagatccaggaaaccaaagccctgctgagcagagccattttgtggctatttctggaggcccaggagtgtggctgcaagagaaaaggggctggaggaagatccggagggcaggggtgttccctctgctgatgatggatgcccctaacacctgtgcctaacacccctactgaaccccacagctccagccttagtttttggagtcaagtgttaaaggtttctggccagaggaattggggtcttgccatccctgcaatagcccttttatgggctctgggagacagctttagggaataaatggggattttcccctttttctacccactcctttgcttcctccaagacttacccaactccttccccctcagagaaccaaatagcctgaggaagcaggagagttcctggttatggcagtttcttggtgatttggggcttcaagacagtaggtgagagatgctgtcaggacgtatcttcttcataccaaagtcactggtcctttctcagcctctctcgtgcttttctcctaatgaccatatttttgccaaaaattgggatatgttatctgacagaccagaatatttgaagtttgggctgtcctgaaagtctggactttggtggtaccctcctcccccagcccatctgttgcacattatactccgtgtgttcttcaactttcggcgcccttattcccctgccttcctggcttgattgaaggaaagcttgaaaaggcgcagagccctatacctcatttcctccatgataaaaggatccaagtgaggccctgtcacagcctgtgggtaggggatgcggcgggatcctcattgccatggtactcaaaggtagaagagcctggagtttgttgcttctctttgctattctttcatatcctcttgggcctggtgattaattagcaattctcattcctctcagccaaaggcctgcactgggctttatttgtctttttttattttttaagcactgcctgccagagatgggcctggggcctgatgaggaccttagcgctgctcgttctccttttctgttcatgcacacattcctccatggggtggggaaggcaggcatggggtgtggccctcggagaagttaggagtcccccagctcaagatacagtggcaaagacctagtggtcccctacccccacttctctcagttcctggcatgaggagagaagaccctgctctggtggagctgacaacctttgaggctgggaggagagcagcctctgggcatcgttcccagtgtccctcacactaaaacggcgtagatggcaaccccccacccccaccccgctgctcaactcttgtgtttgttgttctgtttgccccatttatctgttgctgtttttgtgttgtcttcccctgctccgcattttgtaaaatggcccctgggggagtgtttttgctggatctgctccctctcgctctctcactccactactttttggaacaaagtgatggcagaatgcggtggtggtgggggtcttttgtactgttggattaataaaatgattttaaaatcccaga

SEQ ID NO: 308819 - DNA, 6186 bp, Homo sapiens
cccactgcaatctattttttgcgtcttttttttatcggcacagccgttttgtcgccttgttgccaaacccctgtgaatcagagagcctgccacattctggagtgtcccgaagggcttgcccaggatgtcatcagcaccattggccaggccttcgagttgcgcttcaaacaatacctcaggaacccacccaaactggtcacccctcatgacaggatggctggctttgatggctcagcatgggatgaggaggaggaagagccacctgaccatcagtactataatgacttcccggggaaggaaccccccttggggggggtggtagacatgaggcttcgggaaggagccgctccaggggctgctcgacccactgcacccaatgcccagacccccagccacttgggagctacattgcctgtaggacagcctgttgggggagatccagaagtccgcaaacagatgccacctccaccaccctgtccagcaggcagagagctttttgatgatccctcctatgtcaacgtccagaacctagacaaggcccggcaagcagtgggtggtgctgggccccccaatcctgctatcaatggcagtgcaccccgggacctgtttgacatgaagcccttcgaagatgctcttcgcgtgcctccacctccccagtcggtgtccatggctgagcagctccgaggggagccctggttccatgggaagctgagccggcgggaggctgaggcactgctgcagctcaatggggacttcctggtacgggagagcacgaccacacctggccagtatgtgctcactggcttgcagagtgggcagcctaagcatttgctactggtggaccctgagggtgtggttcggactaaggatcaccgctttgaaagtgtcagtcaccttatcagctaccacatggacaatcacttgcccatcatctctgcgggcagcgaactgtgtctacagcaacctgtggagcggaaactgtgatctgccctagcgctctcttccagaagatgccctccaatcctttccaccctattccctaactctcgggacctcgtttgggagtgttctgtgggcttggccttgtgtcagagctgggagtagcatggactctgggtttcatatccagctgagtgagagggtttgagtcaaaagcctgggtgagaatcctgcctctccccaaacattaatcaccaaagtattaatgtacagagtggcccctcacctgggcctttcctgtgccaacctgatgccccttccccaagaaggtgagtgcttgtcatggaaaatgtcctgtggtgacaggcccagtggaacagtcacccttctgggcaagggggaacaaatcacacctctgggcttcagggtatcccagacccctctcaacacccgccccccccatgtttaaactttgtgcctttgaccatctcttaggtctaatgatattttatgcaaacagttcttggacccctgaattcaatgacagggatgccaacaccttcttggcttctgggacctgtgttcttgctgagcaccctctccggtttgggttgggataacagaggcaggagtggcagctgtcccctctccctggggatatgcaacccttagagattgccccagagccccactcccggccaggcgggagatggacccctcccttgctcagtgcctcctggccggggcccctcaccccaaggggtctgtatatacatttcataaggcctgccctcccatgttgcatgcctatgtactctacgccaaagtgcagcccttcctcctgaagcctctgccctgcctccctttctgggagggcggggtgggggtgactgaatttgggcctcttgtacagttaactctcccaggtggattttgtggaggtgagaaaaggggcattgagactataaagcagtagacaatccccacataccatctgtagagttggaactgcattcttttaaagttttatatgcatatattttagggctgtagacttactttcctattttcttttccattgcttattcttgagcacaaaatgataatcaattattacatttatacatcacctttttgacttttccaagcccttttacagctcttggcattttcctcgcctaggcctgtgaggtaactgggatcgcaccttttataccagagacctgaggcagatgaaatttatttccatctaggactagaaaaacttgggtctcttaccgcgagactgagaggcagaagtcagcccgaatgcctgtcagtttcatggaggggaaacgcaaaacctgcagttcctgagtaccttctacaggcccggcccagcctaggcccggggtggccacaccacagcaagccggccccccctcttttggccttgtggataagggagagttgaccgttttcatcctggcctccttttgctgtttggatgtttccacgggtctcacttataccaaagggaaaactcttcattaaagtccgtatttcttctacctctgcctcttaacccttctgggaagcctattgtgtacgccgcgggccctcagcggcagacggggaggcgggaggtcgcggccgcccagggaagctgggggtctgcagagtttgggtgcggcagagtggggcgtttcgcgccaccgtccccatggggatgtcgtgtccgcagagggggctggctccgggtgggtcgaggcgggagccgggcctgcccggcgccccagcaccggcccccgggctacctgggcctcccgggtgcgccttcggctcgcgcgcgcccctccgcggcggctccaccgcccgggatggtacggtccggcagccgggccgcgcgctgccgcccctcggtgagctggtgtgggccgccgctagcggagacgaccctttccactcgcgtggtgccgtggtaagcctcgtccctcgcccgccgcctgttttcaggcgtagcgtctcgtccggtccttgctccccctccccgcagcgctcagtggtggtggccgcgacgagttccggttccggttgctgccgccgctggcgggcggcgagtctggagagagcgcgcagtttgcgcggcggctcggcgcttccctgtcgtcgcactttgtggttgctgcagctcgggggcctgggctgcccctgacaccccttctgggcgatggtgcagcccaagggcgcctccatcccccgccgctgccgctaacccgggtcccccactccatggccgcctcggcgccgcccccaccggacaagctggagggaggtggcggccccgcaccgccccctgcgccgcccagcaccgggaggaagcagggcaaggccggtctgcaaatgaagagtccagaaaagaagcgaaggaagtcaaatactcagggccctgcatactcacatctgacggagtttgcaccacccccaactcccatggtggatcacctggttgcatccaacccttttgaagatgacttcggagcccccaaagtgggggttgcagcccctccattccttggcagtcctgtgcccttcggaggcttccgtgtgcaggggggcatggcgggccaggtacccccaggctacagcactggaggtggagggggcccccagccactccgtcgacagccaccccccttccctcccaatcctatgggccctgctttcaacatgcccccccagggtcctggctacccacccccaggcaacatgaactttcccagccaacccttcaaccagcctctgggtcaaaactttagtcctcccagtgggcagatgatgccgggcccagtggggggatttggtcccatgatctcacccaccatgggacagcctcccagagcagagctgggcccaccttctctgtcccaacgatttgctcagccaggggctccttttggcccttctcctctccagagacctggtcaggggctccccagcctgccgcctaacacaagtccctttcctggtccggaccctggctttcctggccctggtggtgaggatggggggaagcccttgaatccacctgcttctactgcttttccccaggagccccactcaggctccccggctgctgctgttaatgggaaccagcccagtttccccccgaacagcagtgggcggggtgggggcactccagatgccaacagcttggcaccccctggcaaggcaggtgggggctccgggccccagcctcccccaggcttggtgtacccatgtggtgcctgtcggagtgaggtgaacgatgaccaggatgccattctgtgtgaggcctcctgccagaaatggttccaccgtgagtgcacaggcatgactgagagcgcctatgggctgctgaccactgaagcttctgccgtctgggcctgcgatctctgcctcaagaccaaggagatccagtctgtctacatccgtgagggcatggggcagctggtggctgctaacgatgggtgacgctggtgaagtggcccagggaagtgcacatgtctctccctgctcttccagggtgatttttttgatgtttggctcttggtccttgtttccactggctttccatccccatggggcagaaacagtggctcctgggagcagaaaaggaattgaggtgggcaggcagaagagcctggattgctcactgttttgggaaacttacatgttgagatctacagagatccaggaaaccaaagccctgctgagcagagccattttgtggctatttctggaggcccaggagtgtggctgcaagagaaaaggggctggaggaagatccggagggcaggggtgttccctctgctgatgatggatgcccctaacacctgtgcctaacacccctactgaaccccacagctccagccttagtttttggagtcaagtgttaaaggtttctggccagaggaattggggtcttgccatccctgcaatagcccttttatgggctctgggagacagctttagggaataaatggggattttcccctttttctacccactcctttgcttcctccaagacttacccaactccttccccctcagagaaccaaatagcctgaggaagcaggagagttcctggttatggcagtttcttggtgatttggggcttcaagacagtaggtgagagatgctgtcaggacgtatcttcttcataccaaagtcactggtcctttctcagcctctctcgtgcttttctcctaatgaccatatttttgccaaaaattgggatatgttatctgacagaccagaatatttgaagtttgggctgtcctgaaagtctggactttggtggtaccctcctcccccagcccatctgttgcacattatactccgtgtgttcttcaactttcggcgcccttattcccctgccttcctggcttgattgaaggaaagcttgaaaaggcgcagagccctatacctcatttcctccatgataaaaggatccaagtgaggccctgtcacagcctgtgggtaggggatgcggcgggatcctcattgccatggtactcaaaggtagaagagcctggagtttgttgcttctctttgctattctttcatatcctcttgggcctggtgattaattagcaattctcattcctctcagccaaaggcctgcactgggctttatttgtctttttttattttttaagcactgcctgccagagatgggcctggggcctgatgaggaccttagcgctgctcgttctccttttctgttcatgcacacattcctccatggggtggggaaggcaggcatggggtgtggccctcggagaagttaggagtcccccagctcaagatacagtggcaaagacctagtggtcccctacccccacttctctcagttcctggcatgaggagagaagaccctgctctggtggagctgacaacctttgaggctgggaggagagcagcctctgggcatcgttcccagtgtccctcacactaaaacggcgtagatggcaaccccccacccccaccccgctgctcaactcttgtgtttgttgttctgtttgccccatttatctgttgctgtttttgtgttgtcttcccctgctccgcattttgtaaaatggcccctgggggagtgtttttgctggatctgctccctctcgctctctcactccactactttttggaacaaagtgatggcagaatgcggtggtggtgggggtcttttgtactgttggattaataaaatgattttaaaatcccaga

SEQ ID NO: 308820 - DNA, 3665 bp, Homo sapiens
  misc_feature (3508)..(3508): n is a, c, g, or t
  misc_feature (3513)..(3513): n is a, c, g, or t
  misc_feature (3515)..(3515): n is a, c, g, or t
aagaggctccacgttgggcggggatggggcctgaaactgtctgggtctgagctggggagcggaagccacttgtccctctccctccccaggacttctgtgactcctgggccacagaggtccaaccaggctaagggcctggggataccccctgcctggcccccttgcccaaactggcaggggggccaggctgggcagcagcccctctttcacctcaactatggatctcctgccccccaagcccaagtacaatccactccggaatgagtctctgtcatcgctggaggaaggggcttctgggtccacccccccggaggagctgccttccccatcagcttcatccctggggcccatcctgcctcctctgcctggggacgatagtcccactaccctgtgctccttcttcccccggatgagcaacctgaggctggccaacccggctggggggcgcccagggtctaagggggagccaggaagggcagctgatgatggggaggggatcgtaggggcagccatgccagactcaggccccctacccctcctccaggacatgaacaagctgagtggaggcggcgggcgcaggactcgggtggaagggggccagcttgggggcgaggagtggacccgccacgggagctttgtcaataagcccacgcggggctggctgcatcccaacgacaaagtcatgggacccggggtttcctacttggttcggtacatgggttgtgtggaggtcctccagtcaatgcgtgccctggacttcaacacccggactcaggtcaccagggaggccatcagtctggtgtgtgaggctgtgccgggtgctaagggggcgacaaggaggagaaagccctgtagccgcccgctcagctctatcctggggaggagtaacctgaaatttgctggaatgccaatcactctcaccgtctccaccagcagcctcaacctcatggccgcagactgcaaacagatcatcgccaaccaccacatgcaatctatctcatttgcatccggcggggatccggacacagccgagtatgtcgcctatgttgccaaagaccctgtgaatcagagagcctgccacattctggagtgtcccgaagggcttgcccaggatgtcatcagcaccattggccaggccttcgagttgcgcttcaaacaatacctcaggaacccacccaaactggtcacccctcatgacaggatggctggctttgatggctcagcatgggatgaggaggaggaagagccacctgaccatcagtactataatgacttcccggggaaggaaccccccttggggggggtggtagacatgaggcttcgggaaggagccgctccaggggctgctcgacccactgcacccaatgcccagacccccagccacttgggagctacattgcctgtaggacagcctgttgggggagatccagaagtccgcaaacagatgccacctccaccaccctgtccagcaggcagagagctttttgatgatccctcctatgtcaacgtccagaacctagacaaggcccggcaagcagtgggtggtgctgggccccccaatcctgctatcaatggcagtgcaccccgggacctgtttgacatgaagcccttcgaagatgctcttcgcgtgcctccacctccccagtcggtgtccatggctgagcagctccgaggggagccctggttccatgggaagctgagccggcgggaggctgaggcactgctgcagctcaatggggacttcctggtacgggagagcacgaccacacctggccagtatgtgctcactggcttgcagagtgggcagcctaagcatttgctactggtggaccctgagggtgtggttcggactaaggatcaccgctttgaaagtgtcagtcaccttatcagctaccacatggacaatcacttgcccatcatctctgcgggcagcgaactgtgtctacagcaacctgtggagcggaaactgtgatctgccctagcgctctcttccagaagatgccctccaatcctttccaccctattccctaactctcgggacctcgtttgggagtgttctgtgggcttggccttgtgtcagagctgggagtagcatggactctgggtttcatatccagctgagtgagagggtttgagtcaaaagcctgggtgagaatcctgcctctccccaaacattaatcaccaaagtattaatgtacagagtggcccctcacctgggcctttcctgtgccaacctgatgccccttccccaagaaggtgagtgcttgtcatggaaaatgtcctgtggtgacaggcccagtggaacagtcacccttctgggcaagggggaacaaatcacacctctgggcttcagggtatcccagacccctctcaacacccgccccccccatgtttaaactttgtgcctttgaccatctcttaggtctaatgatattttatgcaaacagttcttggacccctgaattcaatgacagggatgccaacaccttcttggcttctgggacctgtgttcttgctgagcaccctctccggtttgggttgggataacagaggcaggagtggcagctgtcccctctccctggggatatgcaacccttagagattgccccagagccccactcccggccaggcgggagatggacccctcccttgctcagtgcctcctggccggggcccctcaccccaaggggtctgtatatacatttcataaggcctgccctcccatgttgcatgcctatgtactctacgccaaagtgcagcccttcctcctgaagcctctgccctgcctccctttctgggagggcggggtgggggtgactgaatttgggcctcttgtacagttaactctcccaggtggattttgtggaggtgagaaaaggggcattgagactataaagcagtagacaatccccacataccatctgtagagttggaactgcattcttttaaagttttatatgcatatattttagggctgtagacttactttcctattttcttttccattgcttattcttgagcacaaaatgataatcaattattacatttatacatcacctttttgacttttccaagcccttttacagctcttggcattttcctcgcctaggcctgtgaggtaactgggatcgcaccttttataccagagacctgaggcagatgaaatttatttccatctaggactagaaaaacttgggtctcttaccgcgagactgagaggcagaagtcagcccgaatgcctgtcagtttcatggaggggaaacgcaaaacctgcagttcctgagtaccttctacaggcccggcccagcctaggcccggggtggccacaccacagcaagccggccccccctcttttggccttgtggataagggagagttgaccgttttcatcctggcctccttttgctgtttggatgtttccacgggtctcacttataccaaagggaaaactcttcattaaagtccgtatttcttctaaaaaaaaaaaaaaaaacaaaaaaaaaaaaanaaaananaaaaaaaaaaaaaaaaaaagggcggccgccgcggggccccggcggcgggggcacggtcccccgcgaggggggcccgggcacctggggggccggcggcggcggcgactctggacgcgagccgggcccttcccgtggatcgccccagctgcg

SEQ ID NO: 308821 - DNA, 5607 bp, Homo sapiens
tgtattggtggtgctctccgggacctgtttgacatgaagcccttcgaagatgctcttcgcgtgcctccacctccccagtcggtgtccatggctgagcagctccgaggggagccctggttccatgggaagctgagccggcgggaggctgaggcactgctgcagctcaatggggacttcctggtacgggagagcacgaccacacctggccagtatgtgctcactggcttgcagagtgggcagcctaagcatttgctactggtggaccctgagggtgtggttcggactaaggatcaccgctttgaaagtgtcagtcaccttatcagctaccacatggacaatcacttgcccatcatctctgcgggcagcgaactgtgtctacagcaacctgtggagcggaaactgtgatctgccctagcgctctcttccagaagatgccctccaatcctttccaccctattccctaactctcgggacctcgtttgggagtgttctgtgggcttggccttgtgtcagagctgggagtagcatggactctgggtttcatatccagctgagtgagagggtttgagtcaaaagcctgggtgagaatcctgcctctccccaaacattaatcaccaaagtattaatgtacagagtggcccctcacctgggcctttcctgtgccaacctgatgccccttccccaagaaggtgagtgcttgtcatggaaaatgtcctgtggtgacaggcccagtggaacagtcacccttctgggcaagggggaacaaatcacacctctgggcttcagggtatcccagacccctctcaacacccgccccccccatgtttaaactttgtgcctttgaccatctcttaggtctaatgatattttatgcaaacagttcttggacccctgaattcaatgacagggatgccaacaccttcttggcttctgggacctgtgttcttgctgagcaccctctccggtttgggttgggataacagaggcaggagtggcagctgtcccctctccctggggatatgcaacccttagagattgccccagagccccactcccggccaggcgggagatggacccctcccttgctcagtgcctcctggccggggcccctcaccccaaggggtctgtatatacatttcataaggcctgccctcccatgttgcatgcctatgtactctacgccaaagtgcagcccttcctcctgaagcctctgccctgcctccctttctgggagggcggggtgggggtgactgaatttgggcctcttgtacagttaactctcccaggtggattttgtggaggtgagaaaaggggcattgagactataaagcagtagacaatccccacataccatctgtagagttggaactgcattcttttaaagttttatatgcatatattttagggctgtagacttactttcctattttcttttccattgcttattcttgagcacaaaatgataatcaattattacatttatacatcacctttttgacttttccaagcccttttacagctcttggcattttcctcgcctaggcctgtgaggtaactgggatcgcaccttttataccagagacctgaggcagatgaaatttatttccatctaggactagaaaaacttgggtctcttaccgcgagactgagaggcagaagtcagcccgaatgcctgtcagtttcatggaggggaaacgcaaaacctgcagttcctgagtaccttctacaggcccggcccagcctaggcccggggtggccacaccacagcaagccggccccccctcttttggccttgtggataagggagagttgaccgttttcatcctggcctccttttgctgtttggatgtttccacgggtctcacttataccaaagggaaaactcttcattaaagtccgtatttcttctacctctgcctcttaacccttctgggaagcctattgtgtacgccgcgggccctcagcggcagacggggaggcgggaggtcgcggccgcccagggaagctgggggtctgcagagtttgggtgcggcagagtggggcgtttcgcgccaccgtccccatggggatgtcgtgtccgcagagggggctggctccgggtgggtcgaggcgggagccgggcctgcccggcgccccagcaccggcccccgggctacctgggcctcccgggtgcgccttcggctcgcgcgcgcccctccgcggcggctccaccgcccgggatggtacggtccggcagccgggccgcgcgctgccgcccctcggtgagctggtgtgggccgccgctagcggagacgaccctttccactcgcgtggtgccgtggtaagcctcgtccctcgcccgccgcctgttttcaggcgtagcgtctcgtccggtccttgctccccctccccgcagcgctcagtggtggtggccgcgacgagttccggttccggttgctgccgccgctggcgggcggcgagtctggagagagcgcgcagtttgcgcggcggctcggcgcttccctgtcgtcgcactttgtggttgctgcagctcgggggcctgggctgcccctgacaccccttctgggcgatggtgcagcccaagggcgcctccatcccccgccgctgccgctaacccgggtcccccactccatggccgcctcggcgccgcccccaccggacaagctggagggaggtggcggccccgcaccgccccctgcgccgcccagcaccgggaggaagcagggcaaggccggtctgcaaatgaagagtccagaaaagaagcgaaggaagtcaaatactcagggccctgcatactcacatctgacggagtttgcaccacccccaactcccatggtggatcacctggttgcatccaacccttttgaagatgacttcggagcccccaaagtgggggttgcagcccctccattccttggcagtcctgtgcccttcggaggcttccgtgtgcaggggggcatggcgggccaggtacccccaggctacagcactggaggtggagggggcccccagccactccgtcgacagccaccccccttccctcccaatcctatgggccctgctttcaacatgcccccccagggtcctggctacccacccccaggcaacatgaactttcccagccaacccttcaaccagcctctgggtcaaaactttagtcctcccagtgggcagatgatgccgggcccagtggggggatttggtcccatgatctcacccaccatgggacagcctcccagagcagagctgggcccaccttctctgtcccaacgatttgctcagccaggggctccttttggcccttctcctctccagagacctggtcaggggctccccagcctgccgcctaacacaagtccctttcctggtccggaccctggctttcctggccctggtggtgaggatggggggaagcccttgaatccacctgcttctactgcttttccccaggagccccactcaggctccccggctgctgctgttaatgggaaccagcccagtttccccccgaacagcagtgggcggggtgggggcactccagatgccaacagcttggcaccccctggcaaggcaggtgggggctccgggccccagcctcccccaggcttggtgtacccatgtggtgcctgtcggagtgaggtgaacgatgaccaggatgccattctgtgtgaggcctcctgccagaaatggttccaccgtgagtgcacaggcatgactgagagcgcctatgggctgctgaccactgaagcttctgccgtctgggcctgcgatctctgcctcaagaccaaggagatccagtctgtctacatccgtgagggcatggggcagctggtggctgctaacgatgggtgacgctggtgaagtggcccagggaagtgcacatgtctctccctgctcttccagggtgatttttttgatgtttggctcttggtccttgtttccactggctttccatccccatggggcagaaacagtggctcctgggagcagaaaaggaattgaggtgggcaggcagaagagcctggattgctcactgttttgggaaacttacatgttgagatctacagagatccaggaaaccaaagccctgctgagcagagccattttgtggctatttctggaggcccaggagtgtggctgcaagagaaaaggggctggaggaagatccggagggcaggggtgttccctctgctgatgatggatgcccctaacacctgtgcctaacacccctactgaaccccacagctccagccttagtttttggagtcaagtgttaaaggtttctggccagaggaattggggtcttgccatccctgcaatagcccttttatgggctctgggagacagctttagggaataaatggggattttcccctttttctacccactcctttgcttcctccaagacttacccaactccttccccctcagagaaccaaatagcctgaggaagcaggagagttcctggttatggcagtttcttggtgatttggggcttcaagacagtaggtgagagatgctgtcaggacgtatcttcttcataccaaagtcactggtcctttctcagcctctctcgtgcttttctcctaatgaccatatttttgccaaaaattgggatatgttatctgacagaccagaatatttgaagtttgggctgtcctgaaagtctggactttggtggtaccctcctcccccagcccatctgttgcacattatactccgtgtgttcttcaactttcggcgcccttattcccctgccttcctggcttgattgaaggaaagcttgaaaaggcgcagagccctatacctcatttcctccatgataaaaggatccaagtgaggccctgtcacagcctgtgggtaggggatgcggcgggatcctcattgccatggtactcaaaggtagaagagcctggagtttgttgcttctctttgctattctttcatatcctcttgggcctggtgattaattagcaattctcattcctctcagccaaaggcctgcactgggctttatttgtctttttttattttttaagcactgcctgccagagatgggcctggggcctgatgaggaccttagcgctgctcgttctccttttctgttcatgcacacattcctccatggggtggggaaggcaggcatggggtgtggccctcggagaagttaggagtcccccagctcaagatacagtggcaaagacctagtggtcccctacccccacttctctcagttcctggcatgaggagagaagaccctgctctggtggagctgacaacctttgaggctgggaggagagcagcctctgggcatcgttcccagtgtccctcacactaaaacggcgtagatggcaaccccccacccccaccccgctgctcaactcttgtgtttgttgttctgtttgccccatttatctgttgctgtttttgtgttgtcttcccctgctccgcattttgtaaaatggcccctgggggagtgtttttgctggatctgctccctctcgctctctcactccactactttttggaacaaagtgatggcagaatgcggtggtggtgggggtcttttgtactgttggattaataaaatgattttaaaatcccaga

SEQ ID NO: 308822 - DNA, 2029 bp, Homo sapiens
aagaggctccacgttgggcggggatggggcctgaaactgtctgggtctgagctggggagcggaagccacttgtccctctccctccccaggacttctgtgactcctgggccacagaggtccaaccaggctaagggcctggggataccccctgcctggcccccttgcccaaactggcaggggggccaggctgggcagcagcccctctttcacctcaactatggatctcctgccccccaagcccaagtacaatccactccggaatgagtctctgtcatcgctggaggaaggggcttctgggtccacccccccggaggagctgccttccccatcagcttcatccctggggcccatcctgcctcctctgcctggggacgatagtcccactaccctgtgctccttcttcccccggatgagcaacctgaggctggccaacccggctggggggcgcccagggtctaagggggagccaggaagggcagctgatgatggggaggggatcgtaggggcagccatgccagactcaggccccctacccctcctccaggacatgaacaagctgagtggaggcggcgggcgcaggactcgggtggaagggggccagcttgggggcgaggagtggacccgccacgggagctttgtcaataagcccacgcggggctggctgcatcccaacgacaaagtcatgggacccggggtttcctacttggttcggtacatgggttgtgtggaggtcctccagtcaatgcgtgccctggacttcaacacccggactcaggtcaccagggaggccatcagtctggtgtgtgaggctgtgccgggtgctaagggggcgacaaggaggagaaagccctgtagccgcccgctcagctctatcctggggaggagtaacctgaaatttgctggaatgccaatcactctcaccgtctccaccagcagcctcaacctcatggccgcagactgcaaacagatcatcgccaaccaccacatgcaatctatctcatttgcatccggcggggatccggacacagccgagtatgtcgcctatgttgccaaagaccctgtgaatcagagagcctgccacattctggagtgtcccgaagggcttgcccaggatgtcatcagcaccattggccaggccttcgagttgcgcttcaaacaatacctcaggaacccacccaaactggtcacccctcatgacaggatggctggctttgatggctcagcatgggatgaggaggaggaagagccacctgaccatcagtactataatgacttcccggggaaggaaccccccttggggggggtggtagacatgaggcttcgggaaggagccgctccaggggctgctcgacccactgcacccaatgcccagacccccagccacttgggagctacattgcctgtaggacagcctgttgggggagatccagaagtccgcaaacagatgccacctccaccaccctgtccagcaggcagagagctttttgatgatccctcctatgtcaacgtccagaacctagacaaggcccggcaagcagtgggtggtgctgggccccccaatcctgctatcaatggcagtgcaccccgggacctgtttgacatgaagcccttcgaagatgctcttcgcgtgcctccacctccccagtcggtgtccatggctgagcagctccgaggggagccctggttccatgggaagctgagccggcgggaggctgaggcactgctgcagctcaatggggacttcctggtacgggagagcacgaccacacctggccagtatgtgctcactggcttgcagagtgggcagcctaagcatttgctactggtggaccctgagggtgtgggtgagtgtggcagaggtgtgggtgaggggtggcaaaaaggaaggtacagtaccctacagtgtatccctcttccttccctcattgctttgtagacattcccgctgggcagctgtctatgggcctctcttgctctttaaagtgtctggcatcttcctccagaggctcatcccttagcctgaactatg

SEQ ID NO: 308823 - DNA, 322 bp, Homo sapiens
  misc_feature (48)..(48): n is a, c, g, or t
atcgatcgtgatcagcactgacccgacctcagagagtactcgcagggngcctggctgactcaagaccctcgagattaacggtgctaacctgctcaactcttgtgtttgttgttctgtttgccccatttatctgttgctgtttttgtgttgtcttcccctgctccgcattttgtaaaatggcccctgggggagtgtttttgctggatctgctccctctcgctctctcactccactactttttggaacaaagtgatggcagaatgcggtggtggtgggggtcttttgtactgttggattaataaaatgattttaaaatcccaga

SEQ ID NO: 308824 - DNA, 456 bp, Homo sapiens
gtaggggcagccatgccagactcaggccccctacccctcctccaggacatgaacaagctgagtggaggcggcgggcgcaggactcgggtggaagggggccagcttgggggcgaggagtggacccgccacgggagctttgtcaataagcccacgcggggctggctgcatcccaacgacaaagtcatgggacccggggtttcctacttggttcgggtgagtgaacatcctcctctccattcccccgcagaccccctccagttctaatgctcactccagcttggccggaatctcttttttcctgctgttccccaacaaccccgtttcagtgtcctatttcctaaacctttctcatcccttccccgattctgtagccccttcccttccagctttgcctgggcccccttccttcttttcactcccccacccccaccctggcatgcttagcacaatgcccag

SEQ ID NO: 308825 - DNA, 351 bp, Homo sapiens
ctttggtcatctgtacccactctaagtagatctcagtgggggttcctgcagaggaagatgagggcccctgtctgtgcctcctcccagtgggctcagctcactgacagcctctgctgtgccctcagcctgccacattctggagtgtcccgaagggcttgcccaggatgtcatcagcaccattggccaggccttcgagttgcgcttcaaacaatacctcaggaacccacccaaactggtcacccctcatgacaggtgagcaggtggggagagtgtggagcagctcttggattaggattaggaaaggagggctgctcttcctacacttgagttgagaggttcagggagggaata

SEQ ID NO: 308826 - DNA, 3686 bp, Homo sapiens
aagaggctccacgttgggcggggatggggcctgaaactgtctgggtctgagctggggagcggaagccacttgtccctctccctccccaggacttctgtgactcctgggccacagaggtccaaccaggctaagggcctggggataccccctgcctggcccccttgcccaaactggcaggggggccaggctgggcagcagcccctctttcacctcaactatggatctcctgccccccaagcccaagtacaatccactccggaatgagtctctgtcatcgctggaggaaggggcttctgggtccacccccccggaggagctgccttccccatcagcttcatccctggggcccatcctgcctcctctgcctggggacgatagtcccactaccctgtgctccttcttcccccggatgagcaacctgaggctggccaacccggctggggggcgcccagggtctaagggggagccaggaagggcagctgatgatggggaggggatcgtaggggcagccatgccagactcaggccccctacccctcctccaggacatgaacaagctgagtggaggcggcgggcgcaggactcgggtggaagggggccagcttgggggcgaggagtggacccgccacgggagctttgtcaataagcccacgcggggctggctgcatcccaacgacaaagtcatgggacccggggtttcctacttggttcggtacatgggttgtgtggaggtcctccagtcaatgcgtgccctggacttcaacacccggactcaggtcaccagggaggccatcagtctggtgtgtgaggctgtgccgggtgctaagggggcgacaaggaggagaaagccctgtagccgcccgctcagctctatcctggggaggagtaacctgaaatttgctggaatgccaatcactctcaccgtctccaccagcagcctcaacctcatggccgcagactgcaaacagatcatcgccaaccaccacatgcaatctatctcatttgcatccggcggggatccggacacagccgagtatgtcgcctatgttgccaaagaccctgtgaatcagagagcctgccacattctggagtgtcccgaagggcttgcccaggatgtcatcagcaccattggccaggccttcgagttgcgcttcaaacaatacctcaggaacccacccaaactggtcacccctcatgacaggatggctggctttgatggctcagcatgggatgaggaggaggaagagccacctgaccatcagtactataatgacttcccggggaaggaaccccccttggggggggtggtagacatgaggcttcgggaaggagccgctccaggggctgctcgacccactgcacccaatgcccagacccccagccacttgggagctacattgcctgtaggacagcctgttgggggagatccagaagtccgcaaacagatgccacctccaccaccctgtccagcaggcagagagctttttgatgatccctcctatgtcaacgtccagaacctagacaaggcccggcaagcagtgggtggtgctgggccccccaatcctgctatcaatggcagtgcaccccgggacctgtttgacatgaagcccttcgaagatgctcttcgcgtgcctccacctccccagtcggtgtccatggctgagcagctccgaggggagccctggttccatgggaagctgagccggcgggaggctgaggcactgctgcagctcaatggggacttcctggtacgggagagcacgaccacacctggccagtatgtgctcactggcttgcagagtgggcagcctaagcatttgctactggtggaccctgagggtgtggttcggactaaggatcaccgctttgaaagtgtcagtcaccttatcagctaccacatggacaatcacttgcccatcatctctgcgggcagcgaactgtgtctacagcaacctgtggagcggaaactgtgatctgccctagcgctctcttccagaagatgccctccaatcctttccaccctattccctaactctcgggacctcgtttgggagtgttctgtgggcttggccttgtgtcagagctgggagtagcatggactctgggtttcatatccagctgagtgagagggtttgagtcaaaagcctgggtgagaatcctgcctctccccaaacattaatcaccaaagtattaatgtacagagtggcccctcacctgggcctttcctgtgccaacctgatgccccttccccaagaaggtgagtgcttgtcatggaaaatgtcctgtggtgacaggcccagtggaacagtcacccttctgggcaagggggaacaaatcacacctctgggcttcagggtatcccagacccctctcaacacccgccccccccatgtttaaactttgtgcctttgaccatctcttaggtctaatgatattttatgcaaacagttcttggacccctgaattcaatgacagggatgccaacaccttcttggcttctgggacctgtgttcttgctgagcaccctctccggtttgggttgggataacagaggcaggagtggcagctgtcccctctccctggggatatgcaacccttagagattgccccagagccccactcccggccaggcgggagatggacccctcccttgctcagtgcctcctggccggggcccctcaccccaaggggtctgtatatacatttcataaggcctgccctcccatgttgcatgcctatgtactctacgccaaagtgcagcccttcctcctgaagcctctgccctgcctccctttctgggagggcggggtgggggtgactgaatttgggcctcttgtacagttaactctcccaggtggattttgtggaggtgagaaaaggggcattgagactataaagcagtagacaatccccacataccatctgtagagttggaactgcattcttttaaagttttatatgcatatattttagggctgtagacttactttcctattttcttttccattgcttattcttgagcacaaaatgataatcaattattacatttatacatcacctttttgacttttccaagcccttttacagctcttggcattttcctcgcctaggcctgtgaggtaactgggatcgcaccttttataccagagacctgaggcagatgaaatttatttccatctaggactagaaaaacttgggtctcttaccgcgagactgagaggcagaagtcagcccgaatgcctgtcagtttcatggaggggaaacgcaaaacctgcagttcctgagtaccttctacaggcccggcccagcctaggcccggggtggccacaccacagcaagccggccccccctcttttggccttgtggataagggagagttgaccgttttcatcctggcctccttttgctgtttggatgtttccacgggtctcacttataccaaagggaaaactcttcattaaagtccgtatttcttctaaaaaaaaaaaaaaaaaaatacatttatacatcacctttttgacttttccaagcccttttacagctcttggcattttcctcgcctaggcctgtgaggtaactgggatcgcaccttttataccagagacctgaggcagatgaaatttatttccatctaggactagaaaaacttgggtctcttaccgcgagactgagaggcagaagtcagcc

SEQ ID NO: 308827 - DNA, 2222 bp, Homo sapiens
aagaggctccacgttgggcggggatggggcctgaaactgtctgggtctgagctggggagcggaagccacttgtccctctccctccccaggacttctgtgactcctgggccacagaggtccaaccaggctaagggcctggggataccccctgcctggcccccttgcccaaactggcaggggggccaggctgggcagcagcccctctttcacctcaactatggatctcctgccccccaagcccaagtacaatccactccggaatgagtctctgtcatcgctggaggaaggggcttctgggtccacccccccggaggagctgccttccccatcagcttcatccctggggcccatcctgcctcctctgcctggggacgatagtcccactaccctgtgctccttcttcccccggatgagcaacctgaggctggccaacccggctggggggcgcccagggtctaagggggagccaggaagggcagctgatgatggggaggggatcgtaggggcagccatgccagactcaggccccctacccctcctccaggacatgaacaagctgagtggaggcggcgggcgcaggactcgggtggaagggggccagcttgggggcgaggagtggacccgccacgggagctttgtcaataagcccacgcggggctggctgcatcccaacgacaaagtcatgggacccggggtttcctacttggttcggtacatgggttgttcatgtcctggaggaggggcagccatgccagactcaggccccctacccctcccctgagctgcctacggaggcgccccctggggacgcccttgccgatcccccgtcgggcaccactgaggaggaggaagagcagcctgggaaggccccggacccgcaggacccccaggacgcggagtccgactctgccaccggatcgcagaggcagtccgtcatccagcagcctgccccggacaggggcacggcgaaactgggaaccaagaggccgcaccccgaggatggggacgggcagagcctcgagggcgtctctagctccggcgacagcgcagggctggaggccgggcagggccctggggctgacgagccgggcttgtcccgcgggaagccctatgcctgcggcgagtgcggggaggccttcgcgtggctctcgcacctgatggagcaccacagcagccatggcggccggaagcgctacgcctgtcagggctgctggaagaccttccacttcagcctggccctagccgagcaccagaagacccacgagaaggagaaaagctacgcgctggggggcgcccggggcccccaaccgtccacccgcgaagcccaggcgggggctagggcgggcggtcccccagagagcgtggagggcgaggctccccccgcacccccagaggcgcagaggtgagccgctgtgctgtcccgttccggaggggccgctttgccggccgtgaatcccagacgaggcattgggcctttccacgcccctgggtggcggcttcctgtggtgtttgtggacgtcctctgcctgtgccctgaatccgctcctgaggctaagcgctcccaacgagaagggtccacgggaagccctcacctctgtaaacacaccctgggccagcgctcgcatccgaggggagccgccggatgtggaagaagactcggctttcctgcagccatttagtgccgccccatgctaggttatttgacattgtgcagtgtagagttgccttaaagtgcgtgatctgccagtgctttcttcaagtcacccttgccccgattcctcctgtttgcgctccccagggttgctcaagtggaaattttgtcagctgtttagccttttcgtacttggcgtgatgtcaacttcacttctaatctgcaaaagcagaagctgtttcctagtttacctcgcgtgtgtttacctatatggagtagctcgcagagatcacagaaatgcttgcagcctaaggcagggttttcagaccgtgggtcccagcccatttagtaaaatgggaaatcaattagcaagtggtcaccagcattacacagcaatgaagcagaataaagtaggccagaatgcatcatgtagtaaaggcaaatactgttttgtgaaacttttcacccatacatctaaatgtgagaactggttgcaatgtaagacatttcttgctgggaagttgtgagcaaaataagttgaaaacactaataaagatctgtctgtctgagc

SEQ ID NO: 308828 - DNA, 7034 bp, Homo sapiens
aagaggctccacgttgggcggggatggggcctgaaactgtctgggtctgagctggggagcggaagccacttgtccctctccctccccaggacttctgtgactcctgggccacagaggtccaaccaggctaagggcctggggataccccctgcctggcccccttgcccaaactggcaggggggccaggctgggcagcagcccctctttcacctcaactatggatctcctgccccccaagcccaagtacaatccactccggaatgagtctctgtcatcgctggaggaaggggcttctgggtccacccccccggaggagctgccttccccatcagcttcatccctggggcccatcctgcctcctctgcctggggacgatagtcccactaccctgtgctccttcttcccccggatgagcaacctgaggctggccaacccggctggggggcgcccagggtctaagggggagccaggaagggcagctgatgatggggaggggatcgtaggggcagccatgccagactcaggccccctacccctcctccaggacatgaacaagctgagtggaggcggcgggcgcaggactcgggtggaagggggccagcttgggggcgaggagtggacccgccacgggagctttgtcaataagcccacgcggggctggctgcatcccaacgacaaagtcatgggacccggggtttcctacttggttcggtacatgggttgtgtggaggtcctccagtcaatgcgtgccctggacttcaacacccggactcaggtcaccagggaggccatcagtctggtgtgtgaggctgtgccgggtgctaagggggcgacaaggaggagaaagccctgtagccgcccgctcagctctatcctggggaggagtaacctgaaatttgctggaatgccaatcactctcaccgtctccaccagcagcctcaacctcatggccgcagactgcaaacagatcatcgccaaccaccacatgcaatctatctcatttgcatccggcggggatccggacacagccgagtatgtcgcctatgttgccaaagaccctgtgaatcagagagcctgccacattctggagtgtcccgaagggcttgcccaggatgtcatcagcaccattggccaggccttcgagttgcgcttcaaacaatacctcaggaacccacccaaactggtcacccctcatgacaggatggctggctttgatggctcagcatgggatgaggaggaggaagagccacctgaccatcagtactataatgacttcccggggaaggaaccccccttggggggggtggtagacatgaggcttcgggaaggagccgctccaggggctgctcgacccactgcacccaatgcccagacccccagccacttgggagctacattgcctgtaggacagcctgttgggggagatccagaagtccgcaaacagatgccacctccaccaccctgtccagcaggcagagagctttttgatgatccctcctatgtcaacgtccagaacctagacaaggcccggcaagcagtgggtggtgctgggccccccaatcctgctatcaatggcagtgcaccccgggacctgtttgacatgaagcccttcgaagatgctcttcgcgtgcctccacctccccagtcggtgtccatggctgagcagctccgaggggagccctggttccatgggaagctgagccggcgggaggctgaggcactgctgcagctcaatggggacttcctggtacgggagagcacgaccacacctggccagtatgtgctcactggcttgcagagtgggcagcctaagcatttgctactggtggaccctgagggtgtggttcggactaaggatcaccgctttgaaagtgtcagtcaccttatcagctaccacatggacaatcacttgcccatcatctctgcgggcagcgaactgtgtctacagcaacctgtggagcggaaactgtgatctgccctagcgctctcttccagaagatgccctccaatcctttccaccctattccctaactctcgggacctcgtttgggagtgttctgtgggcttggccttgtgtcagagctgggagtagcatggactctgggtttcatatccagctgagtgagagggtttgagtcaaaagcctgggtgagaatcctgcctctccccaaacattaatcaccaaagtattaatgtacagagtggcccctcacctgggcctttcctgtgccaacctgatgccccttccccaagaaggtgagtgcttgtcatggaaaatgtcctgtggtgacaggcccagtggaacagtcacccttctgggcaagggggaacaaatcacacctctgggcttcagggtatcccagacccctctcaacacccgccccccccatgtttaaactttgtgcctttgaccatctcttaggtctaatgatattttatgcaaacagttcttggacccctgaattcaatgacagggatgccaacaccttcttggcttctgggacctgtgttcttgctgagcaccctctccggtttgggttgggataacagaggcaggagtggcagctgtcccctctccctggggatatgcaacccttagagattgccccagagccccactcccggccaggcgggagatggacccctcccttgctcagtgcctcctggccggggcccctcaccccaaggggtctgtatatacatttcataaggcctgccctcccatgttgcatgcctatgtactctacgccaaagtgcagcccttcctcctgaagcctctgccctgcctccctttctgggagggcggggtgggggtgactgaatttgggcctcttgtacagttaactctcccaggtggattttgtggaggtgagaaaaggggcattgagactataaagcagtagacaatccccacataccatctgtagagttggaactgcattcttttaaagttttatatgcatatattttagggctgtagacttactttcctattttcttttccattgcttattcttgagcacaaaatgataatcaattattacatttatacatcacctttttgacttttccaagcccttttacagctcttggcattttcctcgcctaggcctgtgaggtaactgggatcgcaccttttataccagagacctgaggcagatgaaatttatttccatctaggactagaaaaacttgggtctcttaccgcgagactgagaggcagaagtcagcccgaatgcctgtcagtttcatggaggggaaacgcaaaacctgcagttcctgagtaccttctacaggcccggcccagcctaggcccggggtggccacaccacagcaagccggccccccctcttttggccttgtggataagggagagttgaccgttttcatcctggcctccttttgctgtttggatgtttccacgggtctcacttataccaaagggaaaactcttcattaaagtccgtatttcttctacctctgcctcttaacccttctgggaagcctattgtgtacgccgcgggccctcagcggcagacggggaggcgggaggtcgcggccgcccagggaagctgggggtctgcagagtttgggtgcggcagagtggggcgtttcgcgccaccgtccccatggggatgtcgtgtccgcagagggggctggctccgggtgggtcgaggcgggagccgggcctgcccggcgccccagcaccggcccccgggctacctgggcctcccgggtgcgccttcggctcgcgcgcgcccctccgcggcggctccaccgcccgggatggtacggtccggcagccgggccgcgcgctgccgcccctcggtgagctggtgtgggccgccgctagcggagacgaccctttccactcgcgtggtgccgtggtaagcctcgtccctcgcccgccgcctgttttcaggcgtagcgtctcgtccggtccttgctccccctccccgcagcgctcagtggtggtggccgcgacgagttccggttccggttgctgccgccgctggcgggcggcgagtctggagagagcgcgcagtttgcgcggcggctcggcgcttccctgtcgtcgcactttgtggttgctgcagctcgggggcctgggctgcccctgacaccccttctgggcgatggtgcagcccaagggcgcctccatcccccgccgctgccgctaacccgggtcccccactccatggccgcctcggcgccgcccccaccggacaagctggagggaggtggcggccccgcaccgccccctgcgccgcccagcaccgggaggaagcagggcaaggccggtctgcaaatgaagagtccagaaaagaagcgaaggaagtcaaatactcagggccctgcatactcacatctgacggagtttgcaccacccccaactcccatggtggatcacctggttgcatccaacccttttgaagatgacttcggagcccccaaagtgggggttgcagcccctccattccttggcagtcctgtgcccttcggaggcttccgtgtgcaggggggcatggcgggccaggtacccccaggctacagcactggaggtggagggggcccccagccactccgtcgacagccaccccccttccctcccaatcctatgggccctgctttcaacatgcccccccagggtcctggctacccacccccaggcaacatgaactttcccagccaacccttcaaccagcctctgggtcaaaactttagtcctcccagtgggcagatgatgccgggcccagtggggggatttggtcccatgatctcacccaccatgggacagcctcccagagcagagctgggcccaccttctctgtcccaacgatttgctcagccaggggctccttttggcccttctcctctccagagacctggtcaggggctccccagcctgccgcctaacacaagtccctttcctggtccggaccctggctttcctggccctggtggtgaggatggggggaagcccttgaatccacctgcttctactgcttttccccaggagccccactcaggctccccggctgctgctgttaatgggaaccagcccagtttccccccgaacagcagtgggcggggtgggggcactccagatgccaacagcttggcaccccctggcaaggcaggtgggggctccgggccccagcctcccccaggcttggtgtacccatgtggtgcctgtcggagtgaggtgaacgatgaccaggatgccattctgtgtgaggcctcctgccagaaatggttccaccgtgagtgcacaggcatgactgagagcgcctatgggctgctgaccactgaagcttctgccgtctgggcctgcgatctctgcctcaagaccaaggagatccagtctgtctacatccgtgagggcatggggcagctggtggctgctaacgatgggtgacgctggtgaagtggcccagggaagtgcacatgtctctccctgctcttccagggtgatttttttgatgtttggctcttggtccttgtttccactggctttccatccccatggggcagaaacagtggctcctgggagcagaaaaggaattgaggtgggcaggcagaagagcctggattgctcactgttttgggaaacttacatgttgagatctacagagatccaggaaaccaaagccctgctgagcagagccattttgtggctatttctggaggcccaggagtgtggctgcaagagaaaaggggctggaggaagatccggagggcaggggtgttccctctgctgatgatggatgcccctaacacctgtgcctaacacccctactgaaccccacagctccagccttagtttttggagtcaagtgttaaaggtttctggccagaggaattggggtcttgccatccctgcaatagcccttttatgggctctgggagacagctttagggaataaatggggattttcccctttttctacccactcctttgcttcctccaagacttacccaactccttccccctcagagaaccaaatagcctgaggaagcaggagagttcctggttatggcagtttcttggtgatttggggcttcaagacagtaggtgagagatgctgtcaggacgtatcttcttcataccaaagtcactggtcctttctcagcctctctcgtgcttttctcctaatgaccatatttttgccaaaaattgggatatgttatctgacagaccagaatatttgaagtttgggctgtcctgaaagtctggactttggtggtaccctcctcccccagcccatctgttgcacattatactccgtgtgttcttcaactttcggcgcccttattcccctgccttcctggcttgattgaaggaaagcttgaaaaggcgcagagccctatacctcatttcctccatgataaaaggatccaagtgaggccctgtcacagcctgtgggtaggggatgcggcgggatcctcattgccatggtactcaaaggtagaagagcctggagtttgttgcttctctttgctattctttcatatcctcttgggcctggtgattaattagcaattctcattcctctcagccaaaggcctgcactgggctttatttgtctttttttattttttaagcactgcctgccagagatgggcctggggcctgatgaggaccttagcgctgctcgttctccttttctgttcatgcacacattcctccatggggtggggaaggcaggcatggggtgtggccctcggagaagttaggagtcccccagctcaagatacagtggcaaagacctagtggtcccctacccccacttctctcagttcctggcatgaggagagaagaccctgctctggtggagctgacaacctttgaggctgggaggagagcagcctctgggcatcgttcccagtgtccctcacactaaaacggcgtagatggcaaccccccacccccaccccgtccactactttttggaacaaagtgatggcagaatgcggtggtggtgggggtcttttgtactgttggattaataaaatgattttaaaatcccaga

SEQ ID NO: 308829 - DNA, 6432 bp, Homo sapiens
aggcaggcaggcgctgggtctgagtacccctctttccccagggaggccatcagtctggtgtgtgaggctgtgccgggtgctaagggggcgacaaggaggagaaagccctgtagccgcccgctcagctctatcctggggaggagtaacctgaaatttgctggaatgccaatcactctcaccgtctccaccagcagcctcaacctcatggccgcagactgcaaacagatcatcgccaaccaccacatgcaatctatctcatttgcatccggcggggatccggacacagccgagtatgtcgcctatgttgccaaagaccctgtgaatcagagagcctgccacattctggagtgtcccgaagggcttgcccaggatgtcatcagcaccattggccaggccttcgagttgcgcttcaaacaatacctcaggaacccacccaaactggtcacccctcatgacaggatggctggctttgatggctcagcatgggatgaggaggaggaagagccacctgaccatcagtactataatgacttcccggggaaggaaccccccttggggggggtggtagacatgaggcttcgggaaggagccgctccaggggctgctcgacccactgcacccaatgcccagacccccagccacttgggagctacattgcctgtaggacagcctgttgggggagatccagaagtccgcaaacagatgccacctccaccaccctgtccagcaggcagagagctttttgatgatccctcctatgtcaacgtccagaacctagacaaggcccggcaagcagtgggtggtgctgggccccccaatcctgctatcaatggcagtgcaccccgggacctgtttgacatgaagcccttcgaagatgctcttcgcgtgcctccacctccccagtcggtgtccatggctgagcagctccgaggggagccctggttccatgggaagctgagccggcgggaggctgaggcactgctgcagctcaatggggacttcctggtacgggagagcacgaccacacctggccagtatgtgctcactggcttgcagagtgggcagcctaagcatttgctactggtggaccctgagggtgtggttcggactaaggatcaccgctttgaaagtgtcagtcaccttatcagctaccacatggacaatcacttgcccatcatctctgcgggcagcgaactgtgtctacagcaacctgtggagcggaaactgtgatctgccctagcgctctcttccagaagatgccctccaatcctttccaccctattccctaactctcgggacctcgtttgggagtgttctgtgggcttggccttgtgtcagagctgggagtagcatggactctgggtttcatatccagctgagtgagagggtttgagtcaaaagcctgggtgagaatcctgcctctccccaaacattaatcaccaaagtattaatgtacagagtggcccctcacctgggcctttcctgtgccaacctgatgccccttccccaagaaggtgagtgcttgtcatggaaaatgtcctgtggtgacaggcccagtggaacagtcacccttctgggcaagggggaacaaatcacacctctgggcttcagggtatcccagacccctctcaacacccgccccccccatgtttaaactttgtgcctttgaccatctcttaggtctaatgatattttatgcaaacagttcttggacccctgaattcaatgacagggatgccaacaccttcttggcttctgggacctgtgttcttgctgagcaccctctccggtttgggttgggataacagaggcaggagtggcagctgtcccctctccctggggatatgcaacccttagagattgccccagagccccactcccggccaggcgggagatggacccctcccttgctcagtgcctcctggccggggcccctcaccccaaggggtctgtatatacatttcataaggcctgccctcccatgttgcatgcctatgtactctacgccaaagtgcagcccttcctcctgaagcctctgccctgcctccctttctgggagggcggggtgggggtgactgaatttgggcctcttgtacagttaactctcccaggtggattttgtggaggtgagaaaaggggcattgagactataaagcagtagacaatccccacataccatctgtagagttggaactgcattcttttaaagttttatatgcatatattttagggctgtagacttactttcctattttcttttccattgcttattcttgagcacaaaatgataatcaattattacatttatacatcacctttttgacttttccaagcccttttacagctcttggcattttcctcgcctaggcctgtgaggtaactgggatcgcaccttttataccagagacctgaggcagatgaaatttatttccatctaggactagaaaaacttgggtctcttaccgcgagactgagaggcagaagtcagcccgaatgcctgtcagtttcatggaggggaaacgcaaaacctgcagttcctgagtaccttctacaggcccggcccagcctaggcccggggtggccacaccacagcaagccggccccccctcttttggccttgtggataagggagagttgaccgttttcatcctggcctccttttgctgtttggatgtttccacgggtctcacttataccaaagggaaaactcttcattaaagtccgtatttcttctacctctgcctcttaacccttctgggaagcctattgtgtacgccgcgggccctcagcggcagacggggaggcgggaggtcgcggccgcccagggaagctgggggtctgcagagtttgggtgcggcagagtggggcgtttcgcgccaccgtccccatggggatgtcgtgtccgcagagggggctggctccgggtgggtcgaggcgggagccgggcctgcccggcgccccagcaccggcccccgggctacctgggcctcccgggtgcgccttcggctcgcgcgcgcccctccgcggcggctccaccgcccgggatggtacggtccggcagccgggccgcgcgctgccgcccctcggtgagctggtgtgggccgccgctagcggagacgaccctttccactcgcgtggtgccgtggtaagcctcgtccctcgcccgccgcctgttttcaggcgtagcgtctcgtccggtccttgctccccctccccgcagcgctcagtggtggtggccgcgacgagttccggttccggttgctgccgccgctggcgggcggcgagtctggagagagcgcgcagtttgcgcggcggctcggcgcttccctgtcgtcgcactttgtggttgctgcagctcgggggcctgggctgcccctgacaccccttctgggcgatggtgcagcccaagggcgcctccatcccccgccgctgccgctaacccgggtcccccactccatggccgcctcggcgccgcccccaccggacaagctggagggaggtggcggccccgcaccgccccctgcgccgcccagcaccgggaggaagcagggcaaggccggtctgcaaatgaagagtccagaaaagaagcgaaggaagtcaaatactcagggccctgcatactcacatctgacggagtttgcaccacccccaactcccatggtggatcacctggttgcatccaacccttttgaagatgacttcggagcccccaaagtgggggttgcagcccctccattccttggcagtcctgtgcccttcggaggcttccgtgtgcaggggggcatggcgggccaggtacccccaggctacagcactggaggtggagggggcccccagccactccgtcgacagccaccccccttccctcccaatcctatgggccctgctttcaacatgcccccccagggtcctggctacccacccccaggcaacatgaactttcccagccaacccttcaaccagcctctgggtcaaaactttagtcctcccagtgggcagatgatgccgggcccagtggggggatttggtcccatgatctcacccaccatgggacagcctcccagagcagagctgggcccaccttctctgtcccaacgatttgctcagccaggggctccttttggcccttctcctctccagagacctggtcaggggctccccagcctgccgcctaacacaagtccctttcctggtccggaccctggctttcctggccctggtggtgaggatggggggaagcccttgaatccacctgcttctactgcttttccccaggagccccactcaggctccccggctgctgctgttaatgggaaccagcccagtttccccccgaacagcagtgggcggggtgggggcactccagatgccaacagcttggcaccccctggcaaggcaggtgggggctccgggccccagcctcccccaggcttggtgtacccatgtggtgcctgtcggagtgaggtgaacgatgaccaggatgccattctgtgtgaggcctcctgccagaaatggttccaccgtgagtgcacaggcatgactgagagcgcctatgggctgctgaccactgaagcttctgccgtctgggcctgcgatctctgcctcaagaccaaggagatccagtctgtctacatccgtgagggcatggggcagctggtggctgctaacgatgggtgacgctggtgaagtggcccagggaagtgcacatgtctctccctgctcttccagggtgatttttttgatgtttggctcttggtccttgtttccactggctttccatccccatggggcagaaacagtggctcctgggagcagaaaaggaattgaggtgggcaggcagaagagcctggattgctcactgttttgggaaacttacatgttgagatctacagagatccaggaaaccaaagccctgctgagcagagccattttgtggctatttctggaggcccaggagtgtggctgcaagagaaaaggggctggaggaagatccggagggcaggggtgttccctctgctgatgatggatgcccctaacacctgtgcctaacacccctactgaaccccacagctccagccttagtttttggagtcaagtgttaaaggtttctggccagaggaattggggtcttgccatccctgcaatagcccttttatgggctctgggagacagctttagggaataaatggggattttcccctttttctacccactcctttgcttcctccaagacttacccaactccttccccctcagagaaccaaatagcctgaggaagcaggagagttcctggttatggcagtttcttggtgatttggggcttcaagacagtaggtgagagatgctgtcaggacgtatcttcttcataccaaagtcactggtcctttctcagcctctctcgtgcttttctcctaatgaccatatttttgccaaaaattgggatatgttatctgacagaccagaatatttgaagtttgggctgtcctgaaagtctggactttggtggtaccctcctcccccagcccatctgttgcacattatactccgtgtgttcttcaactttcggcgcccttattcccctgccttcctggcttgattgaaggaaagcttgaaaaggcgcagagccctatacctcatttcctccatgataaaaggatccaagtgaggccctgtcacagcctgtgggtaggggatgcggcgggatcctcattgccatggtactcaaaggtagaagagcctggagtttgttgcttctctttgctattctttcatatcctcttgggcctggtgattaattagcaattctcattcctctcagccaaaggcctgcactgggctttatttgtctttttttattttttaagcactgcctgccagagatgggcctggggcctgatgaggaccttagcgctgctcgttctccttttctgttcatgcacacattcctccatggggtggggaaggcaggcatggggtgtggccctcggagaagttaggagtcccccagctcaagatacagtggcaaagacctagtggtcccctacccccacttctctcagttcctggcatgaggagagaagaccctgctctggtggagctgacaacctttgaggctgggaggagagcagcctctgggcatcgttcccagtgtccctcacactaaaacggcgtagatggcaaccccccacccccaccccgctgctcaactcttgtgtttgttgttctgtttgccccatttatctgttgctgtttttgtgttgtcttcccctgctccgcattttgtaaaatggcccctgggggagtgtttttgctggatctgctccctctcgctctctcactccactactttttggaacaaagtgatggcagaatgcggtggtggtgggggtcttttgtactgttggattaataaaatgattttaaaatcccaga

SEQ ID NO: 308830 - DNA, 6892 bp, Homo sapiens
aagaggctccacgttgggcggggatggggcctgaaactgtctgggtctgagctggggagcggaagccacttgtccctctccctccccaggacttctgtgactcctgggccacagaggtccaaccaggctaagggcctggggataccccctgcctggcccccttgcccaaactggcaggggggccaggctgggcagcagcccctctttcacctcaactatggatctcctgccccccaagcccaagtacaatccactccggaatgagtctctgtcatcgctggaggaaggggcttctgggtccacccccccggaggagctgccttccccatcagcttcatccctggggcccatcctgcctcctctgcctggggacgatagtcccactaccctgtgctccttcttcccccggatgagcaacctgaggctggccaacccggctggggggcgcccagggtctaagggggagccaggaagggcagctgatgatggggaggggatcgtaggggcagccatgccagactcaggccccctacccctcctccaggacatgaacaagctgagtggaggcggcgggcgcaggactcgggtggaagggggccagcttgggggcgaggagtggacccgccacgggagctttgtcaataagcccacgcggggctggctgcatcccaacgacaaagtcatgggacccggggtttcctacttggttcggtacatgggttgtgtggaggtcctccagtcaatgcgtgccctggacttcaacacccggactcaggtcaccagggaggccatcagtctggtgtgtgaggctgtgccgggtgctaagggggcgacaaggaggagaaagccctgtagccgcccgctcagctctatcctggggaggagtaacctgaaatttgctggaatgccaatcactctcaccgtctccaccagcagcctcaacctcatggccgcagactgcaaacagatcatcgccaaccaccacatgcaatctatctcatttgcatccggcggggatccggacacagccgagtatgtcgcctatgttgccaaagaccctgtgaatcagagagcctgccacattctggagtgtcccgaagggcttgcccaggatgtcatcagcaccattggccaggccttcgagttgcgcttcaaacaatacctcaggaacccacccaaactggtcacccctcatgacaggatggctggctttgatggctcagcatgggatgaggaggaggaagagccacctgaccatcagtactataatgacttcccggggaaggaaccccccttggggggggtggtagacatgaggcttcgggaaggagccgctccaggggctgctcgacccactgcacccaatgcccagacccccagccacttgggagctacattgcctgtaggacagcctgttgggggagatccagaagtccgcaaacagatgccacctccaccaccctgtccagcaggcagagagctttttgatgatccctcctatgtcaacgtccagaacctagacaaggcccggcaagcagtgggtggtgctgggccccccaatcctgctatcaatggcagtgcaccccgggacctgtttgacatgaagcccttcgaagatgctcttcgcgtgcctccacctccccagtcggtgtccatggctgagcagctccgaggggagccctggttccatgggaagctgagccggcgggaggctgaggcactgctgcagctcaatggggacttcctggtacgggagagcacgaccacacctggccagtatgtgctcactggcttgcagagtgggcagcctaagcatttgctactggtggaccctgagggtgtggttcggactaaggatcaccgctttgaaagtgtcagtcaccttatcagctaccacatggacaatcacttgcccatcatctctgcgggcagcgaactgtgtctacagcaacctgtggagcggaaactgtgatctgccctagcgctctcttccagaagatgccctccaatcctttccaccctattccctaactctcgggacctcgtttgggagtgttctgtgggcttggccttgtgtcagagctgggagtagcatggactctgggtttcatatccagctgagtgagagggtttgagtcaaaagcctgggtgagaatcctgcctctccccaaacattaatcaccaaagtattaatgtacagagtggcccctcacctgggcctttcctgtgccaacctgatgccccttccccaagaaggtgagtgcttgtcatggaaaatgtcctgtggtgacaggcccagtggaacagtcacccttctgggcaagggggaacaaatcacacctctgggcttcagggtatcccagacccctctcaacacccgccccccccatgtttaaactttgtgcctttgaccatctcttaggtctaatgatattttatgcaaacagttcttggacccctgaattcaatgacagggatgccaacaccttcttggcttctgggacctgtgttcttgctgagcaccctctccggtttgggttgggataacagaggcaggagtggcagctgtcccctctccctggggatatgcaacccttagagattgccccagagccccactcccggccaggcgggagatggacccctcccttgctcagtgcctcctggccggggcccctcaccccaaggggtctgtatatacatttcataaggcctgccctcccatgttgcatgcctatgtactctacgccaaagtgcagcccttcctcctgaagcctctgccctgcctccctttctgggagggcggggtgggggtgactgaatttgggcctcttgtacagttaactctcccaggtggattttgtggaggtgagaaaaggggcattgagactataaagcagtagacaatccccacataccatctgtagagttggaactgcattcttttaaagttttatatgcatatattttagggctgtagacttactttcctattttcttttccattgcttattcttgagcacaaaatgataatcaattattacatttatacatcacctttttgacttttccaagcccttttacagctcttggcattttcctcgcctaggcctgtgaggtaactgggatcgcaccttttataccagagacctgaggcagatgaaatttatttccatctaggactagaaaaacttgggtctcttaccgcgagactgagaggcagaagtcagcccgaatgcctgtcagtttcatggaggggaaacgcaaaacctgcagttcctgagtaccttctacaggcccggcccagcctaggcccggggtggccacaccacagcaagccggccccccctcttttggccttgtggataagggagagttgaccgttttcatcctggcctccttttgctgtttggatgtttccacgggtctcacttataccaaagggaaaactcttcattaaagtccgtatttcttctacctctgcctcttaacccttctgggaagcctattgtgtacgccgcgggccctcagcggcagacggggaggcgggaggtcgcggccgcccagggaagctgggggtctgcagagtttgggtgcggcagagtggggcgtttcgcgccaccgtccccatggggatgtcgtgtccgcagagggggctggctccgggtgggtcgaggcgggagccgggcctgcccggcgccccagcaccggcccccgggctacctgggcctcccgggtgcgccttcggctcgcgcgcgcccctccgcggcggctccaccgcccgggatggtacggtccggcagccgggccgcgcgctgccgcccctcggtgagctggtgtgggccgccgctagcggagacgaccctttccactcgcgtggtgccgtggtaagcctcgtccctcgcccgccgcctgttttcaggcgtagcgtctcgtccggtccttgctccccctccccgcagcgctcagtggtggtggccgcgacgagttccggttccggttgctgccgccgctggcgggcggcgagtctggagagagcgcgcagtttgcgcggcggctcggcgcttccctgtcgtcgcactttgtggttgctgcagctcgggggcctgggctgcccctgacaccccttctgggcgatggtgcagcccaagggcgcctccatcccccgccgctgccgctaacccgggtcccccactccatggccgcctcggcgccgcccccaccggacaagctggagggaggtggcggccccgcaccgccccctgcgccgcccagcaccgggaggaagcagggcaaggccggtctgcaaatgaagagtccagaaaagaagcgaaggaagtcaaatactcagggccctgcatactcacatctgacggagtttgcaccacccccaactcccatggtggatcacctggttgcatccaacccttttgaagatgacttcggagcccccaaagtgggggttgcagcccctccattccttggcagtcctgtgcccttcggaggcttccgtgtgcaggggggcatggcgggccaggtacccccaggctacagcactggaggtggagggggcccccagccactccgtcgacagccaccccccttccctcccaatcctatgggccctgctttcaacatgcccccccagggtcctggctacccacccccaggcaacatgaactttcccagccaacccttcaaccagcctctgggtcaaaactttagtcctcccagtgggcagatgatgccgggcccagtggggggatttggtcccatgatctcacccaccatgggacagcctcccagagcagagctgggcccaccttctctgtcccaacgatttgctcagccaggggctccttttggcccttctcctctccagagacctggtcaggggctccccagcctgccgcctaacacaagtccctttcctggtccggaccctggctttcctggccctggtggtgaggatggggggaagcccttgaatccacctgcttctactgcttttccccaggagccccactcaggctccccggctgctgctgttaatgggaaccagcccagtttccccccgaacagcagtgggcggggtgggggcactccagatgccaacagcttggcaccccctggcaaggcaggtgggggctccgggccccagcctcccccaggcttggtgtacccatgtggtgcctgtcggagtgaggtgaacgatgaccaggatgccattctgtgtgaggcctcctgccagaaatggttccaccgtgagtgcacaggcatgactgagagcgcctatgggctgctgaccactgaagcttctgccgtctgggcctgcgatctctgcctcaagaccaaggagatccagtctgtctacatccgtgagggcatggggcagctggtggctgctaacgatgggtgacgctggtgaagtggcccagggaagtgcacatgtctctccctgctcttccagggtgatttttttgatgtttggctcttggtccttgtttccactggctttccatccccatggggcagaaacagtggctcctgggagcagaaaaggaattgaggtgggcaggcagaagagcctggattgctcactgttttgggaaacttacatgttgagatctacagagatccaggaaaccaaagccctgctgagcagagccattttgtggctatttctggaggcccaggagtgtggctgcaagagaaaaggggctggaggaagatccggagggcaggggtgttccctctgctgatgatggatgcccctaacacctgtgcctaacacccctactgaaccccacagctccagccttagtttttggagtcaagtgttaaaggtttctggccagaggaattggggtcttgccatccctgcaatagcccttttatgggctctgggagacagctttagggaataaatggggattttcccctttttctacccactcctttgcttcctccaagacttacccaactccttccccctcagagaaccaaatagcctgaggaagcaggagagttcctggttatggcagtttcttggtgatttggggcttcaagacagtaggtgagagatgctgtcaggacgtatcttcttcataccaaagtcactggtcctttctcagcctctctcgtgcttttctcctaatgaccatatttttgccaaaaattgggatatgttatctgacagaccagaatatttgaagtttgggctgtcctgaaagtctggactttggtggtaccctcctcccccagcccatctgttgcacattatactccgtgtgttcttcaactttcggcgcccttattcccctgccttcctggcttgattgaaggaaagcttgaaaaggcgcagagccctatacctcatttcctccatgataaaaggatccaagtgaggccctgtcacagcctgtgggtaggggatgcggcgggatcctcattgccatggtactcaaaggtagaagagcctggagtttgttgcttctctttgctattctttcatatcctcttgggcctggtgattaattagcaattctcattcctctcagccaaaggcctgcactgggctttatttgtctttttttattttttaagcactgcctgccagagatgggcctggggcctgatgaggaccttagcgctgctcctgctcaactcttgtgtttgttgttctgtttgccccatttatctgttgctgtttttgtgttgtcttcccctgctccgcattttgtaaaatggcccctgggggagtgtttttgctggatctgctccctctcgctctctcactccactactttttggaacaaagtgatggcagaatgcggtggtggtgggggtcttttgtactgttggattaataaaatgattttaaaatcccaga

SEQ ID NO: 308831 - DNA, 3895 bp, Homo sapiens
  misc_feature (3508)..(3508): n is a, c, g, or t
  misc_feature (3513)..(3513): n is a, c, g, or t
  misc_feature (3515)..(3515): n is a, c, g, or t
aagaggctccacgttgggcggggatggggcctgaaactgtctgggtctgagctggggagcggaagccacttgtccctctccctccccaggacttctgtgactcctgggccacagaggtccaaccaggctaagggcctggggataccccctgcctggcccccttgcccaaactggcaggggggccaggctgggcagcagcccctctttcacctcaactatggatctcctgccccccaagcccaagtacaatccactccggaatgagtctctgtcatcgctggaggaaggggcttctgggtccacccccccggaggagctgccttccccatcagcttcatccctggggcccatcctgcctcctctgcctggggacgatagtcccactaccctgtgctccttcttcccccggatgagcaacctgaggctggccaacccggctggggggcgcccagggtctaagggggagccaggaagggcagctgatgatggggaggggatcgtaggggcagccatgccagactcaggccccctacccctcctccaggacatgaacaagctgagtggaggcggcgggcgcaggactcgggtggaagggggccagcttgggggcgaggagtggacccgccacgggagctttgtcaataagcccacgcggggctggctgcatcccaacgacaaagtcatgggacccggggtttcctacttggttcggtacatgggttgtgtggaggtcctccagtcaatgcgtgccctggacttcaacacccggactcaggtcaccagggaggccatcagtctggtgtgtgaggctgtgccgggtgctaagggggcgacaaggaggagaaagccctgtagccgcccgctcagctctatcctggggaggagtaacctgaaatttgctggaatgccaatcactctcaccgtctccaccagcagcctcaacctcatggccgcagactgcaaacagatcatcgccaaccaccacatgcaatctatctcatttgcatccggcggggatccggacacagccgagtatgtcgcctatgttgccaaagaccctgtgaatcagagagcctgccacattctggagtgtcccgaagggcttgcccaggatgtcatcagcaccattggccaggccttcgagttgcgcttcaaacaatacctcaggaacccacccaaactggtcacccctcatgacaggatggctggctttgatggctcagcatgggatgaggaggaggaagagccacctgaccatcagtactataatgacttcccggggaaggaaccccccttggggggggtggtagacatgaggcttcgggaaggagccgctccaggggctgctcgacccactgcacccaatgcccagacccccagccacttgggagctacattgcctgtaggacagcctgttgggggagatccagaagtccgcaaacagatgccacctccaccaccctgtccagcaggcagagagctttttgatgatccctcctatgtcaacgtccagaacctagacaaggcccggcaagcagtgggtggtgctgggccccccaatcctgctatcaatggcagtgcaccccgggacctgtttgacatgaagcccttcgaagatgctcttcgcgtgcctccacctccccagtcggtgtccatggctgagcagctccgaggggagccctggttccatgggaagctgagccggcgggaggctgaggcactgctgcagctcaatggggacttcctggtacgggagagcacgaccacacctggccagtatgtgctcactggcttgcagagtgggcagcctaagcatttgctactggtggaccctgagggtgtggttcggactaaggatcaccgctttgaaagtgtcagtcaccttatcagctaccacatggacaatcacttgcccatcatctctgcgggcagcgaactgtgtctacagcaacctgtggagcggaaactgtgatctgccctagcgctctcttccagaagatgccctccaatcctttccaccctattccctaactctcgggacctcgtttgggagtgttctgtgggcttggccttgtgtcagagctgggagtagcatggactctgggtttcatatccagctgagtgagagggtttgagtcaaaagcctgggtgagaatcctgcctctccccaaacattaatcaccaaagtattaatgtacagagtggcccctcacctgggcctttcctgtgccaacctgatgccccttccccaagaaggtgagtgcttgtcatggaaaatgtcctgtggtgacaggcccagtggaacagtcacccttctgggcaagggggaacaaatcacacctctgggcttcagggtatcccagacccctctcaacacccgccccccccatgtttaaactttgtgcctttgaccatctcttaggtctaatgatattttatgcaaacagttcttggacccctgaattcaatgacagggatgccaacaccttcttggcttctgggacctgtgttcttgctgagcaccctctccggtttgggttgggataacagaggcaggagtggcagctgtcccctctccctggggatatgcaacccttagagattgccccagagccccactcccggccaggcgggagatggacccctcccttgctcagtgcctcctggccggggcccctcaccccaaggggtctgtatatacatttcataaggcctgccctcccatgttgcatgcctatgtactctacgccaaagtgcagcccttcctcctgaagcctctgccctgcctccctttctgggagggcggggtgggggtgactgaatttgggcctcttgtacagttaactctcccaggtggattttgtggaggtgagaaaaggggcattgagactataaagcagtagacaatccccacataccatctgtagagttggaactgcattcttttaaagttttatatgcatatattttagggctgtagacttactttcctattttcttttccattgcttattcttgagcacaaaatgataatcaattattacatttatacatcacctttttgacttttccaagcccttttacagctcttggcattttcctcgcctaggcctgtgaggtaactgggatcgcaccttttataccagagacctgaggcagatgaaatttatttccatctaggactagaaaaacttgggtctcttaccgcgagactgagaggcagaagtcagcccgaatgcctgtcagtttcatggaggggaaacgcaaaacctgcagttcctgagtaccttctacaggcccggcccagcctaggcccggggtggccacaccacagcaagccggccccccctcttttggccttgtggataagggagagttgaccgttttcatcctggcctccttttgctgtttggatgtttccacgggtctcacttataccaaagggaaaactcttcattaaagtccgtatttcttctaaaaaaaaaaaaaaaaacaaaaaaaaaaaaanaaaananaaaaaaaaaaaaaaaaaaacaaaaacaaaaaaaaaacaaaaaacacacaaacaaaaaagaaaagacaacaaaacaaaaaaaacaaaaaaaaaaaaaagaggggggggggcccacacaaaacctgacaggcgtacgcgcacagcaccgagagacgagccccacagatatgaagaaaagagggacgccaggaggggggggagatagcacacaggaagagagagagggagagagacgccaaaaacggaggaggaggggcagcacaaaagcgagagagcagacgagaaaggagaaagcgaagcccacaacaggggggggagaagcagcgcaagggcgacacagtacaacgacacgagcgagaagaagacagaggcgagaacaga

SEQ ID NO: 308832 - DNA, 6080 bp, Homo sapiens
aagaggctccacgttgggcggggatggggcctgaaactgtctgggtctgagctggggagcggaagccacttgtccctctccctccccaggacttctgtgactcctgggccacagaggtccaaccaggctaagggcctggggataccccctgcctggcccccttgcccaaactggcaggggggccaggctgggcagcagcccctctttcacctcaactatggatctcctgccccccaagcccaagtacaatccactccggaatgagtctctgtcatcgctggaggaaggggcttctgggtccacccccccggaggagctgccttccccatcagcttcatccctggggcccatcctgcctcctctgcctggggacgatagtcccactaccctgtgctccttcttcccccggatgagcaacctgaggctggccaacccggctggggggcgcccagggtctaagggggagccaggaagggcagctgatgatggggaggggatcgtaggggcagccatgccagactcaggccccctacccctcctccaggacatgaacaagctgagtggaggcggcgggcgcaggactcgggtggaagggggccagcttgggggcgaggagtggacccgccacgggagctttgtcaataagcccacgcggggctggctgcatcccaacgacaaagtcatgggacccggggtttcctacttggttcggtacatgggttgtgtggaggtcctccagtcaatgcgtgccctggacttcaacacccggactcaggtcaccagggaggccatcagtctggtgtgtgaggctgtgccgggtgctaagggggcgacaaggaggagaaagccctgtagccgcccgctcagctctatcctggggaggagtaacctgaaatttgctggaatgccaatcactctcaccgtctccaccagcagcctcaacctcatggccgcagactgcaaacagatcatcgccaaccaccacatgcaatctatctcatttgcatccggcggggatccggacacagccgagtatgtcgcctatgttgccaaagaccctgtgaatcagagagcctgccacattctggagtgtcccgaagggcttgcccaggatgtcatcagcaccattggccaggccttcgagttgcgcttcaaacaatacctcaggaacccacccaaactggtcacccctcatgacaggatggctggctttgatggctcagcatgggatgaggaggaggaagagccacctgaccatcagtactataatgacttcccggggaaggaaccccccatgtttaaactttgtgcctttgaccatctcttaggtctaatgatattttatgcaaacagttcttggacccctgaattcaatgacagggatgccaacaccttcttggcttctgggacctgtgttcttgctgagcaccctctccggtttgggttgggataacagaggcaggagtggcagctgtcccctctccctggggatatgcaacccttagagattgccccagagccccactcccggccaggcgggagatggacccctcccttgctcagtgcctcctggccggggcccctcaccccaaggggtctgtatatacatttcataaggcctgccctcccatgttgcatgcctatgtactctacgccaaagtgcagcccttcctcctgaagcctctgccctgcctccctttctgggagggcggggtgggggtgactgaatttgggcctcttgtacagttaactctcccaggtggattttgtggaggtgagaaaaggggcattgagactataaagcagtagacaatccccacataccatctgtagagttggaactgcattcttttaaagttttatatgcatatattttagggctgtagacttactttcctattttcttttccattgcttattcttgagcacaaaatgataatcaattattacatttatacatcacctttttgacttttccaagcccttttacagctcttggcattttcctcgcctaggcctgtgaggtaactgggatcgcaccttttataccagagacctgaggcagatgaaatttatttccatctaggactagaaaaacttgggtctcttaccgcgagactgagaggcagaagtcagcccgaatgcctgtcagtttcatggaggggaaacgcaaaacctgcagttcctgagtaccttctacaggcccggcccagcctaggcccggggtggccacaccacagcaagccggccccccctcttttggccttgtggataagggagagttgaccgttttcatcctggcctccttttgctgtttggatgtttccacgggtctcacttataccaaagggaaaactcttcattaaagtccgtatttcttctacctctgcctcttaacccttctgggaagcctattgtgtacgccgcgggccctcagcggcagacggggaggcgggaggtcgcggccgcccagggaagctgggggtctgcagagtttgggtgcggcagagtggggcgtttcgcgccaccgtccccatggggatgtcgtgtccgcagagggggctggctccgggtgggtcgaggcgggagccgggcctgcccggcgccccagcaccggcccccgggctacctgggcctcccgggtgcgccttcggctcgcgcgcgcccctccgcggcggctccaccgcccgggatggtacggtccggcagccgggccgcgcgctgccgcccctcggtgagctggtgtgggccgccgctagcggagacgaccctttccactcgcgtggtgccgtggtaagcctcgtccctcgcccgccgcctgttttcaggcgtagcgtctcgtccggtccttgctccccctccccgcagcgctcagtggtggtggccgcgacgagttccggttccggttgctgccgccgctggcgggcggcgagtctggagagagcgcgcagtttgcgcggcggctcggcgcttccctgtcgtcgcactttgtggttgctgcagctcgggggcctgggctgcccctgacaccccttctgggcgatggtgcagcccaagggcgcctccatcccccgccgctgccgctaacccgggtcccccactccatggccgcctcggcgccgcccccaccggacaagctggagggaggtggcggccccgcaccgccccctgcgccgcccagcaccgggaggaagcagggcaaggccggtctgcaaatgaagagtccagaaaagaagcgaaggaagtcaaatactcagggccctgcatactcacatctgacggagtttgcaccacccccaactcccatggtggatcacctggttgcatccaacccttttgaagatgacttcggagcccccaaagtgggggttgcagcccctccattccttggcagtcctgtgcccttcggaggcttccgtgtgcaggggggcatggcgggccaggtacccccaggctacagcactggaggtggagggggcccccagccactccgtcgacagccaccccccttccctcccaatcctatgggccctgctttcaacatgcccccccagggtcctggctacccacccccaggcaacatgaactttcccagccaacccttcaaccagcctctgggtcaaaactttagtcctcccagtgggcagatgatgccgggcccagtggggggatttggtcccatgatctcacccaccatgggacagcctcccagagcagagctgggcccaccttctctgtcccaacgatttgctcagccaggggctccttttggcccttctcctctccagagacctggtcaggggctccccagcctgccgcctaacacaagtccctttcctggtccggaccctggctttcctggccctggtggtgaggatggggggaagcccttgaatccacctgcttctactgcttttccccaggagccccactcaggctccccggctgctgctgttaatgggaaccagcccagtttccccccgaacagcagtgggcggggtgggggcactccagatgccaacagcttggcaccccctggcaaggcaggtgggggctccgggccccagcctcccccaggcttggtgtacccatgtggtgcctgtcggagtgaggtgaacgatgaccaggatgccattctgtgtgaggcctcctgccagaaatggttccaccgtgagtgcacaggcatgactgagagcgcctatgggctgctgaccactgaagcttctgccgtctgggcctgcgatctctgcctcaagaccaaggagatccagtctgtctacatccgtgagggcatggggcagctggtggctgctaacgatgggtgacgctggtgaagtggcccagggaagtgcacatgtctctccctgctcttccagggtgatttttttgatgtttggctcttggtccttgtttccactggctttccatccccatggggcagaaacagtggctcctgggagcagaaaaggaattgaggtgggcaggcagaagagcctggattgctcactgttttgggaaacttacatgttgagatctacagagatccaggaaaccaaagccctgctgagcagagccattttgtggctatttctggaggcccaggagtgtggctgcaagagaaaaggggctggaggaagatccggagggcaggggtgttccctctgctgatgatggatgcccctaacacctgtgcctaacacccctactgaaccccacagctccagccttagtttttggagtcaagtgttaaaggtttctggccagaggaattggggtcttgccatccctgcaatagcccttttatgggctctgggagacagctttagggaataaatggggattttcccctttttctacccactcctttgcttcctccaagacttacccaactccttccccctcagagaaccaaatagcctgaggaagcaggagagttcctggttatggcagtttcttggtgatttggggcttcaagacagtaggtgagagatgctgtcaggacgtatcttcttcataccaaagtcactggtcctttctcagcctctctcgtgcttttctcctaatgaccatatttttgccaaaaattgggatatgttatctgacagaccagaatatttgaagtttgggctgtcctgaaagtctggactttggtggtaccctcctcccccagcccatctgttgcacattatactccgtgtgttcttcaactttcggcgcccttattcccctgccttcctggcttgattgaaggaaagcttgaaaaggcgcagagccctatacctcatttcctccatgataaaaggatccaagtgaggccctgtcacagcctgtgggtaggggatgcggcgggatcctcattgccatggtactcaaaggtagaagagcctggagtttgttgcttctctttgctattctttcatatcctcttgggcctggtgattaattagcaattctcattcctctcagccaaaggcctgcactgggctttatttgtctttttttattttttaagcactgcctgccagagatgggcctggggcctgatgaggaccttagcgctgctcgttctccttttctgttcatgcacacattcctccatggggtggggaaggcaggcatggggtgtggccctcggagaagttaggagtcccccagctcaagatacagtggcaaagacctagtggtcccctacccccacttctctcagttcctggcatgaggagagaagaccctgctctggtggagctgacaacctttgaggctgggaggagagcagcctctgggcatcgttcccagtgtccctcacactaaaacggcgtagatggcaaccccccacccccaccccgctgctcaactcttgtgtttgttgttctgtttgccccatttatctgttgctgtttttgtgttgtcttcccctgctccgcattttgtaaaatggcccctgggggagtgtttttgctggatctgctccctctcgctctctcactccactactttttggaacaaagtgatggcagaatgcggtggtggtgggggtcttttgtactgttggattaataaaatgattttaaaatcccaga

SEQ ID NO: 308833 - DNA, 2955 bp, Homo sapiens
aagaggctccacgttgggcggggatggggcctgaaactgtctgggtctgagctggggagcggaagccacttgtccctctccctccccaggacttctgtgactcctgggccacagaggtccaaccaggctaagggcctggggataccccctgcctggcccccttgcccaaactggcaggggggccaggctgggcagcagcccctctttcacctcaactatggatctcctgccccccaagcccaagtacaatccactccggaatgagtctctgtcatcgctggaggaaggggcttctgggtccacccccccggaggagctgccttccccatcagcttcatccctggggcccatcctgcctcctctgcctggggacgatagtcccactaccctgtgctccttcttcccccggatgagcaacctgaggctggccaacccggctggggggcgcccagggtctaagggggagccaggaagggcagctgatgatggggaggggatcgtaggggcagccatgccagactcaggccccctacccctcctccaggacatgaacaagctgagtggaggcggcgggcgcaggactcgggtggaagggggccagcttgggggcgaggagtggacccgccacgggagctttgtcaataagcccacgcggggctggctgcatcccaacgacaaagtcatgggacccggggtttcctacttggttcggtacatgggttgtgtggaggtcctccagtcaatgcgtgccctggacttcaacacccggactcaggtcaccagggaggccatcagtctggtgtgtgaggctgtgccgggtgctaagggggcgacaaggaggagaaagccctgtagccgcccgctcagctctatcctggggaggagtaacctgaaatttgctggaatgccaatcactctcaccgtctccaccagcagcctcaacctcatggccgcagactgcaaacagatcatcgccaaccaccacatgcaatctatctcatttgcatccggcggggatccggacacagccgagtatgtcgcctatgttgccaaagaccctgtgaatcagagagcctgccacattctggagtgtcccgaagggcttgcccaggatgtcatcagcaccattggccaggccttcgagttgcgcttcaaacaatacctcaggaacccacccaaactggtcacccctcatgacaggatggctggctttgatggctcagcatgggatgaggaggaggaagagccacctgaccatcagtactataatgacttcccggggaaggaaccccccttggggggggtggtagacatgaggcttcgggaaggagccgctccaggggctgctcgacccactgcacccaatgcccagacccccagccacttgggagctacattgcctgtaggacagcctgttgggggagatccagaagtccgcaaacagatgccacctccaccaccctgtccagcaggcagagagctttttgatgatccctcctatgtcaacgtccagaacctagacaaggcccggcaagcagtgggtggtgctgggccccccaatcctgctatcaatggcagtgcaccccgggacctgtttgacatgaagcccttcgaagatgctcttcgcgtgcctccacctccccagtcggtgtccatggctgagcagctccgaggggagccctggttccatgggaagctgagccggcgggaggctgaggcactgctgcagctcaatggggacttcctggtacgggagagcacgaccacacctggccagtatgtgctcactggcttgcagagtgggcagcctaagcatttgctactggtggaccctgagggtgtggttcggactaaggatcaccgctttgaaagtgtcagtcaccttatcagctaccacatggacaatcacttgcccatcatctctgcgggcagcgaactgtgtctacagcaacctgtggagcggaaactgtgatctgccctagcgctctcttccagaagatgccctccaatcctttccaccctattccctaactctcgggacctcgtttgggagtgttctgtgggcttggccttgtgtcagagctgggagtagcatggactctgggtttcatatccagctgagtgagagggtttgagtcaaaagcctgggtgagaatcctgcctctccccaaacattaatcaccaaagtattaatgtacagagtggcccctcacctgggcctttcctgtgccaacctgatgccccttccccaagaaggtgagtgcttgtcatggaaaatgtcctgtggtgacaggcccagtggaacagtcacccttctgggcaagggggaacaaatcacacctctgggcttcagggtatcccagacccctctcaacacccgccccccccatgtttaaactttgtgcctttgaccatctcttaggtctaatgatattttatgcaaacagttcttggacccctgaattcaatgacagggatgccaacaccttcttggcttctgggacctgtgttcttgctgagcaccctctccggtttgggttgggataacagaggcaggagtggcagctgtcccctctccctggggatatgcaacccttagagattgccccagagccccactcccggccaggcgggagatggacccctcccttgctcagtgcctcctggccggggcccctcaccccaaggggtctgtatatacatttcataaggcctgccctcccatgttgcatgcctatgtactctacgccaaagtgcagcccttcctcctgaagcctctgccctgcctccctttctgggagggcggggtgggggtgactgaatttgggcctcttgtacagttaactcttgcaatatattttataaaattataaaaaatcattcttactataaatcattacacaattcccatattctatctatatatttctaactatatgcttttttctgtccccg

SEQ ID NO: 308834 - DNA, 1486 bp, Homo sapiens
aagaggctccacgttgggcggggatggggcctgaaactgtctgggtctgagctggggagcggaagccacttgtccctctccctccccaggacttctgtgactcctgggccacagaggtccaaccaggctaagggcctggggataccccctgcctggcccccttgcccaaactggcaggggggccaggctgggcagcagcccctctttcacctcaactatggatctcctgccccccaagcccaagtacaatccactccggaatgagtctctgtcatcgctggaggaaggggcttctgggtccacccccccggaggagctgccttccccatcagcttcatccctggggcccatcctgcctcctctgcctggggacgatagtcccactaccctgtgctccttcttcccccggatgagcaacctgaggctggccaacccggctggggggcgcccagggtctaagggggagccaggaagggcagctgatgatggggaggggatcgtaggggcagccatgccagactcaggccccctacccctcctccaggacatgaacaagctgagtggaggcggcgggcgcaggactcgggtggaagggggccagcttgggggcgaggagtggacccgccacgggagctttgtcaataagcccacgcggggctggctgcatcccaacgacaaagtcatgggacccggggtttcctacttggttcggtacatgggttgtgtggaggtcctccagtcaatgcgtgccctggacttcaacacccggactcaggtcaccagggaggccatcagtctggtgtgtgaggctgtgccgggtgctaagggggcgacaaggaggagaaagccctgtagccgcccgctcagctctatcctggggaggagtaacctgaaatttgctggaatgccaatcactctcaccgtctccaccagcagcctcaacctcatggccgcagactgcaaacagatcatcgccaaccaccacatgcaatctatctcatttgcatccggcggggatccggacacagccgagtatgtcgcctatgttgccaaagaccctgtgaatcagagagcctgccacattctggagtgtcccgaagggcttgcccaggatgtcatcagcaccattggccaggccttcgagttgcgcttcaaacaatacctcaggaacccacccaaactggtcacccctcatgacaggatggctggctttgatggctcagcatgggatgaggaggaggaagagccacctgaccatcagtactataatgacttcccggggaaggaaccccccttggggggggtggtagacatgaggcttcgggaaggagccgctccaggggctgctcgacccactgcacccaatgcccagacccccagccacttgggagctacattggcctgtaggacagcctcctcggggagatccagaagtgcgcgatactccgccgcagccctgagcaatacaatcttcctagtaacggcg

SEQ ID NO: 308835 - DNA, 2670 bp, Homo sapiens
cgggagacggaagtcttggccctgctccgctcccccgagaatcgggcctcgccctgctgggcggctggacctgggcaaagcctgggcgcgctcccgcgcagcggcgccatgaagcgctcggggactctgcggctgctctcggacctgagcgccttcggcggcgcggcgcggctccgggagctggtggccggggactcagcggtccgagtccgtggcagtccggacggccgccacttgctgctcctgcgaccccctggggcggtagccccacagctgctagtcgcgtcgcgagggcccggcgcggagctagagcgggcctggccggccggccagccctccccgctggacgccttcttcctgccgtggccagcgcggccggcgctggtgctggtgtgggagagtggcctggccgaggtgtggggcgcgggcgtggggcctggctggcggccgctgcagagcaccgagctgtgtccgggcgggggagcccgcgttgtggcagtggcggcgctccgaggccgcctggtgtggtgcgaggagcggcaggcccgggccgagggcccgtcagggtcgccagcagccgctttcagccactgtgtgtgcgtccggactctggagcccagcggggaagctagcaccagcctgggccgcacacacgtcctgctgcaccactgccctgccttcgggctgctggcctcctgcagacaactcttcctggtgcccactgccaccacctggcctggcgtggcccacgttctactcatctggagcccaggcaagggcaaagtgatggtggctgccccacggcttggtctctcctacagtaagagtctgaatcctggacgaggggacacatgggacttccggaccctgctccgaggccttcctgggttgctgtcccccagggagccactggctgtacacacctgggccccaactccccagggcctgctgttgcttgacttcgggggcactgtgagcctattgcagtcccacggtggtacgcgggctgtgggcaccctgcaggaggcacctgtaggcccgtgggggtctgcagccctaggcacatttcagggcactctggcctgtgtgctgggctccacattggaactgctggacatgggcagtgggcagctgctggagaggaaggtcctaagtacagacagggtacatctgctagaaccgccagcccccggcatggaggatgaggaagagctggagacccgagggaatcttcgtctgctttcagccttgggtctgttttgtgtgggctgggaagccccacagggtgttgagttgccttcagccaaggatctggtgtttgaggaggcctgcgggtactaccagcggcggagcctgcggggtgcccagctcactccagaagaactgagacacagcagcacattccgggcacctcaggctctggcctccatcctccagggccacctgcccccatctgcactgctgaccatgttgaggaccgagcttcgggattaccgaggcttagaacagctgaaggcccagctggtggctggggatgatgaggaggctggttggactgagctggcggagcaggaagtggcacgcctgctgaggactgagttgataggagaccagctagcccagctcaacaccgttttccaagcccttcctacagcagcctggggtgccaccctcagggccctgcagctccagctagatgggaatggcaagctgaggtcccaagcaccccctgatgtgtggaagaaagtgttagggggaataaccgctggaaaggaaccccccaatggaatactgcccccctttgaactcctgtgccagtgtctgtgccagctggagcctcgatggctgccaccctttgtggagctggcacagcagcagggcgggccgggctggggggcagggggcccaggactgcccctgtatcgccgagctctggcagtgctaggtgaggaggggaccaggcctgaggctctggagctagagctgctcttgagcagtgggcggcctaaagctgtgctccaagctgtcgggcagctggtgcaaaaggaacaatgggatcgggctctggatgctggcctggccctcggcccctccagtcccctgcttcgaagtgaaatcttcaaactgctgctggccgagtttgcccagcaccgccggcttgatgctcacctccccctcctttgccgcctgtgcccaccagaactggctccagctgagctcctgcttctactgaggacatacctcccagatgaggtggggcccccaaccccattccctgagcctggagcagagccccctctcactgtgggcttgctcaaagccctgctggagcagactggggctcaaggatggctgtcgggcccagttctaagcccatatgaggacatcctatgggaccccagcactccacccccgactccacctcgggacctatgactacccttcaggcatcagaacactcagggcctggaggcttgcttgggactggaggcttgcttggacagttcctctgtgtcactgacacaggaaatcatttctaggacacagtgatcagggaagggtgcctgggacttggagggtcccatgtatggacctgtgtatgcaatactgttctgtcatctggagctatttttaagatgtgtgtgttaaatatatacatagtttaatata

SEQ ID NO: 308836 - DNA, 2514 bp, Homo sapiens
cgggagacggaagtcttggccctgctccgctcccccgagaatcgggcctcgccctgctgggcggctggacctgggcaaagcctgggcgcgctcccgcgcagcggcgccatgaagcgctcggggactctgcggctgctctcggacctgagcgccttcggcggcgcggcgcggctccgggagctggtggccggggactcagcggtccgagtccgtggcagtccggacggccgccacttgctgctcctgcgaccccctggggcggtagccccacagctgctagtcgcgtcgcgagggcccggcgcggagctagagcgggcctggccggccggccagccctccccgctggacgccttcttcctgccgtggccagcgcggccggcgctggtgctggtgtgggagagtggcctggccgaggtgtggggcgcgggcgtggggcctggctggcggccgctgcagagcaccgagctgtgtccgggcgggggagcccgcgttgtggcagtggcggcgctccgaggccgcctggtgtggtgcgaggagcggcaggcccgggccgagggcccgtcagggtcgccagcagccgctttcagccactgtgtgtgcgtccggactctggagcccaagggcaaagtgatggtggctgccccacggcttggtctctcctacagtaagagtctgaatcctggacgaggggacacatgggacttccggaccctgctccgaggccttcctgggttgctgtcccccagggagccactggctgtacacacctgggccccaactccccagggcctgctgttgcttgacttcgggggcactgtgagcctattgcagtcccacggtggtacgcgggctgtgggcaccctgcaggaggcacctgtaggcccgtgggggtctgcagccctaggcacatttcagggcactctggcctgtgtgctgggctccacattggaactgctggacatgggcagtgggcagctgctggagaggaaggtcctaagtacagacagggtacatctgctagaaccgccagcccccggcatggaggatgaggaagagctggagacccgagggaatcttcgtctgctttcagccttgggtctgttttgtgtgggctgggaagccccacagggtgttgagttgccttcagccaaggatctggtgtttgaggaggcctgcgggtactaccagcggcggagcctgcggggtgcccagctcactccagaagaactgagacacagcagcacattccgggcacctcaggctctggcctccatcctccagggccacctgcccccatctgcactgctgaccatgttgaggaccgagcttcgggattaccgaggcttagaacagctgaaggcccagctggtggctggggatgatgaggaggctggttggactgagctggcggagcaggaagtggcacgcctgctgaggactgagttgataggagaccagctagcccagctcaacaccgttttccaagcccttcctacagcagcctggggtgccaccctcagggccctgcagctccagctagatgggaatggcaagctgaggtcccaagcaccccctgatgtgtggaagaaagtgttagggggaataaccgctggaaaggaaccccccaatggaatactgcccccctttgaactcctgtgccagtgtctgtgccagctggagcctcgatggctgccaccctttgtggagctggcacagcagcagggcgggccgggctggggggcagggggcccaggactgcccctgtatcgccgagctctggcagtgctaggtgaggaggggaccaggcctgaggctctggagctagagctgctcttgagcagtgggcggcctaaagctgtgctccaagctgtcgggcagctggtgcaaaaggaacaatgggatcgggctctggatgctggcctggccctcggcccctccagtcccctgcttcgaagtgaaatcttcaaactgctgctggccgagtttgcccagcaccgccggcttgatgctcacctccccctcctttgccgcctgtgcccaccagaactggctccagctgagctcctgcttctactgaggacatacctcccagatgaggtggggcccccaaccccattccctgagcctggagcagagccccctctcactgtgggcttgctcaaagccctgctggagcagactggggctcaaggatggctgtcgggcccagttctaagcccatatgaggacatcctatgggaccccagcactccacccccgactccacctcgggacctatgactacccttcaggcatcagaacactcagggcctggaggcttgcttgggactggaggcttgcttggacagttcctctgtgtcactgacacaggaaatcatttctaggacacagtgatcagggaagggtgcctgggacttggagggtcccatgtatggacctgtgtatgcaatactgttctgtcatctggagctatttttaagatgtgtgtgttaaatatatacatagtttaatata

SEQ ID NO: 308837 - DNA, 2616 bp, Homo sapiens
cgggagacggaagtcttggccctgctccgctcccccgagaatcgggcctcgccctgctgggcggctggacctgggcaaagcctgggcgcgctcccgcgcagcggcgccatgaagcgctcggggactctgcggctgctctcggacctgagcgccttcggcggcgcggcgcggctccgggagctggtggccggggactcagcggtccgagtccgtggcagtccggacggccgccacttgctgctcctgcgaccccctggggcggtagccccacagctgctagtcgcgtcgcgagggcccggcgcggagctagagcgggcctggccggccggccagccctccccgctggacgccttcttcctgccgtggccagcgcggccggcgctggtgctggtgtgggagagtggcctggccgaggtgtggggcgcgggcgtggggcctggctggcggccgctgcagagcaccgagctgtgtccgggcgggggagcccgcgttgtggcagtggcggcgctccgaggccgcctggtgtggtgcgaggagcggcaggcccgggccgagggcccgtcagggtcgccagcagccgctttcagccactgtgtgtgcgtccggactctggagcccagcggggaagctagcaccagcctgggccgcacacacgtcctgctgcaccactgccctgccttcgggctgctggcctcctgcagacaactcttcctggtgcccactgccaccacctggcctggcgtggcccacgttctactcatctggagcccaggcaagggcaaagtgatggtggctgccccacggcttggtctctcctacagtaagagtctgaatcctggacgaggggacacatgggacttccggaccctgctccgaggccttcctgggttgctgtcccccagggagccactggctgtacacacctgggccccaactccccagggcctgctgttgcttgacttcgggggcactgtgagcctattgcagtcccacggtggtacgcgggctgtgggcaccctgcaggaggcacctgtaggcccgtgggggtctgcagccctaggcacatttcagggcactctggcctgtgtgctgggctccacattggaactgctggacatgggcagtgggcagctgctggagaggaaggtcctaagtacagacagggtacatctgctagaaccgccagcccccggcatggaggatgaggaagagctggagacccgagggaatcttcgtctgctttcagccttgggtctgttttgtgtgggctgggaagccccacagggtgttgagttgccttcagccaaggatctggtgtttgaggaggcctgcgggtactaccagcggcggagcctgcggggtgcccagctcactccagaagaactgagacacagcagcacattccgggcacctcaggctctggcctccatcctccagggccacctgcccccatctgcactgctgaccatgttgaggaccgagcttcgggattaccgaggcttagaacagctgaaggcccagctggtggctggggatgatgaggaggctggttggactgagctggcggagcaggaagtggcacgcctgctgaggactgagttgataggagaccagctagcccagctcaacaccgttttccaagcccttcctacagcagcctggggtgccaccctcagggccctgcagctccagctagatgggaatggcaagctgaggtcccaagcaccccctgatgtgtggaagaaagtgttagggggaataaccgctggaaaggaaccccccaatggaatactgcccccctttgaactcctgtgccagtgtctgtgccagctggagcctcgatggctgccaccctttgtggagctggcacagcagcagggcgggccgggctggggggcagggggcccaggactgcccctgtatcgccgagctctggcagtgctaggtgaggaggggaccaggcctgaggctctggagctagagctgctcttgagcagtgggcggcctaaagctgtgctccaagctgtcgggcagctggtgcatcccctgcttcgaagtgaaatcttcaaactgctgctggccgagtttgcccagcaccgccggcttgatgctcacctccccctcctttgccgcctgtgcccaccagaactggctccagctgagctcctgcttctactgaggacatacctcccagatgaggtggggcccccaaccccattccctgagcctggagcagagccccctctcactgtgggcttgctcaaagccctgctggagcagactggggctcaaggatggctgtcgggcccagttctaagcccatatgaggacatcctatgggaccccagcactccacccccgactccacctcgggacctatgactacccttcaggcatcagaacactcagggcctggaggcttgcttgggactggaggcttgcttggacagttcctctgtgtcactgacacaggaaatcatttctaggacacagtgatcagggaagggtgcctgggacttggagggtcccatgtatggacctgtgtatgcaatactgttctgtcatctggagctatttttaagatgtgtgtgttaaatatatacatagtttaatata

SEQ ID NO: 308838 - DNA, 2921 bp, Homo sapiens
cgggagacggaagtcttggccctgctccgctcccccgagaatcgggcctcgccctgctgggcggctggacctgggcaaagcctgggcgcgctcccgcgcagcggcgccatgaagcgctcggggactctgcggctgctctcggacctgagcgccttcggcggcgcggcgcggctccgggagctggtggccggggactcagcggtccgagtccgtggcagtccggacggccgccacttgctgctcctgcgaccccctggggcggtagccccacagctgctagtcgcgtcgcgagggcccggcgcggagctagagcgggcctggccggccggccagccctccccgctggacgccttcttcctgccgtggccagcgcggccggcgctggtgctggtgtgggagagtggcctggccgaggtgtggggcgcgggcgtggggcctggctggcggccgctgcagagcaccgagctgtgtccgggcgggggagcccgcgttgtggcagtggcggcgctccgaggccgcctggtgtggtgcgaggagcggcaggcccgggccgagggcccgtcagggtcgccagcagccgctttcagccactgtgtgtgcgtccggactctggagcccagcggggaagctagcaccagcctgggccgcacacacgtcctgctgcaccactgccctgccttcgggctgctggcctcctgcagacaactcttcctggtgcccactgccaccacctggcctggcgtggcccacgttctactcatctggagcccaggcaagggcaaagtgatggtggctgccccacggcttggtctctcctacagtaagagtctgaatcctggacgaggggacacatgggacttccggaccctgctccgaggccttcctgggttgctgtcccccagggagccactggctgtacacacctgggccccaactccccagggcctgctgttgcttgacttcgggggcactgtgagcctattgcagtcccacggtggtacgcgggctgtgggcaccctgcaggaggcacctgtaggcccgtgggggtctgcagccctaggcacatttcagggcactctggcctgtgtgctgggctccacattggaactgctggacatgggcagtgggcagctgctggagaggaaggtcctaagtacagacagggtacatctgctagaaccgccagcccccggcatggaggatgaggaagagctggagacccgagggaatcttcgtctgctttcagccttgggtctgttttgtgtgggctgggaagccccacagggtgttgagttgccttcagccaaggatctggtgtttgaggaggcctgcgggtactaccagcggcggagcctgcggggtgcccagctcactccagaagaactgagacacagcagcacattccgggcacctcaggctctggcctccatcctccagggccacctgcccccatctgcactgctgaccatgttgaggaccgagcttcgggattaccgaggcttagaacagctgaaggcccagctggtggctggggatgatgaggaggctggttggactgagctggcggagcaggaagtggcacgcctgctgaggactgagttgataggagaccagctagcccagctcaacaccgttttccaagcccttcctacagcagcctggggtgccaccctcagggccctgcagctccagctagatgggaatggcaagctgaggtcccaagcaccccctgatgtgtggaagaaagtgttagggggaataaccgctggaaaggaaccccccaatggaatactgcccccctttgaactcctgtgccagtgtctgtgccagctggagcctcgatggctgccaccctttgtggagctggcacagcagcagggcgggccgggctggggggcagggggcccaggactgcccctgtatcgccgagctctggcagtgctaggtgaggaggggaccaggcctgaggctctggagctagagctgctcttgagcagtgggcggcctaaagctgtgctccaagctgtcgggcagctggtgcaaaaggaacaatgggatcgggctctggatgctggcctggccctcggcccctccagtcccctgcttcgaagtgaaatcttcaaactgctgctggccgagtttgcccagcaccgccggcttgatgctcacctccccctcctttgccgcctgtgcccaccagaactggctccagctgagctcctgcttctactgaggacatacctcccagatgaggtggggcccccaaccccattccctgagcctggagcagagccccctctcactgtgggcttgctcaaagccctgctggagcagactggggctcaaggatggctgtcgggcccagttctaagcccatatgaggacatcctatgggaccccagcactccacccccgactccacctcgggacctatgactacccttcaggcatcagaacactcagggcctggaggcttgcttgggactggaggcttgcttggacagttcctctgtgtcactgacacaggaaatcatttctaggacacagtgatcagggaagggtgcctgggacttggagggtcccatgtatggacctgtgtatgcaatactgttctgtcatctggagctatttttaagatgtgtgtgttaaatatatacatagtttaatatatacacagttgtgtgtttttaaacaggtacaggtctcagaggatgcaggttatagagggagtggttggatctggatcttttggctaaagtccccacttccaatcatgaaaatagttaacatttatgagcatttaatagaagccaggcattctactcatctttatataatccctcagctagcttctcataaccccagtggggaaagtactgatgttattcccattttacaggaaatagaagtttagaaaaatt

SEQ ID NO: 308839 - DNA, 2334 bp, Homo sapiens
cgggagacggaagtcttggccctgctccgctcccccgagaatcgggcctcgccctgctgggcggctggacctgggcaaagcctgggcgcgctcccgcgcagcggcgccatgaagcgctcggggactctgcggctgctctcggacctgagcgccttcggcggcgcggcgcggctccgggagctggtggccggggactcagcggtccgagtccgtggcagtccggacggccgccacttgctgctcctgcgaccccctggggcggtagccccacagctgctagtcgcgtcgcgagggcccggcgcggagctagagcgggcctggccggccggccagccctccccgctggacgccttcttcctgccgtggccagcgcggccggcgctggtgctggtgtgggagagtggcctggccgaggtgtggggcgcgggcgtggggcctggctggcggccgctgcagagcaccgagctgtgtccgggcgggggagcccgcgttgtggcagtggcggcgctccgaggccgcctggtgtggtgcgaggagcggcaggcccgggccgagggcccgtcagggtcgccagcagccgctttcagccactgtgtgtgcgtccggactctggagcccagcggggaagctagcaccagcctgggccgcacacacgtcctgctgcaccactgccctgccttcgggctgctggcctcctgcagacaactcttcctggtgcccactgccaccacctggcctggcgtggcccacgttctactcatctggagcccaggcaagggcaaagtgatggtggctgccccacggcttggtctctcctacagtaagagtctgaatcctggacgaggggacacatgggacttccggaccctgctccgaggccttcctgggttgctgtcccccagggagccactggctgtacacacctgggccccaactccccagggcctgctgttgcttgacttcgggggcactgtgagcctattgcagtcccacggtggtacgcgggctgtgggcaccctgcaggaggcacctgtaggcccgtgggggtctgcagccctaggcacatttcagggcactctggcctgtgtgctgggctccacattggaactgctggacatgggcagtgggcagctgctggagaggaaggtcctaagtacagacagggtacatctgctagaaccgccagcccccggcatggaggatgaggaagagctggagacccgagggaatcttcgtctgctttcagccttgggtctgttttgtgtgggctgggaagccccacagggtgttgagttgccttcagccaaggatctggtgtttgaggaggcctgcgggtactaccagcggcggagcctgcggggtgcccagctcactccagaagaactgagacacagcagcacattccgggcacctcaggctctggcctccatcctccagggccacctgcccccatctgcactgctgaccatgttgaggaccgagcttcgggattaccgaggcttagaacagctgaaggcccagctggtggctggggatgatgaggaggctggttggactgagctggcggagcaggaagtggcacgcctgctgaggactgagttgataggagaccagctagcccagctcaacaccgttttccaagcccttcctacagcagcctggggtgccaccctcagggccctgcagctccagctagatgggaatggcaagctgaggtcccaagcaccccctgatgtgtggaagaaagtgttagggggaataaccgctggaaaggaaccccccaatggaatactgcccccctttgaactcctgtgccagtgtctgtgccagctggagcctcgatggctgccaccctttgtggagctggcacagcagcagggcgggccgggctggggggcagggggcccaggactgcccctgtatcgccgagctctggcagtgctaggtgaggaggggaccaggcctgaggctctggagctagagctgctcttgagcagtgggcggcctaaagctgtgctccaagctgtcgggcagctggtgcaaaaggaacaatgggatcgggctctggatgctggcctggccctcggcccctccagtcccctgcttcgaagtgaaatcttcaaactgctgctggccgagtttgcccagcaccgccggcttgatgctcacctccccctcctttgccgcctgtgcccaccagaactggctccagctgagctcctgcttctactgaggacatacggtcccatgtatggacctgtgtatgcaatactgttctgtcatctggagctatttttaagatgtgtgtgttaaatatatacatagtttaatata

SEQ ID NO: 308840 - DNA, 2550 bp, Homo sapiens
tctgttagaggagacatataaataagctcatctagggtcacctcattttcctaaatatgtttttaaagcaattattgtagtaatttcatttgagttaaatttacatgctcggtcactcattgagaaaatttacacagactctgaatccagttcctgtcatcttcagatgttggtttattgacatcacagtaaaaaggctactgtcgactggacacagtggctcacacatgtaatcacagcactttggggggccaaggtgggtggattgcttaagcccaggagttcaagaccagcctgggcaacatggctaaaccccatctctacaaaaaaaattagctgggtgtggtggtacatgcctgtggtcccagctactcggaaggctgaggtgggaggttcacttgaacctgggaggttgaggttgcagtgagcacagatcacaccactgcactccagcctgggcaacagagtgagaccctatttcaaaaaaaggctgctttcactgtactgctgcagcagtctcttcaggtagctaaattaggagcttgttttggagaaatgaagcaaaggtgaatgacagcctaggcttgaaattataaagctctctcaggttgaactctctcgtgcgctctcgctctcactttcgccctgtacctgagagcacaggtgtaactgtgatgtcatagtgccgagactactttcctttaaccattggggttaagttgggcagcccatttagtttacacgcgcataagactaatttacaaaatcactctatacagtcattagatgtaacatccttccctgagtagaaagtaatgcatgtgtttggagattattttctgtaatgctgggaacaaacctgttttaaaagcacactgctaaaagtaggtgatataagaccatttgctgtttttattaaagtatgtgtgtgtatcagtgtctcaatgtgaagattgtaacctcaagattaggaatcttaaaagagccacttagcctgaatgggaaacgtgagactatttttaaacacacacctctaaggaagaagcctcccatatagacttgatctcaaagaagcagataagaagacagaaaagtgttttaagtgtaagatctcctatggagtactttaaattcatttatacaaatgaataagtgtatctttgtataatgcataaatacatagataaaaacatgtttgctgccaaagttcccaataagatgcttcctgtgttttttggcctttacttagctgaatgatcaaagttcagaaaatggtctgcaaaagttactccatatacaaccccaaatctactactttaaatgtaacatcaactcagttgtatgaatctggagtgtaatatttatattagaatgtatatgtcatttaaaatattttgaaagccctcataaatatttatatttactaaactaatagcatagacactatataaatccgcagtgatgcttatatatcttaaattagtaataatgggtgctatataattattttcagttactatccctgacactctggaatcttctccatttctccctatcactcaatttcattttaatcattggacacctttgcgttttgctgctaacagtgtgtgtatgtcaccctctttatatctggttttcccacttgtctgaagctctcctgatcttagaacctggagctgcagattcctccatgtcagctcccatcacggccccaaagacagagtcacttggttgctgagtcacttggttgctggaaaaatctttggggaaagctggtataagctacacactgacctgtccccagtgtttccaggtaatgacttggcactccagagaaagtttcatgctgttgcgtgtggtggctccaagccaagcacctggcatgcaggtcagcccttcccagcgggcgtggcgtcgtcctcttcacagatgccacgttgcagccccaaggcctcaccattttgcgttttttagaaacccattttcttggtcatttataaagctgctttatagatatctttgatcctggcatgccttggtttcctctcccttccctctttccaatcctggtttcctaacctcctcttgtagtaattctcaactcaactcaaagtcccaagaatttggaatggtaggatgctgtgcggggagctcgaggctgaggcataatcactgcttcggttctgctcatcaggggacacgctcccttactcatggcagccatgtttgattgtcacagagccccccgaatactctgtctatagtgacacactgtaggtgtcataaattttaagaaacctgcttttaagtactatttataggtttttctgttatacttgcaacctagttttaaaatacatgaggattttatgaaagctttatacagacatttataggaaactcattctttgattttaggtgccatttaaattgataacacttactttataaaaagatgctttttgtctggatagagccttatagtttaaaatatcttcatatattgccatttgatcaaataaatttcttacttagaaaaaaaaaaaa

SEQ ID NO: 308841 - DNA, 712 bp, Homo sapiens
  misc_feature (42)..(42): n is a, c, g, or t
  misc_feature (56)..(56): n is a, c, g, or t
ccctggaggtacaaaaccttttttttgggggaaaaaaggttnaaaccaaaaaggtntctaaaaacaaagtctatgcaaaccacttaaaaataattccatagtagtttttcaggtcacgtttttgattcttatgcttcttgccagaaatacattatgataaagtggaaatacattacgatgaagtggaaagagcaaacactttggaatcaaacagagttgcaatcaaacctgccatgttctgtcatgaatactcacaaattatttagtatacctgaatcttggtttctttttataactgagtaataatggttacatctcaggtagtttgaggattgactaaaaaaatgcgagaatgttgtatgtgactgaataacaatttttactctgcgaagccaaagtaaatataatattatcagtaactttatccccagtgtcagtatttataaaatgtttattaaggctagaaaaaatgaatacaatatcctgaaggtgaaatatattctcttcaattagcataaatatgatttacataagttagctatacagctattgagatagtactttctagtaaacttaaactactttttaaacatacattttgtgatgatttaacaaaaatatagagaatgatttgctttattgtaattgtatataagtgactggaaaagcacaaagaaataaagtgggttcgatctgtttaccaaaaaaaaaa

SEQ ID NO: 308842 - DNA, 6030 bp, Homo sapiens
  misc_feature (564)..(564): n is a, c, g, or t
  misc_feature (1483)..(1483): n is a, c, g, or t
agcgccgagtcctaggccaggtctggggtaacctggaacttccacctgggctctgcgctaggtctctgtttcactccctccccgcggggcgcgcagctcgcgggtctttggacaccaccggtcctgagtccgcggactgccattttcattaagaactgccacttagaggtaccaaaataaagggtatttgctacctttaatacttgccagttcaggttggaggcacaggcagcagcaagaatggaaagaaatgttcttacaacattttcacaggaaatgtcccagttaattttgaatgaaatgccaaaagctgaatattccagtttattcaatgattttgttgaatctgaattttttttgattgatggggattcattacttatcacatgtatctgtgagatatcatttaagcctgggcagaacctccatttcttctatctggttgaacgctatcttgtggatcttattagcaaaggaggacaattcaccatagttttcttcaaggatgccgagtatgcgtatttcaacttccctgaacttctttctttgagaactgctttaatncttcatcttcagaagaataccaccattgatgttcgaacaacattttcgagatgcttatcaaaagagtggggaagtttcttggaagagagttacccatatttcctgatagttgcagacgaaggcctgaacgatctacaaacacagcttttcaactttttaatcattcattcttgggcaaggaaggtcaacgttgtactttcctcagggcaagaatctgatgttctttgcctttatgcataccttcttccaagcatgtacagacaccagattttttcctggaagaataagcagaacattaaagatgcttatacaaccctgcttaaccagttggaaagatttaagctttcagcattagcacctctttttggaagtttaaaatggaataatattacggaagaggcacacaagactgtatctctgcttacacaagtctggccagaaggatctgacattcggcgtgtcttttgtgttacttcatgctcattatctttgagaatgtaccatcgctttttaggaaacagagagccctcctctggtcaggaaactgagatccaacaggtgaacagtaattgcttaaccctgcaggagatggaagatttgtgtaaactgcattgtctcactgtggtttttctactccatctgcctctttctcaaagagcttgtgctagagtcatcacttcccattgggctgaggacatgaagcctttattacaaatgaaaaagtggtgtgaatatttcatcttaagaaatatacatacttttgaattttggaatctgaatttaattcacctttctgacttaaatgatgagcttttgttgaagaatattgctttttactatgaaaatgaaaatgtaaaaggcctacatttgaatttgggagataccattatgaaagattatgaatatctctggaataccntatcaaagttggtcagagactttgaggttggacagccatttcctctgagaacaacaaaagtttgttttcttgaaaagaaaccatcaccaatcaaagacagctccaatgaaatggtgcccaatttgggttttattccaacgtcatcttttgtggttgataaatttgctggagatattttgaaagatttgccttttctaaagagtgatgatcctattgttacttcactggttaaacaaaaggaatttgatgaacttgtgcactggcattctcataaacccctgagtgatgattatgacaggtccaggtgtcagtttgatgaaaaatctagagaccctcgtgttcttagatctgtgcaaaagtatcatgttttccaacggttttatgggaattcattagaaacagtctcttcgaaaatcatcgtgactcaaactattaagtcaaagaaggattttagtgggcccaagagcaaaaaggcacacgagaccaaggctgaaataattgctagagagaataagaaaaggttatttgccagggaagaacaaaaggaagagcaaaagtggaatgctttgtcattttctattgaagagcaattgaaagaaaatttacactctggaataaagagcctggaagattttttgaaatcctgtaaaagtagctgtgtgaaacttcaggttgaaatggtggggttaactgcttgcttgaaagcctggaaagaacattgccgaagtgaagaaggtaaaaccacgaaagatttaagtatagctgttcaggtgatgaaaaggatccactccttgatggaaaaatactcagaacttttacaagaagatgatcggcaactcatagccagatgccttaagtatttaggatttgatgagttggcaagttctttacatccagcccaggatgcagaaaatgatgtaaaagtgaagaaaaggaataaatattcagttggcattgggccagctcggttccaactgcaatacatgggccattatttgatacgagatgagagaaaagacccagatcccagggtccaggattttattcccgacacatggcagcgagagctccttgatgttgtggataagaatgagtcagcagtgattgttgccccaacgtcctcaggcaaaacctatgcctcctactactgtatggagaaagtgctgaaggagagcgacgacggggtggtcgtgtacgttgcacccacaaaggcccttgttaatcaagtggcagcaactgttcagaatcgttttacgaaaaatctgccaagtggtgaagttctctgtggtgttttcaccagggagtatcgtcatgatgccttaaactgtcaggtacttattacagtgcctgcctgctttgaaattctgctgcttgctcctcatcgccaaaactgggtgaaaaagatcagatatgttatatttgatgaggttcattgtcttggtggagaaattggagcagaaatctgggaacatctccttgtcatgatccgatgtccctttttggctctttcagctaccataagtaatcctgaacatctcaccgagtggctacaatcggtaaaatggtactggaaacaagaagacaaaataattgaaaataataccgcttctaaaagacatgtgggtcgtcaggccggctttcccaaagactacttgcaagtaaaacaatcgtataaagttagacttgtgctctatggagagaggtataatgatctagagaagcatgtatgttcaataaaacatggtgacattcattttgatcattttcacccatgtgctgcactaacaacagatcatattgaaaggtatggattccctcctgatcttaccctttcacctcgagaaagcatccagctgtatgatgccatgtttcaaatttggaaaagttggcctcgggcccaggaactgtgcccagaaaacttcattcattttaacaataaattagtcattaaaaagatggatgctaggaaatatgaagagagtctaaaggcagaattaacaagttggattaaaaatggcaacgtagagcaggccagaatggtacttcagaatcttagtcctgaagcagatttgagtccagaaaacatgatcaccatgtttccacttctagttgaaaaactaaggaaaatggagaagttacctgcactattttttttattcaagttaggagctgtagaaaacgcagctgaaagtgtgagcactttcctaaagaaaaagcaggagacaaaaaggcctcccaaagctgataaagaagcccatgtcatggctaacaaacttcgaaaagttaaaaaatccatagagaaacaaaagatcatagatgaaaagagccagaaaaaaaccagaaatgtggatcaaagcctaatacatgaagctgaacatgataatctagtgaagtgtctagagaagaacctggaaatcccacaggactgcacatatgctgatcaaaaagcagtggacactgagactttgcagaaggtatttggtcgagtaaaatttgaaagaaaaggtgaagaattgaaagccttggcagaaaggggtattggatatcatcacagtgctatgagtttcaaagaaaaacaattagttgaaatcctctttagaaaaggatatcttagggtggtgacagctactggaacacttgctttaggtgtcaacatgccttgtaaatctgtggtttttgctcaaaactcagtctatctggatgcgttgaattatagacagatgtctggccgtgctggaagaagaggtcaagacctgatgggagatgtatatttctttgatattccattccccaaaataggaaaactcataaaatccaatgttcctgagctgagaggacacttccctctcagcataaccctggtcctgcgactcatgctgctggcttccaagggagatgacccagaggatgccaaggcaaaggtgctatcagtgctaaagcattcattgctgtccttcaagcaacccagagtcatggacatgttaaaactttacttcctgttttctttgcagttcctggtgaaagagggctatttagatcaagaaggtaatcctatggggtttgctggacttgtatcacatttgcattatcatgaaccttctaatcttgtttttgtcagttttcttgtaaatggactcttccatgatctctgtcagccaaccaggaaaggctcaaaacatttttctcaagacgttatggaaaagctagtattagtattggcacatctctttggaagaagatattttccaccaaagttccaagatgcacacttcgagttttatcaatcaaaggtgttccttgatgatctccctgaggattttagtgatgctttagatgaatataacatgaaaattatggaggactttaccactttcctacgaattgtttccaaactggctgatatgaatcaggaatatcaactcccattgtcaaaaatcaaattcacaggtaaagaatgtgaagactctcaactcgtatctcatttgatgagctgcaaggaaggaagagtagcaatttcaccatttgtttgtctgtctgggaactttgatgatgatttgcttcgactagaaactccaaaccatgttactctaggcacaatcggtgtcaatcgctctcaggctccagtgctgttgtcacagaaatttgataaccgaggaaggaaaatgtcgcttaatgcctatgcactggatttctacaaacatggttccttgataggattagtccaggataacaggatgaatgaaggagatgcttattatttgttgaaggattttgcactcaccattaaatctatcagtgtttccttgcgtgagctatgtgaaaatgaagacgacaacgttgtcttagcctttgaacaactgagtacaactttttgggaaaagttaaacaaagtctaaaaacaaagtctatgcaaaccacttaaaaataattccatagtagtttttcaggtcacgtttttgattcttatgcttcttgccagaaatacattatgataaagtggaaatacattacgatgaagtggaaagagcaaacactttggaatcaaacagagttgcaatcaaacctgccatgttctgtcatgaatactcacaaattatttagtatacctgaatcttggtttctttttataactgagtaataatggttacatctcaggtagtttgaggattgactaaaaaaatgcgagaatgttgtatgtgactgaataacaatttttactctgcgaagccaaagtaaatataatattatcagtaactttatccccagtgtcagtatttataaaatgtttattaaggctagaaaaaatgaatacaatatcctgaaggtgaaatatattctcttcaattagcataaatatgatttacataagttagctatacagctattgagatagtactttctagtaaacttaaactactttttaaacatacattttgtgatgatttaacaaaaatatagagaatgatttgctttattgtaattgtatataagtgactggaaaagcacaaagaaataaagtgggttcgatctgtttaccaaaaaaaaaa

SEQ ID NO: 308843 - DNA, 9652 bp, Homo sapiens
  misc_feature (564)..(564): n is a, c, g, or t
  misc_feature (1483)..(1483): n is a, c, g, or t
agcgccgagtcctaggccaggtctggggtaacctggaacttccacctgggctctgcgctaggtctctgtttcactccctccccgcggggcgcgcagctcgcgggtctttggacaccaccggtcctgagtccgcggactgccattttcattaagaactgccacttagaggtaccaaaataaagggtatttgctacctttaatacttgccagttcaggttggaggcacaggcagcagcaagaatggaaagaaatgttcttacaacattttcacaggaaatgtcccagttaattttgaatgaaatgccaaaagctgaatattccagtttattcaatgattttgttgaatctgaattttttttgattgatggggattcattacttatcacatgtatctgtgagatatcatttaagcctgggcagaacctccatttcttctatctggttgaacgctatcttgtggatcttattagcaaaggaggacaattcaccatagttttcttcaaggatgccgagtatgcgtatttcaacttccctgaacttctttctttgagaactgctttaatncttcatcttcagaagaataccaccattgatgttcgaacaacattttcgagatgcttatcaaaagagtggggaagtttcttggaagagagttacccatatttcctgatagttgcagacgaaggcctgaacgatctacaaacacagcttttcaactttttaatcattcattcttgggcaaggaaggtcaacgttgtactttcctcagggcaagaatctgatgttctttgcctttatgcataccttcttccaagcatgtacagacaccagattttttcctggaagaataagcagaacattaaagatgcttatacaaccctgcttaaccagttggaaagatttaagctttcagcattagcacctctttttggaagtttaaaatggaataatattacggaagaggcacacaagactgtatctctgcttacacaagtctggccagaaggatctgacattcggcgtgtcttttgtgttacttcatgctcattatctttgagaatgtaccatcgctttttaggaaacagagagccctcctctggtcaggaaactgagatccaacaggtgaacagtaattgcttaaccctgcaggagatggaagatttgtgtaaactgcattgtctcactgtggtttttctactccatctgcctctttctcaaagagcttgtgctagagtcatcacttcccattgggctgaggacatgaagcctttattacaaatgaaaaagtggtgtgaatatttcatcttaagaaatatacatacttttgaattttggaatctgaatttaattcacctttctgacttaaatgatgagcttttgttgaagaatattgctttttactatgaaaatgaaaatgtaaaaggcctacatttgaatttgggagataccattatgaaagattatgaatatctctggaataccntatcaaagttggtcagagactttgaggttggacagccatttcctctgagaacaacaaaagtttgttttcttgaaaagaaaccatcaccaatcaaagacagctccaatgaaatggtgcccaatttgggttttattccaacgtcatcttttgtggttgataaatttgctggagatattttgaaagatttgccttttctaaagagtgatgatcctattgttacttcactggttaaacaaaaggaatttgatgaacttgtgcactggcattctcataaacccctgagtgatgattatgacaggtccaggtgtcagtttgatgaaaaatctagagaccctcgtgttcttagatctgtgcaaaagtatcatgttttccaacggttttatgggaattcattagaaacagtctcttcgaaaatcatcgtgactcaaactattaagtcaaagaaggattttagtgggcccaagagcaaaaaggcacacgagaccaaggctgaaataattgctagagagaataagaaaaggttatttgccagggaagaacaaaaggaagagcaaaagtggaatgctttgtcattttctattgaagagcaattgaaagaaaatttacactctggaataaagagcctggaagattttttgaaatcctgtaaaagtagctgtgtgaaacttcaggttgaaatggtggggttaactgcttgcttgaaagcctggaaagaacattgccgaagtgaagaaggtaaaaccacgaaagatttaagtatagctgttcaggtgatgaaaaggatccactccttgatggaaaaatactcagaacttttacaagaagatgatcggcaactcatagccagatgccttaagtatttaggatttgatgagttggcaagttctttacatccagcccaggatgcagaaaatgatgtaaaagtgaagaaaaggaataaatattcagttggcattgggccagctcggttccaactgcaatacatgggccattatttgatacgagatgagagaaaagacccagatcccagggtccaggattttattcccgacacatggcagcgagagctccttgatgttgtggataagaatgagtcagcagtgattgttgccccaacgtcctcaggcaaaacctatgcctcctactactgtatggagaaagtgctgaaggagagcgacgacggggtggtcgtgtacgttgcacccacaaaggcccttgttaatcaagtggcagcaactgttcagaatcgttttacgaaaaatctgccaagtggtgaagttctctgtggtgttttcaccagggagtatcgtcatgatgccttaaactgtcaggtacttattacagtgcctgcctgctttgaaattctgctgcttgctcctcatcgccaaaactgggtgaaaaagatcagatatgttatatttgatgaggttcattgtcttggtggagaaattggagcagaaatctgggaacatctccttgtcatgatccgatgtccctttttggctctttcagctaccataagtaatcctgaacatctcaccgagtggctacaatcggtaaaatggtactggaaacaagaagacaaaataattgaaaataataccgcttctaaaagacatgtgggtcgtcaggccggctttcccaaagactacttgcaagtaaaacaatcgtataaagttagacttgtgctctatggagagaggtataatgatctagagaagcatgtatgttcaataaaacatggtgacattcattttgatcattttcacccatgtgctgcactaacaacagatcatattgaaaggtatggattccctcctgatcttaccctttcacctcgagaaagcatccagctgtatgatgccatgtttcaaatttggaaaagttggcctcgggcccaggaactgtgcccagaaaacttcattcattttaacaataaattagtcattaaaaagatggatgctaggaaatatgaagagagtctaaaggcagaattaacaagttggattaaaaatggcaacgtagagcaggccagaatggtacttcagaatcttagtcctgaagcagatttgagtccagaaaacatgatcaccatgtttccacttctagttgaaaaactaaggaaaatggagaagttacctgcactattttttttattcaagttaggagctgtagaaaacgcagctgaaagtgtgagcactttcctaaagaaaaagcaggagacaaaaaggcctcccaaagctgataaagaagcccatgtcatggctaacaaacttcgaaaagttaaaaaatccatagagaaacaaaagatcatagatgaaaagagccagaaaaaaaccagaaatgtggatcaaagcctaatacatgaagctgaacatgataatctagtgaagtgtctagagaagaacctggaaatcccacaggactgcacatatgctgatcaaaaagcagtggacactgagactttgcagaaggtatttggtcgagtaaaatttgaaagaaaaggtgaagaattgaaagccttggcagaaaggggtattggatatcatcacagtgctatgagtttcaaagaaaaacaattagttgaaatcctctttagaaaaggatatcttagggtggtgacagctactggaacacttgctttaggtgtcaacatgccttgtaaatctgtggtttttgctcaaaactcagtctatctggatgcgttgaattatagacagatgtctggccgtgctggaagaagaggtcaagacctgatgggagatgtatatttctttgatattccattccccaaaataggaaaactcataaaatccaatgttcctgagctgagaggacacttccctctcagcataaccctggtcctgcgactcatgctgctggcttccaagggagatgacccagaggatgccaaggcaaaggtgctatcagtgctaaagcattcattgctgtccttcaagcaacccagagtcatggacatgttaaaactttacttcctgttttctttgcagttcctggtgaaagagggctatttagatcaagaaggtaatcctatggggtttgctggacttgtatcacatttgcattatcatgaaccttctaatcttgtttttgtcagttttcttgtaaatggactcttccatgatctctgtcagccaaccaggaaaggctcaaaacatttttctcaagacgttatggaaaagctagtattagtattggcacatctctttggaagaagatattttccaccaaagttccaagatgcacacttcgagttttatcaatcaaaggtgttccttgatgatctccctgaggattttagtgatgctttagatgaatataacatgaaaattatggaggactttaccactttcctacgaattgtttccaaactggctgatatgaatcaggaatatcaactcccattgtcaaaaatcaaattcacaggtaaagaatgtgaagactctcaactcgtatctcatttgatgagctgcaaggaaggaagagtagcaatttcaccatttgtttgtctgtctgggaactttgatgatgatttgcttcgactagaaactccaaaccatgttactctaggcacaatcggtgtcaatcgctctcaggctccagtgctgttgtcacagaaatttgataaccgaggaaggaaaatgtcgcttaatgcctatgcactggatttctacaaacatggttccttgataggattagtccaggataacaggatgaatgaaggagatgcttattatttgttgaaggattttgcactcaccattaaatctatcaggtgtgttatatatttaaatattgattttagattttttaataatttatttataatttgaaaaatgttgagctgttactataagccaggtacatgaaggtgccattaagcttcttctgtgctatgcatttcaactccccaaaggctctgcagaatgtctgttcaacacgtgttgtattatttctataacagaattaattccaatgtctagttgagatgaagtttcatccagactagagtctcagccccaggcatcatgcactgacaggcagcaatattcaaaagcttcattgactcctcgatcctggtattctcaattgccacaagcagtgtatgtcaaagacatgggacacgatatttcagagggctccttagggttccatccggtctctagtttatattcacttacatactttgaattttgtgttttctctgatgttttctccaggctccgtctgactctgatctttcatattggcctcctattttcacctttaacaaaacctagtggggtcccaagcaacaccaaactttatgtgggtaccccattcttaggcttcattgaccatctactgttgcttagttgcatgtccatctttctttttcttttcttttttttttgagacagaattttgcccttgttgcccaggctggagtgcaatggtatgatctcggctcaccacaacctctgcctcctgggttcaagcagttctcctgcctcaatctcctgagtagctgggattacaggcatgtgtcaccatgcccggctaatattgtatttttagtagcgagggggtttctccatgttggttagtgtggtctcgaactcctgacctcaggtgatctgcctgccttgccctcccaaagtgctgcggttacaggcattagctgccgctcctggcctaaatgtccatctttctaaagccttcaatctgcatgcaactcaatactttataggtgttgcttcgtcctatccctttttatatatttaatttgccacaactctctccattattaggttcttgctaatcaagtctctttttatatcttggatctgagcagaatcggcctgtttggactttttataacagagtaaaacttttgggagcagaaggaaactgctttgtccacttggaatatctctagatagggtattccttgagtggctcatagttactgaagttattatctccagagcagcccaagaaactccacagacttggaagctgtctcaaaaacttgggcaaggaaatcaatcaatcaatcattcacacattcatccaagaagtattgaagcattgttggtatgagacacacttcctaagcatttgagctataaaggttcataatttttttttttttttggagacggagagtcacgctctgtcacccaggctggagtgaagtgttgcgatctcggctcactgcaacctcacctcccaggttcaagcaattctcctgcctaagcctcccaggtagctgggactacaggtgtataccaccatgcctggctaatttttttttttttttggtattttagtacagatgggatttcaccatgctgcccaggctggtctcaaaattcctgagctcaggcaatccacccgccttggcctcccaaagtgctaggattacaggcaagaaccactgcgcctggccaaaggatcattaaattgatatacctgctttaaaaaaattcttacatgtgtagtgaaagaagctgacttatagaccttacaaacatggtcagagctatgatggcagataagggaatgactaatgtgacttgcattcaaagaaagagtctcaaatgaggtaattttttgactaagccttaaattatggggaagaagaaatagtattttcaaagtacagaaatgagaaagggcctgatgtgtcagggatagactccaagctcactatgtcaacatggagattatgggcatttgacagagatgggggaagatgctgggttgttgtaagagactttaaatggaatttggatctatatcaggaaaggtctttatgttaacattaagaagtttgggcttcatcttttgagcaacgtgtagacagtgcataagcctgaggggagcatgagcatgcggattatatatgtggcagaaatatgtaggtgcaaaggctgtaacagtcatgcaggtgaaaatgagtgaaggtctgaattaagggaattgaaatatgatgcagaagagtgatcagaaaaatatttacgaggtaaaattcaagaaattggtaaaaaaatttatgcagttggtaaagatgaccaaagttcctatttttgttaaggatgtataggaaacaaggatgagcatgacatttggggatgagaatgaaaaatagtgagctagaatttatacacatcacattatatctgggagatatcaatcaggaggaaatgttcagtagtcacaatgataagtctgtaactcagaaggaaatttggtgttgtagagacagaactgatcaatttttgtggtaggtcagtgatgacactcgaaaataactggaactctagtggaaacaaggtaggggcaaataataaaaggctgataagatgtcagatcatgacagttttcagcccttgatcagtccagctgtactgttcattcttggatttcttctctccttttttgttacctgtacattagtttcttaatgctgctgcaacaaattaccacaaacctagtggcttaaaccaacacaaatttattattttacaattctggaggtcagaagtccaaaatgtgtcttcttgggctcaatccagttgtcagcagggctgcatttctttgtaaaggctcttaagggacaatctacttttattgccttttccaacttttagaggctgccggcattccttggcttgtggctccctttcatctccaaagccagcaatggttcgtagactcacactgcatcattctgactctctcctgcctcactcttccacttacagggacctttgagatcacactgaacctgcccagataatccaggattattttcctatctcaaggtcagctgattcgcaactttaattcgcactgcagccataattcattcccctttgccatgtaacctgacctattcatcggtttctggggaatatatgatatggacatctttgcagggccattattctgcttaccatatcttgttgtccttatctttttacacatctaggtaaagaaagcaatattttcctcttcgtagatgtagctgcctgtgggtttcagtatacactggacactagcataaataacacaaaatgactccacaagagatatgtagaggaaagaaaaggaatttgcgttgcacttttgaagggagaagggatcaagttatgtggaatttgatggcttttcagactctcttggtaatagtcatggagaagaattgcatggggttgttttgttatcttttcttaaattttttatacaagattttttaggagaaatatgtttcttatcattattcctcatattttgctaacataatttcatcatctgatgggatttccttacttctgcctaaccaaggaaagcctttcttataatattcaatctcactaaagtggatcctatatttttttccccatttccagtgtttccttgcgtgagctatgtgaaaatgaagacgacaacgttgtcttagcctttgaacaactgagtacaactttttgggaaaagttaaacaaagtctaaaaacaaagtctatgcaaaccacttaaaaataattccatagtagtttttcaggtcacgtttttgattcttatgcttcttgccagaaatacattatgataaagtggaaatacattacgatgaagtggaaagagcaaacactttggaatcaaacagagttgcaatcaaacctgccatgttctgtcatgaatactcacaaattatttagtatacctgaatcttggtttctttttataactgagtaataatggttacatctcaggtagtttgaggattgactaaaaaaatgcgagaatgttgtatgtgactgaataacaatttttactctgcgaagccaaagtaaatataatattatcagtaactttatccccagtgtcagtatttataaaatgtttattaaggctagaaaaaatgaatacaatatcctgaaggtgaaatatattctcttcaattagcataaatatgatttacataagttagctatacagctattgagatagtactttctagtaaacttaaactactttttaaacatacattttgtgatgatttaacaaaaatatagagaatgatttgctttattgtaattgtatataagtgactggaaaagcacaaagaaataaagtgggttcgatctgtttaccaaaaaaaaaa

SEQ ID NO: 308844 - DNA, 4234 bp, Homo sapiens
ttaacagaggcttaatttccaaaagaaaaaaagaaatttttcacatctactcaaaatgggatgatggtcaaagtcttcaatacacccataatattgtctcactcatgacctgttatcttggaatattttcaacttgtcttaagagatgttttttcctttggggcaggagaccaaggctgaaataattgctagagagaataagaaaaggttatttgccagggaagaacaaaaggaagagcaaaagtggaatgctttgtcattttctattgaagagcaattgaaagaaaatttacactctggaataaagagcctggaagattttttgaaatcctgtaaaagtagctgtgtgaaacttcaggttgaaatggtggggttaactgcttgcttgaaagcctggaaagaacattgccgaagtgaagaaggtaaaaccacgaaagatttaagtatagctgttcaggtgatgaaaaggatccactccttgatggaaaaatactcagaacttttacaagaagatgatcggcaactcatagccagatgccttaagtatttaggatttgatgagttggcaagttctttacatccagcccaggatgcagaaaatgatgtaaaagtgaagaaaaggaataaatattcagttggcattgggccagctcggttccaactgcaatacatgggccattatttgatacgagatgagagaaaagacccagatcccagggtccaggattttattcccgacacatggcagcgagagctccttgatgttgtggataagaatgagtcagcagtgattgttgccccaacgtcctcaggcaaaacctatgcctcctactactgtatggagaaagtgctgaaggagagcgacgacggggtggtcgtgtacgttgcacccacaaaggcccttgttaatcaagtggcagcaactgttcagaatcgttttacgaaaaatctgccaagtggtgaagttctctgtggtgttttcaccagggagtatcgtcatgatgccttaaactgtcaggtacttattacagtgcctgcctgctttgaaattctgctgcttgctcctcatcgccaaaactgggtgaaaaagatcagatatgttatatttgatgaggttcattgtcttggtggagaaattggagcagaaatctgggaacatctccttgtcatgatccgatgtccctttttggctctttcagctaccataagtaatcctgaacatctcaccgagtggctacaatcggtaaaatggtactggaaacaagaagacaaaataattgaaaataataccgcttctaaaagacatgtgggtcgtcaggccggctttcccaaagactacttgcaagtaaaacaatcgtataaagttagacttgtgctctatggagagaggtataatgatctagagaagcatgtatgttcaataaaacatggtgacattcattttgatcattttcacccatgtgctgcactaacaacagatcatattgaaaggtatggattccctcctgatcttaccctttcacctcgagaaagcatccagctgtatgatgccatgtttcaaatttggaaaagttggcctcgggcccaggaactgtgcccagaaaacttcattcattttaacaataaattagtcattaaaaagatggatgctaggaaatatgaagagagtctaaaggcagaattaacaagttggattaaaaatggcaacgtagagcaggccagaatggtacttcagaatcttagtcctgaagcagatttgagtccagaaaacatgatcaccatgtttccacttctagttgaaaaactaaggaaaatggagaagttacctgcactattttttttattcaagttaggagctgtagaaaacgcagctgaaagtgtgagcactttcctaaagaaaaagcaggagacaaaaaggcctcccaaagctgataaagaagcccatgtcatggctaacaaacttcgaaaagttaaaaaatccatagagaaacaaaagatcatagatgaaaagagccagaaaaaaaccagaaatgtggatcaaagcctaatacatgaagctgaacatgataatctagtgaagtgtctagagaagaacctggaaatcccacaggactgcacatatgctgatcaaaaagcagtggacactgagactttgcagaaggtatttggtcgagtaaaatttgaaagaaaaggtgaagaattgaaagccttggcagaaaggggtattggatatcatcacagtgctatgagtttcaaagaaaaacaattagttgaaatcctctttagaaaaggatatcttagggtggtgacagctactggaacacttgctttaggtgtcaacatgccttgtaaatctgtggtttttgctcaaaactcagtctatctggatgcgttgaattatagacagatgtctggccgtgctggaagaagaggtcaagacctgatgggagatgtatatttctttgatattccattccccaaaataggaaaactcataaaatccaatgttcctgagctgagaggacacttccctctcagcataaccctggtcctgcgactcatgctgctggcttccaagggagatgacccagaggatgccaaggcaaaggtgctatcagtgctaaagcattcattgctgtccttcaagcaacccagagtcatggacatgttaaaactttacttcctgttttctttgcagttcctggtgaaagagggctatttagatcaagaaggtaatcctatggggtttgctggacttgtatcacatttgcattatcatgaaccttctaatcttgtttttgtcagttttcttgtaaatggactcttccatgatctctgtcagccaaccaggaaaggctcaaaacatttttctcaagacgttatggaaaagctagtattagtattggcacatctctttggaagaagatattttccaccaaagttccaagatgcacacttcgagttttatcaatcaaaggtgttccttgatgatctccctgaggattttagtgatgctttagatgaatataacatgaaaattatggaggactttaccactttcctacgaattgtttccaaactggctgatatgaatcaggaatatcaactcccattgtcaaaaatcaaattcacaggtaaagaatgtgaagactctcaactcgtatctcatttgatgagctgcaaggaaggaagagtagcaatttcaccatttgtttgtctgtctgggaactttgatgatgatttgcttcgactagaaactccaaaccatgttactctaggcacaatcggtgtcaatcgctctcaggctccagtgctgttgtcacagaaatttgataaccgaggaaggaaaatgtcgcttaatgcctatgcactggatttctacaaacatggttccttgataggattagtccaggataacaggatgaatgaaggagatgcttattatttgttgaaggattttgcactcaccattaaatctatcagtgtttccttgcgtgagctatgtgaaaatgaagacgacaacgttgtcttagcctttgaacaactgagtacaactttttgggaaaagttaaacaaagtctaaaaacaaagtctatgcaaaccacttaaaaataattccatagtagtttttcaggtcacgtttttgattcttatgcttcttgccagaaatacattatgataaagtggaaatacattacgatgaagtggaaagagcaaacactttggaatcaaacagagttgcaatcaaacctgccatgttctgtcatgaatactcacaaattatttagtatacctgaatcttggtttctttttataactgagtaataatggttacatctcaggtagtttgaggattgactaaaaaaatgcgagaatgttgtatgtgactgaataacaatttttactctgcgaagccaaagtaaatataatattatcagtaactttatccccagtgtcagtatttataaaatgtttattaaggctagaaaaaatgaatacaatatcctgaaggtgaaatatattctcttcaattagcataaatatgatttacataagttagctatacagctattgagatagtactttctagtaaacttaaactactttttaaacatacattttgtgatgatttaacaaaaatatagagaatgatttgctttattgtaattgtatataagtgactggaaaagcacaaagaaataaagtgggttcgatctgtttaccaaaaaaaaaa

SEQ ID NO: 308845 - DNA, 5994 bp, Homo sapiens
  misc_feature (564)..(564): n is a, c, g, or t
  misc_feature (1483)..(1483): n is a, c, g, or t
agcgccgagtcctaggccaggtctggggtaacctggaacttccacctgggctctgcgctaggtctctgtttcactccctccccgcggggcgcgcagctcgcgggtctttggacaccaccggtcctgagtccgcggactgccattttcattaagaactgccacttagaggtaccaaaataaagggtatttgctacctttaatacttgccagttcaggttggaggcacaggcagcagcaagaatggaaagaaatgttcttacaacattttcacaggaaatgtcccagttaattttgaatgaaatgccaaaagctgaatattccagtttattcaatgattttgttgaatctgaattttttttgattgatggggattcattacttatcacatgtatctgtgagatatcatttaagcctgggcagaacctccatttcttctatctggttgaacgctatcttgtggatcttattagcaaaggaggacaattcaccatagttttcttcaaggatgccgagtatgcgtatttcaacttccctgaacttctttctttgagaactgctttaatncttcatcttcagaagaataccaccattgatgttcgaacaacattttcgagatgcttatcaaaagagtggggaagtttcttggaagagagttacccatatttcctgatagttgcagacgaaggcctgaacgatctacaaacacagcttttcaactttttaatcattcattcttgggcaaggaaggtcaacgttgtactttcctcagggcaagaatctgatgttctttgcctttatgcataccttcttccaagcatgtacagacaccagattttttcctggaagaataagcagaacattaaagatgcttatacaaccctgcttaaccagttggaaagatttaagctttcagcattagcacctctttttggaagtttaaaatggaataatattacggaagaggcacacaagactgtatctctgcttacacaagtctggccagaaggatctgacattcggcgtgtcttttgtgttacttcatgctcattatctttgagaatgtaccatcgctttttaggaaacagagagccctcctctggtcaggaaactgagatccaacaggtgaacagtaattgcttaaccctgcaggagatggaagatttgtgtaaactgcattgtctcactgtggtttttctactccatctgcctctttctcaaagagcttgtgctagagtcatcacttcccattgggctgaggacatgaagcctttattacaaatgaaaaagtggtgtgaatatttcatcttaagaaatatacatacttttgaattttggaatctgaatttaattcacctttctgacttaaatgatgagcttttgttgaagaatattgctttttactatgaaaatgaaaatgtaaaaggcctacatttgaatttgggagataccattatgaaagattatgaatatctctggaataccntatcaaagttggtcagagactttgaggttggacagccatttcctctgagaacaacaaaagtttgttttcttgaaaagaaaccatcaccaatcaaagacagctccaatgaaatggtgcccaatttgggttttattccaacgtcatcttttgtggttgataaatttgctggagatattttgaaagatttgccttttctaaagagtgatgatcctattgttacttcactggttaaacaaaaggaatttgatgaacttgtgcactggcattctcataaacccctgagtgatgattatgacaggtccaggtgtcagtttgatgaaaaatctagagaccctcgtgttcttagatctgtgcaaaagtatcatgttttccaacggttttatgggaattcattagaaacagtctcttcgaaaatcatcgtgactcaaactattaagtcaaagaaggattttagtgggcccaagagcaaaaaggcacacgagaccaaggctgaaataattgctagagagaataagaaaaggttatttgccagggaagaacaaaaggaagagcaaaagtggaatgctttgtcattttctattgaagagcaattgaaagaaaatttacactctggaataaagagcctggaagattttttgaaatcctgtaaaagtagctgtgtgaaacttcaggttgaaatggtggggttaactgcttgcttgaaagcctggaaagaacattgccgaagtgaagaaggtaaaaccacgaaagatttaagtatagctgttcaggtgatgaaaaggatccactccttgatggaaaaatactcagaacttttacaagaagatgatcggcaactcatagccagatgccttaagtatttaggatttgatgagttggcaagttctttacatccagcccaggatgcagaaaatgatgtaaaagtgaagaaaaggaataaatattcagttggcattgggccagctcggttccaactgcaatacatgggccattatttgatacgagatgagagaaaagacccagatcccagggtccaggattttattcccgacacatggcagcgagagctccttgatgttgtggataagaatgagtcagcagtgattgttgccccaacgtcctcaggcaaaacctatgcctcctactactgtatggagaaagtgctgaaggagagcgacgacggggtggtcgtgtacgttgcacccacaaaggcccttgttaatcaagtggcagcaactgttcagaatcgttttacgaaaaatctgccaagtggtgaagttctctgtggtgttttcaccagggagtatcgtcatgatgccttaaactgtcaggtacttattacagtgcctgcctgctttgaaattctgctgcttgctcctcatcgccaaaactgggtgaaaaagatcagatatgttatatttgatgaggttcattgtcttggtggagaaattggagcagaaatctgggaacatctccttgtcatgatccgatgtccctttttggctctttcagctaccataagtaatcctgaacatctcaccgagtggctacaatcggtaaaatggtactggaaacaagaagacaaaataattgaaaataataccgcttctaaaagacatgtgggtcgtcaggccggctttcccaaagactacttgcaagtaaaacaatcgtataaagttagacttgtgctctatggagagaggtataatgatctagagaagcatgtatgttcaataaaacatggtgacattcattttgatcattttcacccatgtgctgcactaacaacagatcatattgaaaggtatggattccctcctgatcttaccctttcacctcgagaaagcatccagctgtatgatgccatgtttcaaatttggaaaagttggcctcgggcccaggaactgtgcccagaaaacttcattcattttaacaataaattagtcattaaaaagatggatgctaggaaatatgaagagagtctaaaggcagaattaacaagttggattaaaaatggcaacgtagagcaggccagaatggtacttcagaatcttagtcctgaagcagatttgagtccagaaaacatgatcaccatgtttccacttctagttgaaaaactaaggaaaatggagaagttacctgcactattttttttattcaagttaggagctgtagaaaacgcagctgaaagtgtgagcactttcctaaagaaaaagcaggagacaaaaaggcctcccaaagctgataaagaagcccatgtcatggctaacaaacttcgaaaagttaaaaaatccatagagaaacaaaagatcatagatgaaaagagccagaaaaaaaccagaaatgtggatcaaagcctaatacatgaagctgaacatgataatctagtgaagtgtctagagaagaacctggaaatcccacaggactgcacatatgctgatcaaaaagcagtggacactgagactttgcagaaggtatttggtcgagtaaaatttgaaagaaaaggtgaagaattgaaagccttggcagaaaggggtattggatatcatcacagtgctatgagtttcaaagaaaaacaattagttgaaatcctctttagaaaaggatatcttagggtggtgacagctactggaacacttgctttaggtgtcaacatgccttgtaaatctgtggtttttgctcaaaactcagtctatctggatgcgttgaattatagacagatgtctggccgtgctggaagaagaggtcaagacctgatgggagatgtatatttctttgatattccattccccaaaataggaaaactcataaaatccaatgttcctgagctgagaggacacttccctctcagcataaccctggtcctgcgactcatgctgctggcttccaagggagatgacccagaggatgccaaggcaaaggtgctatcagtgctaaagcattcattgctgtccttcaagcaacccagagtcatggacatgttaaaactttacttcctgttttctttgcagttcctggtgaaagagggctatttagatcaagaaggtaatcctatggggtttgctggacttgtatcacatttgcattatcatgaaccttctaatcttgtttttgtcagttttcttgtaaatggactcttccatgatctctgtcagccaaccaggaaaggctcaaaacatttttctcaagacgttatggaaaagctagtattagtattggcacatctctttggaagaagatattttccaccaaagttccaagatgcacacttcgagttttatcaatcaaaggtgttccttgatgatctccctgaggattttagtgatgctttagatgaatataacatgaaaattatggaggactttaccactttcctacgaattgtttccaaactggctgatatgaatcaggaatatcaactcccattgtcaaaaatcaaattcacaggtaaagaatgtgaagactctcaactcgtatctcatttgatgagctgcaaggaaggaagagtagcaatttcaccatttgtttgtctgtctgggaactttgatgatgatttgcttcgactagaaactccaaaccatgctccagtgctgttgtcacagaaatttgataaccgaggaaggaaaatgtcgcttaatgcctatgcactggatttctacaaacatggttccttgataggattagtccaggataacaggatgaatgaaggagatgcttattatttgttgaaggattttgcactcaccattaaatctatcagtgtttccttgcgtgagctatgtgaaaatgaagacgacaacgttgtcttagcctttgaacaactgagtacaactttttgggaaaagttaaacaaagtctaaaaacaaagtctatgcaaaccacttaaaaataattccatagtagtttttcaggtcacgtttttgattcttatgcttcttgccagaaatacattatgataaagtggaaatacattacgatgaagtggaaagagcaaacactttggaatcaaacagagttgcaatcaaacctgccatgttctgtcatgaatactcacaaattatttagtatacctgaatcttggtttctttttataactgagtaataatggttacatctcaggtagtttgaggattgactaaaaaaatgcgagaatgttgtatgtgactgaataacaatttttactctgcgaagccaaagtaaatataatattatcagtaactttatccccagtgtcagtatttataaaatgtttattaaggctagaaaaaatgaatacaatatcctgaaggtgaaatatattctcttcaattagcataaatatgatttacataagttagctatacagctattgagatagtactttctagtaaacttaaactactttttaaacatacattttgtgatgatttaacaaaaatatagagaatgatttgctttattgtaattgtatataagtgactggaaaagcacaaagaaataaagtgggttcgatctgtttaccaaaaaaaaaa

SEQ ID NO: 308846 - DNA, 4248 bp, Homo sapiens
  misc_feature (564)..(564): n is a, c, g, or t
  misc_feature (1483)..(1483): n is a, c, g, or t
agcgccgagtcctaggccaggtctggggtaacctggaacttccacctgggctctgcgctaggtctctgtttcactccctccccgcggggcgcgcagctcgcgggtctttggacaccaccggtcctgagtccgcggactgccattttcattaagaactgccacttagaggtaccaaaataaagggtatttgctacctttaatacttgccagttcaggttggaggcacaggcagcagcaagaatggaaagaaatgttcttacaacattttcacaggaaatgtcccagttaattttgaatgaaatgccaaaagctgaatattccagtttattcaatgattttgttgaatctgaattttttttgattgatggggattcattacttatcacatgtatctgtgagatatcatttaagcctgggcagaacctccatttcttctatctggttgaacgctatcttgtggatcttattagcaaaggaggacaattcaccatagttttcttcaaggatgccgagtatgcgtatttcaacttccctgaacttctttctttgagaactgctttaatncttcatcttcagaagaataccaccattgatgttcgaacaacattttcgagatgcttatcaaaagagtggggaagtttcttggaagagagttacccatatttcctgatagttgcagacgaaggcctgaacgatctacaaacacagcttttcaactttttaatcattcattcttgggcaaggaaggtcaacgttgtactttcctcagggcaagaatctgatgttctttgcctttatgcataccttcttccaagcatgtacagacaccagattttttcctggaagaataagcagaacattaaagatgcttatacaaccctgcttaaccagttggaaagatttaagctttcagcattagcacctctttttggaagtttaaaatggaataatattacggaagaggcacacaagactgtatctctgcttacacaagtctggccagaaggatctgacattcggcgtgtcttttgtgttacttcatgctcattatctttgagaatgtaccatcgctttttaggaaacagagagccctcctctggtcaggaaactgagatccaacaggtgaacagtaattgcttaaccctgcaggagatggaagatttgtgtaaactgcattgtctcactgtggtttttctactccatctgcctctttctcaaagagcttgtgctagagtcatcacttcccattgggctgaggacatgaagcctttattacaaatgaaaaagtggtgtgaatatttcatcttaagaaatatacatacttttgaattttggaatctgaatttaattcacctttctgacttaaatgatgagcttttgttgaagaatattgctttttactatgaaaatgaaaatgtaaaaggcctacatttgaatttgggagataccattatgaaagattatgaatatctctggaataccntatcaaagttggtcagagactttgaggttggacagccatttcctctgagaacaacaaaagtttgttttcttgaaaagaaaccatcaccaatcaaagacagctccaatgaaatggtgcccaatttgggttttattccaacgtcatcttttgtggttgataaatttgctggagatattttgaaagatttgccttttctaaagagtgatgatcctattgttacttcactggttaaacaaaaggaatttgatgaacttgtgcactggcattctcataaacccctgagtgatgattatgacaggtccaggtgtcagtttgatgaaaaatctagagaccctcgtgttcttagatctgtgcaaaagtatcatgttttccaacggttttatgggaattcattagaaacagtctcttcgaaaatcatcgtgactcaaactattaagtcaaagaaggattttagtgggcccaagagcaaaaaggcacacgagaccaaggctgaaataattgctagagagaataagaaaaggttatttgccagggaagaacaaaaggaagagcaaaagtggaatgctttgtcattttctattgaagagcaattgaaagaaaatttacactctggaataaagagcctggaagattttttgaaatcctgtaaaagtagctgtgtgaaacttcaggttgaaatggtggggttaactgcttgcttgaaagcctggaaagaacattgccgaagtgaagaaggtaaaaccacgaaagatttaagtatagctgttcaggtgatgaaaaggatccactccttgatggaaaaatactcagaacttttacaagaagatgatcggcaactcatagccagatgccttaagtatttaggatttgatgagttggcaagttctttacatccagcccaggatgcagaaaatgatgtaaaagtgaagaaaaggaataaatattcagttggcattgggccagctcggttccaactgcaatacatgggccattatttgatacgagatgagagaaaagacccagatcccagggtccaggattttattcccgacacatggcagcgagagctccttgatgttgtggataagaatgagtcagcagtgattgttgccccaacgtcctcaggcaaaacctatgcctcctactactgtatggagaaagtgctgaaggagagcgacgacggggtggtcgtgtacgttgcacccacaaaggcccttgttaatcaagtggcagcaactgttcagaatcgttttacgaaaaatctgccaagtggtgaagttctctgtggtgttttcaccagggagtatcgtcatgatgccttaaactgtcaggtacttattacagtgcctgcctgctttgaaattctgctgcttgctcctcatcgccaaaactgggtgaaaaagatcagatatgttatatttgatgaggttcattgtcttggtggagaaattggagcagaaatctgggaacatctccttgtcatgatccgatgtccctttttggctctttcagctaccataagtaatcctgaacatctcaccgaccagcagtgtctcacacatccggctcaacacatggtcactggcacacaccaagcacagcacacaacatcaatttgcaacacatcacatcaccctgcttctcaaacagcaccatgataagagtcagatcaaggctcaggcatatttcccagaacagcactcaacattgccacagttcaacacaccaacatctgtcatcacacagttcaagcacctatgttagcttccataacttgcgcacgccacgcaagcgtacatcacatcgcatccatcaagccagcacacagaccattgatacattgcttaatacacacttaagccaacacaatagaggtaggacagctgctatcaaactactgatggacttcaaaataataaccagcgaccaaatgattcgactaggcgaaagatatcaacacaagcaggacttcaataccatgtgaaacacaggggtactggggacatattcaccatcgccttggacatcatttaccacacatgttacaaccccataccgcacagcaacagagacgaaaaccacaagagcgtgggatacttgggaactgcaccaatggatccgcccaaaccgttacgcggagcacaccacacgcgagggggcaccatacagagtacgccacacaggcggcaaccactgggactgaaaccaccagcgaacaaccagcaagaccacgtccaaacatccgtcgaaaacgacaacatccacacacatgaaggtacacactgacaacacaacgagccagtaggaaacggctacgtgaccacacccagatgcccaacgatagacaggcccctacaacagcgggcccaggcacaatacacaccgcacggctagaggtgcactgaaccatcaacgtggggaacaaccgccacccacacacacgaggcccccgagcaagagggactaagtcagagaaacactcccgacgcgcccgcggacaggcacacagtcagagcgaggcacacgaacaacagcgactgccacacgcccaggtagagccagcgacgcaccgcgcagcgcagctcaagcacacgtgcgagcgaagcaccacagcacaaacaacaagaacgataacagaggaagagcccgacacaaacaagccacgacggtctaaccgatgcacgaacacagccagacagaccgcagagcgccaacacaggcgtcgcccatcgaacagaaagacgggcaactcgaagcagaacaga

SEQ ID NO: 308847 - DNA, 479 bp, Homo sapiens
cagtggctggaccaggcctggtgtgtgtaagtgtccaagaagctgaagtgacattgtccttctgcctccatccctgggcttcctccccaaggagcgggagaagattgtggctcccatcagtgactccccgaagccaccgccacagcgtgtgaccctcacgctacctgtcctgaatgcagcacgaactgtcatctttgtggcaactggagaaggcaaggcagctgttctgaaggtaacagctgagggttctagtcctgggaagttcatgggcatgtgggccccagggacagaaaatggccccagacattattgtgctgaagcatcagatctgaagaaaactcagtcattcttgggttgaaaggtaacttgaaattgcaattagaaaaaaaggaaaaaaaaaaaaaaaaccccagaaaattgcaattaaaggctagttaggtattaaccgctatgaaatgaaattgatgagatgaggccaa

SEQ ID NO: 308848 - DNA, 1262 bp, Homo sapiens
gcagggccggcccttgcgcaggcgtactagcgacggccgtagggagcgcttcctcctccccgccgccgccctcgccatggccgcgccggccccgggcctcatctcggtgttctcgagttcccaggagctgggtgcggcgctagcgcagctggtggcccagcgcgcagcatgctgcctggcaggggcccgcgcccgtttcgcgctcggcctgtcgggcgggagcctcgtctcgatgctagcccgcgagctacccgccgccgtcgcccctgccgggccagctagcttagcgcgctggacgctgggcttctgcgacgagcgcctcgtgcccttcgatcacgccgagagcacgtacggcctctaccggacgcatcttctctccagactgccgatcccagaaagccaggtgatcaccattaaccccgagctgcctgtggaggaggcggctgaggactacgccaagaagctgagacaggcattccaaggggactccatcccggttttcgacctgctgatcctgggggtgggccccgatggtcacacctgctcactcttcccagaccaccccctcctacaggagcgggagaagattgtggctcccatcagtgactccccgaagccaccgccacagcgtgtgaccctcacgctacctgtcctgaatgcagcacgaactgtcatctttgtggcaactggagaaggcaaggcagctgttctgaagcgcattttggaggaccaggaggaaaacccgctgcccgccgccctggtccagccccacaccgggaaactgtgctggttcttggacgaggcggccgcccgcctcctgaccgtgcccttcgagaagcattccactttgtagctggccagagggacgccgcagctgggaccaggcacgcggcccatggggctgggcccctgctggccgccactctccgggctctcctttcaaaaagccacgtcgtgctgctgctggaagccaacagcctccggccagcagccctacccggggctcaacacacaggctgtggctctggacatccggatattaaaaggagcgttgctggaaaaaaaaaaaaaacacaaacagaaacacgacaaaaacacaaaacaaaacaaaagaagacacaacaacacaaagagaaaaagcagcgcgggacgagtggggggcggagaacaaagaaataagagagcgaagaaagagtatcacgacacacttgtggaagaggagaagggcgccccccagagggggaataaagagagccgcgcaa

SEQ ID NO: 308849 - DNA, 1060 bp, Homo sapiens
gcagggccggcccttgcgcaggcgtactagcgacggccgtagggagcgcttcctcctccccgccgccgccctcgccatggccgcgccggccccgggcctcatctcggtgttctcgagttcccaggagctgggtgcggcgctagcgcagctggtggcccagcgcgcagcatgctgcctggcaggggcccgcgcccgtttcgcgctcggcctgtcgggcgggagcctcgtctcgatgctagcccgcgagctacccgccgccgtcgcccctgccgggccagctagcttagcgcgctggacgctgggcttctgcgacgagcgcctcgtgcccttcgatcacgccgagagcacgtacggcctctaccggacgcatcttctctccagactgccgatcccagaaagccaggtgatcaccattaaccccgagctgcctgtggaggaggcggctgaggactacgccaagaagctgagacaggcattccaaggggactccatcccggttttcgacctgctgatcctgggggtgggccccgatggtcacacctgctcactcttcccagaccaccccctcctacaggagcgggagaagattgtggctcccatcagtgactccccgaagccaccgccacagcgtgtgaccctcacgctacctgtcctgaatgcagcacgaactgtcatctttgtggcaactggagaaggcaaggcagctgttctgaagcgcattttggaggaccaggaggaaaacccgctgcccgccgccctggtccagccccacaccgggaaactgtgctggttcttggacgaggcggccgcccgcctcctgaccgtgcccttcgagaagcattccactttgtagctggccagagggacgccgcagctgggaccaggcacgcggcccatggggctgggcccctgctggccgccactctccgggctctcctttcaaaaagccacgtcgtgctgctgctggaagccaacagcctccggccagcagccctacccggggctcaacacacaggctgtggctctggacatccggatattaaaaggagcgttgctggaa

SEQ ID NO: 308850 - DNA, 965 bp, Homo sapiens
gcagggccggcccttgcgcaggcgtactagcgacggccgtagggagcgcttcctcctccccgccgccgccctcgccatggccgcgccggccccgggcctcatctcggtgttctcgagttcccaggagctgggtgcggcgctagcgcagctggtggcccagcgcgcagcatgctgccgggccagctagcttagcgcgctggacgctgggcttctgcgacgagcgcctcgtgcccttcgatcacgccgagagcacgtacggcctctaccggacgcatcttctctccagactgccgatcccagaaagccaggtgatcaccattaaccccgagctgcctgtggaggaggcggctgaggactacgccaagaagctgagacaggcattccaaggggactccatcccggttttcgacctgctgatcctgggggtgggccccgatggtcacacctgctcactcttcccagaccaccccctcctacaggagcgggagaagattgtggctcccatcagtgactccccgaagccaccgccacagcgtgtgaccctcacgctacctgtcctgaatgcagcacgaactgtcatctttgtggcaactggagaaggcaaggcagctgttctgaagcgcattttggaggaccaggaggaaaacccgctgcccgccgccctggtccagccccacaccgggaaactgtgctggttcttggacgaggcggccgcccgcctcctgaccgtgcccttcgagaagcattccactttgtagctggccagagggacgccgcagctgggaccaggcacgcggcccatggggctgggcccctgctggccgccactctccgggctctcctttcaaaaagccacgtcgtgctgctgctggaagccaacagcctccggccagcagccctacccggggctcaacacacaggctgtggctctggacatccggatattaaaaggagcgttgctggaa

SEQ ID NO: 308851 - DNA, 1149 bp, Homo sapiens
gccgtgggaccctggaggctttgaaacaggacaatgggctggctagacaggtgcaggctatggccaggaaaccccccaaatacaacggaattgaaagactcctgttggaatgctggcccccgcaggaaccaccatgatcccgattcacccaggagggccaccctcccgtccagccccccaagagcagcagggctccctcttgcccttgaacctcctctgccctgacaggcggcgtcacccagggctcaggatcctggcttccagcattccagaggtgactcaccaaccaaagtgtcactcaccaaccgaaggaccttgcacaaatgcaccagcctccccatgcctcagtctccccatctgtaaatgagtgttatgacggtactgtcataaactccctggaggatccaggtggtcacgttactgttggtgacattgtccctctgttggctgcagacgcatcttctctccagactgccgatcccagaaagccaggtgatcaccattaaccccgagctgcctgtggaggaggcggctgaggactacgccaagaagctgagacaggcattccaaggggactccatcccggttttcgacctgctgatcctgggggtgggccccgatggtcacacctgctcactcttcccagaccaccccctcctacaggagcgggagaagattgtggctcccatcagtgactccccgaagccaccgccacagcgtgtgaccctcacgctacctgtcctgaatgcagcacgaactgtcatctttgtggcaactggagaaggcaaggcagctgttctgaagcgcattttggaggaccaggaggaaaacccgctgcccgccgccctggtccagccccacaccgggaaactgtgctggttcttggacgaggcggccgcccgcctcctgaccgtgcccttcgagaagcattccactttgtagctggccagagggacgccgcagctgggaccaggcacgcggcccatggggctgggcccctgctggccgccactctccgggctctcctttcaaaaagccacgtcgtgctgctgctggaagccaacagcctccggccagcagccctacccggggctcaacacacaggctgtggctctggacatccggatattaaaaggagcgttgctggaa

SEQ ID NO: 308852 - DNA, 734 bp, Homo sapiens
cactcatttcacagatggagaaactgaggccagaagagacgcatcttctctccagactgccgatcccagaaagccaggtgatcaccattaaccccgagctgcctgtggaggaggcggctgaggactacgccaagaagctgagacaggcattccaaggggactccatcccggttttcgacctgctgatcctgggggtgggccccgatggtcacacctgctcactcttcccagaccaccccctcctacaggagcgggagaagattgtggctcccatcagtgactccccgaagccaccgccacagcgtgtgaccctcacgctacctgtcctgaatgcagcacgaactgtcatctttgtggcaactggagaaggcaaggcagctgttctgaagcgcattttggaggaccaggaggaaaacccgctgcccgccgccctggtccagccccacaccgggaaactgtgctggttcttggacgaggcggccgcccgcctcctgaccgtgcccttcgagaagcattccactttgtagctggccagagggacgccgcagctgggaccaggcacgcggcccatggggctgggcccctgctggccgccactctccgggctctcctttcaaaaagccacgtcgtgctgctgctggaagccaacagcctccggccagcagccctacccggggctcaacacacaggctgtggctctggacatccggatattaaaaggagcgttgctggaa

SEQ ID NO: 308853 - DNA, 884 bp, Homo sapiens
  misc_feature (44)..(44): n is a, c, g, or t
  misc_feature (51)..(51): n is a, c, g, or t
  misc_feature (80)..(80): n is a, c, g, or t
  misc_feature (140)..(140): n is a, c, g, or t
attacatttcctgatgctttcaaggccatattccaaaagtatcncagatgncaaatagaatatgctatataaaccaaaantgtgcatttcagatgacctattacagcggcgatagaccccagagcccacaggcgtacttnccaggcactgatccattggaggagggccatggtgccggcctctaccggacgcatcttctctccagactgccgatcccagaaagccaggtgatcaccattaaccccgagctgcctgtggaggaggcggctgaggactacgccaagaagctgagacaggcattccaaggggactccatcccggttttcgacctgctgatcctgggggtgggccccgatggtcacacctgctcactcttcccagaccaccccctcctacaggagcgggagaagattgtggctcccatcagtgactccccgaagccaccgccacagcgtgtgaccctcacgctacctgtcctgaatgcagcacgaactgtcatctttgtggcaactggagaaggcaaggcagctgttctgaagcgcattttggaggaccaggaggaaaacccgctgcccgccgccctggtccagccccacaccgggaaactgtgctggttcttggacgaggcggccgcccgcctcctgaccgtgcccttcgagaagcattccactttgtagctggccagagggacgccgcagctgggaccaggcacgcggcccatggggctgggcccctgctggccgccactctccgggctctcctttcaaaaagccacgtcgtgctgctgctggaagccaacagcctccggccagcagccctacccggggctcaacacacaggctgtggctctggacatccggatattaaaaggagcgttgctggaa

SEQ ID NO: 308854 - DNA, 1164 bp, Homo sapiens
gcagggccggcccttgcgcaggcgtactagcgacggccgtagggagcgcttcctcctccccgccgccgccctcgccatggccgcgccggccccgggcctcatctcggtgttctcgagttcccaggagctgggtgcggcgctagcgcagctggtggcccagcgcgcagcatgctgcctggcaggggcccgcgcccgtttcgcgctcggcctgtcgggcgggagcctcgtctcgatgctagcccgcgagctacccgccgccgtcgcccctgccgggccagctagcttagcgcgctggacgctgggcttctgcgacgagcgcctcgtgcccttcgatcacgccgagagcacgtacggcctctaccggacgcatcttctctccagactgccgatcccagaaagccaggtgatcaccattaaccccgagctgcctgtggaggaggcggctgaggactacgccaagaagctgagacaggaactgccccagggatcactggcagatccctttgaggaatcccctcttcgaggccacagccctgccctggggagcctgaaggccactcggcctctgttgcccaggcattccaaggggactccatcccggttttcgacctgctgatcctgggggtgggccccgatggtcacacctgctcactcttcccagaccaccccctcctacaggagcgggagaagattgtggctcccatcagtgactccccgaagccaccgccacagcgtgtgaccctcacgctacctgtcctgaatgcagcacgaactgtcatctttgtggcaactggagaaggcaaggcagctgttctgaagcgcattttggaggaccaggaggaaaacccgctgcccgccgccctggtccagccccacaccgggaaactgtgctggttcttggacgaggcggccgcccgcctcctgaccgtgcccttcgagaagcattccactttgtagctggccagagggacgccgcagctgggaccaggcacgcggcccatggggctgggcccctgctggccgccactctccgggctctcctttcaaaaagccacgtcgtgctgctgctggaagccaacagcctccggccagcagccctacccggggctcaacacacaggctgtggctctggacatccggatattaaaaggagcgttgctggaa

SEQ ID NO: 308855 - DNA, 962 bp, Homo sapiens
gcagggccggcccttgcgcaggcgtactagcgacggccgtagggagcgcttcctcctccccgccgccgccctcgccatggccgcgccggccccgggcctcatctcggtgttctcgagttcccaggagctgggtgcggcgctagcgcagctggtggcccagcgcgcagcatgctgcctggcaggggcccgcgcccgtttcgcgctcggcctgtcgggcgggagcctcgtctcgatgctagcccgcgagctacccgccgccgtcgcccctgccgggccagctagcttagcgcgctggacgctgggcttctgcgacgagcgcctcgtgcccttcgatcacgccgagagcacgtacggcctctaccggacgcatcttctctccagactgccgatcccagaaagccaggtgatcaccattaaccccgagctgcctgtggaggaggcggctgaggactacgccaagaagctgagacaggcattccaaggggactccatcccggttttcgacctgctgatcctgggggtgggccccgatggtcacacctgctcactcttcccagaccaccccctcctacaggagcgggagaagattgtggctcccatcagtgactccccgaagccaccgccacagcgtgtgaccctcacgctacctgtcctgaatgcagcacgaactgtcatctttgtggcaactggagaaggcaaggcagctgttctgaaggtaacagctgagggttctagtcctgggaagttcatgggcatgtgggccccagggacagaaaatggccccagacattattgtgctgaagcatcagatctgaagaaaactcagtcattcttgggttgaaaggtaacttgaaattgcaattagaaaaaaaggaaaaaaaaaaaaaaaaccccagaaaattgcaattaaaggctagttaggtattaaccgctatgaaatgaaattgatgagatgaggccaa

SEQ ID NO: 308856 - DNA, 812 bp, Homo sapiens
gccgtgggaccctggaggctttgaaacaggacaatgggctggctagacaggtgcaggctatggccaggaaaccccccaaatacaacggaattgaaagactcctgttggaatgctggcccccgcaggaaccaccatgatcccgattcacccaggagggccaccctcccgtccagccccccaagagcagcagggctccctcttgcccttgaacctcctctgccctgacaggcggcgtcacccagggctcaggatcctggcttccagcattccagaggtgactcaccaaccaaagtgtcactcaccaaccgaaggaccttgcacaaatgcaccagcctccccatgcctcagtctccccatctgtaaatgagtgttatgacggtactgtcataaactccctggaggatccaggtggtcacgttactgttggtgacattgtccctctgttggctgcagacgcatcttctctccagactgccgatcccagaaagccaggtgatcaccattaaccccgagctgcctgtggaggaggcggctgaggactacgccaagaagctgagacaggcattccaaggggactccatcccggttttcgacctgctgatcctgggggtgggccccgatggtcacacctgccaccttgtagaggttgtggaggtgaacggggtctgcgtggaggggaagcagcatggggacgtggtgtccgccatcagggctggcggggacgagaccaagctgctggtggtggacagggaaactgacgagttcttcaagaaatgcagagtgatcccatctcacgagcacctgaatgtctc

SEQ ID NO: 308857 - DNA, 836 bp, Homo sapiens
gcagggccggcccttgcgcaggcgtactagcgacggccgtagggagcgcttcctcctccccgccgccgccctcgccatggccgcgccggccccgggcctcatctcggtgttctcgagttcccaggagctgggtgcggcgctagcgcagctggtggcccagcgcgcagcatgctgcctggcaggggcccgcgcccgtttcgcgctcggcctgtcgggcgggagcctcgtctcgatgctagcccgcgagctacccgccgccgtcgcccctgccgggccagctagcttagcgcgctggacgctgggcttctgcgacgagcgcctcgtgcccttcgatcacgccgagagcacgtacggcctctaccgggtgagagctacgggggccgccggggatcacgccgagagggccacagccaccgcctacaccccggctacggaggccgccgggggccatgccgaaagggccgcgcccactgtctgcacctcggctacgggggccactgggtatcatgccaagagggccgtgcccactgcctgcacctcggctacgtgggtcgctgggggtcatgccaagagggccgcgcccaccggttgccctcggctacgggggccactgggggtcatgccgagatggtcacgcccactgcctgcacctcgactacgggggccgctgggggtctagccgacagggctcgcccgcctcctgaaccccgcctacagtgggtcccgcaggacctcactgcgccctctgcctttatctaggcagggctagaaatggtctacttgcagtccgtcttcctgcttcatccggtggccaggcagagggaacggcacgggca

SEQ ID NO: 308858 - DNA, 416 bp, Homo sapiens
tcccgggctcaagtgattatcctacctcagcctcccaagtagctaggactacaggtgcctgccaccacgcctggctaatttttgtatttttagtagagacagggtttcatcatgttggccaggctggtcttgaactcctgacctcgtgatccacctacctcggcctcccaaagtgctgggatttcaggtgtgagccaccatgcccagccacagctacttgtatttttttatctgacaactgtttctgtgtcctctgagtctcccctgcccctgccacctacaacctctcaaggctgtcttctccccacgcccaggcattccaaggggactccatcccggttttcgacctgctgatcctgggggtgggccccgatggtcacacctgctcactcttcccagaccaccccctcctacag

SEQ ID NO: 308859 - DNA, 287 bp, Homo sapiens
ctccccatgcctcagtctccccatctgtaaatgagtgttatgacggtactgtcataaactccctggaggatccaggtggtcacgttactgttggtgacattgtccctctgttggctgcagacgcatcttctctccagactgccgatcccagaaagccaggtgatcaccattaaccccgagctgcctgtggaggaggcggctgaggactacgccaagaagctgagacaggtgagccccgaggagcggccgcaagggagtcacatccacgaagcggccacaccccgggc

SEQ ID NO: 308860 - DNA, 775 bp, Homo sapiens
  misc_feature (1)..(1): n is a, c, g, or t
naagaaactgtgtgtgatccagtaaggcctcaggcccaggcccaaggccaagtgagagagcccaggccacaggacatgctgccattctgccaagagaggctcttctgggggccaggctgggactgggccccggaaaccaaaactccgtgccttacccagccggggccctcctggagccttcttggggtgttgtggctgggaacccgacaggcaccagtgccctgccaggcctggtgccctcctggaccgcctgcacgtgccagcctcccacctgcttcctaaaggcaaccctgccagtgtccaccacagctctgcctgcccttcagcccagcaaggtttaatcaaaatgcaatgctttgcaagtctttactgcttggaggtggctgagttgggggccctgggcaggggtaagctggcaggcagtgccatggcaggccagggtcccctcccatggggtctggcccccgttccagcatgtccagcccctgaagttggagtggggggcggtctgcctttgctgccactgccaggcctctgccctgcagctgaaacttggccatcacatcaacagaaaacccctcccagtgccagctgcccagcgtgggcaggccctggggacaatacaggtccacctgaggggctgcagggtgacacccagcagccgctgccccctcactgcccacccagcgagggcagcctacccgagcctgccccctgccaggtgtgtgccctgaggctggcggctggatgcgtggccaataaaaagcagacctag

SEQ ID NO: 308861 - DNA, 1103 bp, Homo sapiens
aatgcagttccagtaaccctgtggctttcctgctctgtctgttggtggagggctatcttcactctaagtgtgtcaatggcgtggggccttctggggcatgtccccaggaagtctgtgaggagaccgggacagtcgcaagggcagatgctgccagggacaagtacactgcaacccccctcctgttggacagtgtcctcccaccccgaggccatgggtgggtctatggagaagcagattaccccccgcacaccgagtcttctggggggcgaccagccaaaggtcaatcagccaggcctcaggcccaggcccaaggccaagtgagagagcccaggccacaggacatgctgccattctgccaagagaggctcttctgggggccaggctgggactgggccccggaaaccaaaactccgtgccttacccagccggggccctcctggagccttcttggggtgttgtggctgggaacccgacaggcaccagtgccctgccaggcctggtgccctcctggaccgcctgcacgtgccagcctcccacctgcttcctaaaggcaaccctggcccacacccgcatgcgcccggtgcagcctgccaagggccagtcggggggtgctgcgtcctgccagtgtccaccacagctctgcctgcccttcagcccagcaaggtttaatcaaaatgcaatgctttgcaagtctttactgcttggaggtggctgagttgggggccctgggcaggggtaagctggcaggcagtgccatggcaggccagggtcccctcccatggggtctggcccccgttccagcatgtccagcccctgaagttggagtggggggcggtctgcctttgctgccactgccaggcctctgccctgcagctgaaacttggccatcacatcaacagaaaacccctcccagtgccagctgcccagcgtgggcaggccctggggacaatacaggtccacctgaggggctgcagggtgacacccagcagccgctgccccctcactgcccacccagcgagggcagcctacccgagcctgccccctgccaggtgtgtgccctgaggctggcggctggatgcgtggccaataaaaagcagacctag

SEQ ID NO: 308862 - DNA, 164 bp, Homo sapiens
tgactcatgattcactcacccctgcccggtcctctccctgctccagctccaacgaggaggtcgctgctatgatccgggctggagataccaccaagtttgctattgaaactctaaactaggtgctattgaaacttctaaactaggggtaccagctcgatctattt

SEQ ID NO: 308863 - DNA, 3169 bp, Homo sapiens
aggaggtaggaggaggcatgttgtgcggtgtcgtgggagtggggtgtcagtgttgttgagatgtgtggagagttgggggggttacatgggccaggcttgcagcggcctgttgagcccttggtataggagtctgggtggcctcgctcgcagcccgccagccttccagctagctgccctgcacctgcagcccccccgtggcgggaggcatggaggaggtcatcgtggcccaggtggaccatggcttgggctcagcatgggtccccagccatcggcgggtgaacccacccacactgcgcatgaagaagctgaactggcagaagctgccatccaacgtggcacgtgagcacaactctatgtgggcgtccctgagcagccccgacgccgaggctgtggagcccgacttctccagcatcgagcgactattctccttccctgcagccaagcccaaggagcccaccatggtggccccccgggccaggaaggagcccaaggagatcactttcctcgatgccaagaagagcctgaacctcaacatcttcctgaagcaatttaagtgctccaacgaggaggtcgctgctatgatccgggctggagataccaccaagtttgatgtggaggttctcaaacaactccttaagctccttcccgagaagcacgagattgaaaacctgcgggcattcacagaggagcgagccaagctggccagcgccgaccacttctacctcctcctgctggccattccctgctaccagctgcgaatcgagtgcatgctgctgtgtgagggcgcggccgccgtgctggacatggtgcggcccaaggcccagctggtgctggctgcctgcgaaagcctgctcaccagccgccagctgcccatcttctgccagctgatcctgagaattgggaacttcctcaactacggcagccacaccggtgacgccgacggcttcaagatcagcacattgctgaagctcacggagaccaagtcccagcagaaccgcgtgacgctgctgcaccacgtgctggaggaagcggaaaagagccaccccgacctcctgcagctgccccgggacctggaacagccctcgcaagcagcagggatcaacctggagatcatccgctcagaggccagctccaacctgaagaagcttctggagaccgagcggaaggtgtctgcctccgtggccgaggtccaggagcagtacaccgagcgcctccaggccagcatctcggccttccgggcactggacgagctgtttgaggccatcgagcagaagcaacgggagctggccgactacctgtgtgaggacgcccagcagctgtccctggaggacacgttcagcaccatgaaggctttccgggaccttttcctccgcgccctgaaggagaacaaggaccggaaggagcaggcggcgaaggcagagaggaggaagcagcagctggcggaggaggaggcgcggcggcctcggggagaggacgggaagcctgtcaggaaggggcccgggaagcaggaggaggtgtgtgtcatcgatgccctgctggctgacatcaggaagggcttccagctgcggaagacagcccggggccgcggggacaccgacgggggcagcaaggcagcctccatggatcccccaagagccacagagcctgtggccaccagtaaccctgcaggagaccccgtgggcagcacgcgctgtcccgcctctgagcccggccttgatgctacaacagccagcgagtcccggggctgggaccttgtagacgccgtgacccccggccctcagcccaccctggagcagttggaggagggtggtccccggcccctggagaggcgttcttcctggtatgtggatgccagcgatgtcctaaccactgaggatccccagtgcccccagcccttggagggggcctggccggtgactctgggagatgctcaggccctgaagcccctcaagttctccagcaaccagccccctgcagccggaagttcaaggcaagatgccaaggatcccacgtccttgctgggcgtcctccaggccgaggccgacagcacaagtgaggggctggaggacgctgtccacagccgtggtgccagaccccctgcagcaggcccaggtggggatgaggacgaggacgaggaggacacggccccagagtccgcactggacacatccctggacaagtccttctccgaggatgcggtgaccgactcctcggggtcgggcacactccccagggcccggggccgggcctcaaaggggaccgggaagcgaaggaagaagcgtccctccaggagccaggaagaggttccccctgattctgatgataataaaacaaagaaactgtgtgtgatccagtaaggcctcaggcccaggcccaaggccaagtgagagagcccaggccacaggacatgctgccattctgccaagagaggctcttctgggggccaggctgggactgggccccggaaaccaaaactccgtgccttacccagccggggccctcctggagccttcttggggtgttgtggctgggaacccgacaggcaccagtgccctgccaggcctggtgccctcctggaccgcctgcacgtgccagcctcccacctgcttcctaaaggcaaccctggcccacacccgcatgcgcccggtgcagcctgccaagggccagtcggggggtgctgcgtcctgccagtgtccaccacagctctgcctgcccttcagcccagcaaggtttaatcaaaatgcaatgctttgcaagtctttactgcttggaggtggctgagttgggggccctgggcaggggtaagctggcaggcagtgccatggcaggccagggtcccctcccatggggtctggcccccgttccagcatgtccagcccctgaagttggagtggggggcggtctgcctttgctgccactgccaggcctctgccctgcagctgaaacttggccatcacatcaacagaaaacccctcccagtgccagctgcccagcgtgggcaggccctggggacaatacaggtccacctgaggggctgcagggtgacacccagcagccgctgccccctcactgcccacccagcgagggcagcctacccgagcctgccccctgccaggtgtgtgccctgaggctggcggctggatgcgtggccaataaaaagcagacctag

SEQ ID NO: 308864 - DNA, 3252 bp, Homo sapiens
aggaggtaggaggaggcatgttgtgcggtgtcgtgggagtggggtgtcagtgttgttgagatgtgtggagagttgggggggttacatgggccaggcttgcagcggcctgttgagcccttggtataggagtctgggtggcctcgctcgcagcccgccagccttccagctagctgccctgcacctgcagcccccccgtggcgggaggcatggaggaggtcatcgtggcccaggtggaccatggcttgggctcagcatgggtccccagccatcggcgggtgaacccacccacactgcgcatgaagaagctgaactggcagaagctgccatccaacgtggcacgtgagcacaactctatgtgggcgtccctgagcagccccgacgccgaggctgtggagcccgacttctccagcatcgagcgactattctccttccctgcagccaagcccaaggagcccaccatggtggccccccgggccaggaaggagcccaaggaggtggggacggggaggggactcagaccggggccgcctgcctggccaccctccggtaccagcctgttgggtggggggttttctagatcactttcctcgatgccaagaagagcctgaacctcaacatcttcctgaagcaatttaagtgctccaacgaggaggtcgctgctatgatccgggctggagataccaccaagtttgatgtggaggttctcaaacaactccttaagctccttcccgagaagcacgagattgaaaacctgcgggcattcacagaggagcgagccaagctggccagcgccgaccacttctacctcctcctgctggccattccctgctaccagctgcgaatcgagtgcatgctgctgtgtgagggcgcggccgccgtgctggacatggtgcggcccaaggcccagctggtgctggctgcctgcgaaagcctgctcaccagccgccagctgcccatcttctgccagctgatcctgagaattgggaacttcctcaactacggcagccacaccggtgacgccgacggcttcaagatcagcacattgctgaagctcacggagaccaagtcccagcagaaccgcgtgacgctgctgcaccacgtgctggaggaagcggaaaagagccaccccgacctcctgcagctgccccgggacctggaacagccctcgcaagcagcagggatcaacctggagatcatccgctcagaggccagctccaacctgaagaagcttctggagaccgagcggaaggtgtctgcctccgtggccgaggtccaggagcagtacaccgagcgcctccaggccagcatctcggccttccgggcactggacgagctgtttgaggccatcgagcagaagcaacgggagctggccgactacctgtgtgaggacgcccagcagctgtccctggaggacacgttcagcaccatgaaggctttccgggaccttttcctccgcgccctgaaggagaacaaggaccggaaggagcaggcggcgaaggcagagaggaggaagcagcagctggcggaggaggaggcgcggcggcctcggggagaggacgggaagcctgtcaggaaggggcccgggaagcaggaggaggtgtgtgtcatcgatgccctgctggctgacatcaggaagggcttccagctgcggaagacagcccggggccgcggggacaccgacgggggcagcaaggcagcctccatggatcccccaagagccacagagcctgtggccaccagtaaccctgcaggagaccccgtgggcagcacgcgctgtcccgcctctgagcccggccttgatgctacaacagccagcgagtcccggggctgggaccttgtagacgccgtgacccccggccctcagcccaccctggagcagttggaggagggtggtccccggcccctggagaggcgttcttcctggtatgtggatgccagcgatgtcctaaccactgaggatccccagtgcccccagcccttggagggggcctggccggtgactctgggagatgctcaggccctgaagcccctcaagttctccagcaaccagccccctgcagccggaagttcaaggcaagatgccaaggatcccacgtccttgctgggcgtcctccaggccgaggccgacagcacaagtgaggggctggaggacgctgtccacagccgtggtgccagaccccctgcagcaggcccaggtggggatgaggacgaggacgaggaggacacggccccagagtccgcactggacacatccctggacaagtccttctccgaggatgcggtgaccgactcctcggggtcgggcacactccccagggcccggggccgggcctcaaaggggaccgggaagcgaaggaagaagcgtccctccaggagccaggaagaggttccccctgattctgatgataataaaacaaagaaactgtgtgtgatccagtaaggcctcaggcccaggcccaaggccaagtgagagagcccaggccacaggacatgctgccattctgccaagagaggctcttctgggggccaggctgggactgggccccggaaaccaaaactccgtgccttacccagccggggccctcctggagccttcttggggtgttgtggctgggaacccgacaggcaccagtgccctgccaggcctggtgccctcctggaccgcctgcacgtgccagcctcccacctgcttcctaaaggcaaccctggcccacacccgcatgcgcccggtgcagcctgccaagggccagtcggggggtgctgcgtcctgccagtgtccaccacagctctgcctgcccttcagcccagcaaggtttaatcaaaatgcaatgctttgcaagtctttactgcttggaggtggctgagttgggggccctgggcaggggtaagctggcaggcagtgccatggcaggccagggtcccctcccatggggtctggcccccgttccagcatgtccagcccctgaagttggagtggggggcggtctgcctttgctgccactgccaggcctctgccctgcagctgaaacttggccatcacatcaacagaaaacccctcccagtgccagctgcccagcgtgggcaggccctggggacaatacaggtccacctgaggggctgcagggtgacacccagcagccgctgccccctcactgcccacccagcgagggcagcctacccgagcctgccccctgccaggtgtgtgccctgaggctggcggctggatgcgtggccaataaaaagcagacctag

SEQ ID NO: 308865 - DNA, 3112 bp, Homo sapiens
aggaggtaggaggaggcatgttgtgcggtgtcgtgggagtggggtgtcagtgttgttgagatgtgtggagagttgggggggttacatgggccaggcttgcagcggcctgttgagcccttggtataggagtctgggtggcctcgctcgcagcccgccagccttccagctagctgccctgcacctgcagcccccccgtggcgggaggcatggaggaggtcatcgtggcccaggtggaccatggcttgggctcagcatgggtccccagccatcggcgggtgaacccacccacactgcgcatgaagaagctgaactggcagaagctgccatccaacgtggcacgtgagcacaactctatgtgggcgtccctgagcagccccgacgccgaggctgtggagcccgacttctccagcatcgagcgactattctccttccctgcagccaagcccaaggagcccaccatggtggccccccgggccaggaaggagcccaaggagatcactttcctcgatgccaagaagagcctgaacctcaacatcttcctgaagcaatttaagtgctccaacgaggaggtcgctgctatgatccgggctggagataccaccaagtttgatgtggaggttctcaaacaactccttaagctccttcccgagaagcacgagattgaaaacctgcgggcattcacagaggagcgagccaagctggccagcgccgaccacttctacctcctcctgctggccattccctgctaccagctgcgaatcgagtgcatgctgctgtgtgagggcgcggccgccgtgctggacatggtgcggcccaaggcccagctggtgctggctgcctgcgaaagcctgctcaccagccgccagctgcccatcttctgccagctgatcctgagaattgggaacttcctcaactacggcagccacaccggtgacgccgacggcttcaagatcagcacattgctgaagctcacggagaccaagtcccagcagaaccgcgtgacgctgctgcaccacgtgctggaggaagcggaaaagagccaccccgacctcctgcagctgccccgggacctggaacagccctcgcaagcagcagggatcaacctggagatcatccgctcagaggccagctccaacctgaagaagcttctggagaccgagcggaaggtgtctgcctccgtggccgaggtccaggagcagtacaccgagcgcctccaggccagcatctcggccttccgggcactggacgagctgtttgaggccatcgagcagaagcaacgggagctggccgactacctgtgtgaggacgcccagcagctgtccctggaggacacgttcagcaccatgaaggctttccgggaccttttcctccgcgccctgaaggagaacaaggaccggaaggagcaggcggcgaaggcagagaggaggaagcagcagctggcggaggaggaggcgcggcggcctcggggagaggacgggaagcctgtcaggaaggggcccgggaagcaggaggaggtgtgtgtcatcgatgccctgctggctgacatcaggaagggcttccagctgcggaagacagcccggggccgcggggacaccgacgggggcagcaaggcagcctccatggatcccccaagagccacagagcctgtggccaccagtaaccctgcaggagaccccgtgggcagcacgcgctgtcccgcctctgagcccggccttgatgctacaacagccagcgagtcccggggctgggaccttgtagacgccgtgacccccggccctcagcccaccctggagcagttggaggagggtggtccccggcccctggagaggcgttcttcctggtatgtggatgccagcgatgtcctaaccactgaggatccccagtgcccccagcccttggagggggcctggccggtgactctgggagatgctcaggccctgaagcccctcaagttctccagcaaccagccccctgcagccggaagttcaaggcaagatgccaaggatcccacgtccttgctgggcgtcctccaggccgaggccgacagcacaagtgaggggctggaggacgctgtccacagccgtggtgccagaccccctgcagcaggcccaggtggggatgaggacgaggacgaggaggacacggccccagagtccgcactggacacatccctggacaagtccttctccgaggatgcggtgaccgactcctcggggtcgggcacactccccagggcccggggccgggcctcaaaggggaccgggaagcgaaggaagaagcgtccctccaggagccaggaaggcctcaggcccaggcccaaggccaagtgagagagcccaggccacaggacatgctgccattctgccaagagaggctcttctgggggccaggctgggactgggccccggaaaccaaaactccgtgccttacccagccggggccctcctggagccttcttggggtgttgtggctgggaacccgacaggcaccagtgccctgccaggcctggtgccctcctggaccgcctgcacgtgccagcctcccacctgcttcctaaaggcaaccctggcccacacccgcatgcgcccggtgcagcctgccaagggccagtcggggggtgctgcgtcctgccagtgtccaccacagctctgcctgcccttcagcccagcaaggtttaatcaaaatgcaatgctttgcaagtctttactgcttggaggtggctgagttgggggccctgggcaggggtaagctggcaggcagtgccatggcaggccagggtcccctcccatggggtctggcccccgttccagcatgtccagcccctgaagttggagtggggggcggtctgcctttgctgccactgccaggcctctgccctgcagctgaaacttggccatcacatcaacagaaaacccctcccagtgccagctgcccagcgtgggcaggccctggggacaatacaggtccacctgaggggctgcagggtgacacccagcagccgctgccccctcactgcccacccagcgagggcagcctacccgagcctgccccctgccaggtgtgtgccctgaggctggcggctggatgcgtggccaataaaaagcagacctag

SEQ ID NO: 308866 - DNA, 3596 bp, Homo sapiens
aggaggtaggaggaggcatgttgtgcggtgtcgtgggagtggggtgtcagtgttgttgagatgtgtggagagttgggggggttacatgggccaggcttgcagcggcctgttgagcccttggtataggagtctgggtggcctcgctcgcagcccgccagccttccagctagctgccctgcacctgcagcccccccgtggcgggaggcatggaggaggtcatcgtggcccaggtggaccatggcttgggctcagcatgggtccccagccatcggcgggtgaacccacccacactgcgcatgaagaagctgaactggcagaagctgccatccaacgtggcacgtgagcacaactctatgtgggcgtccctgagcagccccgacgccgaggctgtggagcccgacttctccagcatcgagcgactattctccttccctgcagccaagcccaaggagcccaccatggtggccccccgggccaggaaggagcccaaggagatcactttcctcgatgccaagaagagcctgaacctcaacatcttcctgaagcaatttaagtgctccaacgaggaggtcgctgctatgatccgggctggagataccaccaagtttgatgtggaggttctcaaacaactccttaagctccttcccgagaagcacgagattgaaaacctgcgggcattcacagaggagcgagccaagctggccagcgccgaccacttctacctcctcctgctggccattccctgctaccagctgcgaatcgagtgcatgctgctgtgtgagggcgcggccgccgtgctggacatggtgcggcccaaggcccagctggtgctggctgcctgcgaaagcctgctcaccagccgccagctgcccatcttctgccagctgatcctgagaattgggaacttcctcaactacggcagccacaccggtgacgccgacggcttcaagatcagcacattgctgaagctcacggagaccaagtcccagcagaaccgcgtgacgctgctgcaccacgtgctggaggaagcggaaaagagccaccccgacctcctgcagctgccccgggacctggaacagccctcgcaagcagcagggatcaacctggagatcatccgctcagaggccagctccaacctgaagaagcttctggagaccgagcggaaggtgtctgcctccgtggccgaggtccaggagcagtacaccgagcgcctccaggccagcatctcggccttccgggcactggacgagctgtttgaggccatcgagcagaagcaacgggagctggccgactacctgtgtgaggacgcccagcagctgtccctggaggacacgttcagcaccatgaaggctttccgggaccttttcctccgcgccctgaaggagaacaaggaccggaaggagcaggcggcgaaggcagagaggaggaagcagcagctggcggaggaggaggcgcggcggcctcggggagaggacgggaagcctgtcaggaaggggcccgggaagcaggaggaggtgtgtgtcatcgatgccctgctggctgacatcaggaagggcttccagctgcggaagacagcccggggccgcggggacaccgacgggggcagcaaggcagcctccatggatcccccaagagccacagagcctgtggccaccagtaaccctgcaggagaccccgtgggcagcacgcgctgtcccgcctctgagcccggccttgatgctacaacagccagcgagtcccggggctgggaccttgtagacgccgtgacccccggccctcagcccaccctggagcagttggaggagggtggtccccggcccctggagaggcgttcttcctggtatgtggatgccagcgatgtcctaaccactgaggatccccagtgcccccagcccttggagggggcctggccggtgactctgggagatgctcaggccctgaagcccctcaagttctccagcaaccagccccctgcagccggaagttcaaggcaagatgccaaggatcccacgtccttgctgggcgtcctccaggccgaggccgacagcacaagtgaggggctggaggacgctgtccacagccgtggtgccagaccccctgcagcaggcccaggtggggatgaggacgaggacgaggaggacacggccccagagtccgcactggacacatccctggacaagtccttctccgaggatgcggtgaccgactcctcggggtcgggcacactccccagggcccggggccgggcctcaaaggggaccgggaagcgaaggaagaagcgtccctccaggagccaggaaggtaactcagggaggggccccgggcaccgtcccacgccagggcgctggcacccagccggtccctccccttccccattgggcactgcaagttccagcggcacccaggagaggtgacttgggtgcggcacgggagaggaggcggcagtgcgtccaccgcagggcggctatgtgggctgccgcggcccgtgcaactattcctccaacctactaattccgaccttcacgccacctccgttagggagtagggggcggacaccgggcaccaggtcccaggcaagtggctgccatgtggcttagtggccagagaaccgggcagccctcagagggtgttggcatggctgtcccgggccccccagccccacccactccgagtcagggttgcttctgtgtgataagccgttgagtgcgtttcttttatttggaagcagaggttccccctgattctgatgataataaaacaaagaaactgtgtgtgatccagtaaggcctcaggcccaggcccaaggccaagtgagagagcccaggccacaggacatgctgccattctgccaagagaggctcttctgggggccaggctgggactgggccccggaaaccaaaactccgtgccttacccagccggggccctcctggagccttcttggggtgttgtggctgggaacccgacaggcaccagtgccctgccaggcctggtgccctcctggaccgcctgcacgtgccagcctcccacctgcttcctaaaggcaaccctggcccacacccgcatgcgcccggtgcagcctgccaagggccagtcggggggtgctgcgtcctgccagtgtccaccacagctctgcctgcccttcagcccagcaaggtttaatcaaaatgcaatgctttgcaagtctttactgcttggaggtggctgagttgggggccctgggcaggggtaagctggcaggcagtgccatggcaggccagggtcccctcccatggggtctggcccccgttccagcatgtccagcccctgaagttggagtggggggcggtctgcctttgctgccactgccaggcctctgccctgcagctgaaacttggccatcacatcaacagaaaacccctcccagtgccagctgcccagcgtgggcaggccctggggacaatacaggtccacctgaggggctgcagggtgacacccagcagccgctgccccctcactgcccacccagcgagggcagcctacccgagcctgccccctgccaggtgtgtgccctgaggctggcggctggatgcgtggccaataaaaagcagacctag

SEQ ID NO: 308867 - DNA, 3282 bp, Homo sapiens
aggaggtaggaggaggcatgttgtgcggtgtcgtgggagtggggtgtcagtgttgttgagatgtgtggagagttgggggggttacatgggccaggcttgcagcggcctgttgagcccttggtataggagtctgggtggcctcgctcgcagcccgccagccttccagctagctgccctgcacctgcagcccccccgtggcgggaggcatggaggaggtcatcgtggcccaggtggaccatggcttgggctcagcatgggtccccagccatcggcgggtgaacccacccacactgcgcatgaagaagctgaactggcagaagctgccatccaacgtggcacgtgagcacaactctatgtgggcgtccctgagcagccccgacgccgaggctgtggagcccgacttctccagcatcgagcgactattctccttccctgcagccaagcccaaggagcccaccatggtggccccccgggccaggaaggagcccaaggagatcactttcctcgatgccaagaagagcctgaacctcaacatcttcctgaagcaatttaagtgctccaacgaggaggtcgctgctatgatccgggctggagataccaccaagtttgatgtggaggttctcaaacaactccttaagctccttcccgagaagcacgagattgaaaacctgcgggcattcacagaggagcgagccaagctggccagcgccgaccacttctacctcctcctgctggccattccctgctaccagctgcgaatcgagtgcatgctgctgtgtgagggcgcggccgccgtgctggacatggtgcggcccaaggcccagctggtgctggctgcctgcgaaagcctgctcaccagccgccagctgcccatcttctgccagctgatcctgagaattgggaacttcctcaactacggcagccacaccggtgacgccgacggcttcaagatcagcacattgctgaagctcacggagaccaagtcccagcagaaccgcgtgacgctgctgcaccacgtgctggaggaagcggaaaagagccaccccgacctcctgcagctgccccgggacctggaacagccctcgcaagcagcagggatcaacctggagatcatccgctcagaggccagctccaacctgaagaagcttctggagaccgagcggaaggtgtctgcctccgtggccgaggtccaggagcagtacaccgagcgcctccaggccagcatctcggccttccgggcactggacgagctgtttgaggccatcgagcagaagcaacgggagctggccgactacctgtgtgaggacgcccagcagctgtccctggaggacacgttcagcaccatgaaggctttccgggaccttttcctccgcgccctgaaggagaacaaggaccggaaggagcaggcggcgaaggcagagaggaggaagcagcagctggcggaggaggaggcgcggcggcctcggggagaggacgggaagcctgtcaggaaggggcccgggaagcaggaggaggtgtgtgtcatcgatgccctgctggctgacatcaggaagggcttccagctgcggaagacagcccggggccgcggggacaccgacgggggcagcaaggcagcctccatggatcccccaagagccacagagcctggccctgccctcagtgctgaagcagcagtccagcccgctgggctccagagagatgaggccaggcccactgaccgatgcccttgggctcagagggtgctagaggtggcaggaaagtggccaccagtaaccctgcaggagaccccgtgggcagcacgcgctgtcccgcctctgagcccggccttgatgctacaacagccagcgagtcccggggctgggaccttgtagacgccgtgacccccggccctcagcccaccctggagcagttggaggagggtggtccccggcccctggagaggcgttcttcctggtatgtggatgccagcgatgtcctaaccactgaggatccccagtgcccccagcccttggagggggcctggccggtgactctgggagatgctcaggccctgaagcccctcaagttctccagcaaccagccccctgcagccggaagttcaaggcaagatgccaaggatcccacgtccttgctgggcgtcctccaggccgaggccgacagcacaagtgaggggctggaggacgctgtccacagccgtggtgccagaccccctgcagcaggcccaggtggggatgaggacgaggacgaggaggacacggccccagagtccgcactggacacatccctggacaagtccttctccgaggatgcggtgaccgactcctcggggtcgggcacactccccagggcccggggccgggcctcaaaggggaccgggaagcgaaggaagaagcgtccctccaggagccaggaagaggttccccctgattctgatgataataaaacaaagaaactgtgtgtgatccagtaaggcctcaggcccaggcccaaggccaagtgagagagcccaggccacaggacatgctgccattctgccaagagaggctcttctgggggccaggctgggactgggccccggaaaccaaaactccgtgccttacccagccggggccctcctggagccttcttggggtgttgtggctgggaacccgacaggcaccagtgccctgccaggcctggtgccctcctggaccgcctgcacgtgccagcctcccacctgcttcctaaaggcaaccctggcccacacccgcatgcgcccggtgcagcctgccaagggccagtcggggggtgctgcgtcctgccagtgtccaccacagctctgcctgcccttcagcccagcaaggtttaatcaaaatgcaatgctttgcaagtctttactgcttggaggtggctgagttgggggccctgggcaggggtaagctggcaggcagtgccatggcaggccagggtcccctcccatggggtctggcccccgttccagcatgtccagcccctgaagttggagtggggggcggtctgcctttgctgccactgccaggcctctgccctgcagctgaaacttggccatcacatcaacagaaaacccctcccagtgccagctgcccagcgtgggcaggccctggggacaatacaggtccacctgaggggctgcagggtgacacccagcagccgctgccccctcactgcccacccagcgagggcagcctacccgagcctgccccctgccaggtgtgtgccctgaggctggcggctggatgcgtggccaataaaaagcagacctag

SEQ ID NO: 308868 - DNA, 2253 bp, Homo sapiens
ggctaggtaacgaggcctggttttgaattggtatagaggctaagtccagacgagaatcctgctgtagcgctgcgtgcaccacgtgtatgtgaggaaggcggaatagagtagccaccccgtatcctccatgcaggctgccccgggtacctggagcagccctcgcaaggcacgtcagggattgatcaacctggagatcatccgctcagaggccagctccaacctgaagaagcttctggagaccgagcggaaggtgtctgcctccgtggccgaggtccaggagcagtacaccgagcgcctccaggccagcatctcggccttccgggcactggacgagctgtttgaggccatcgagcagaagcaacgggagctggccgactacctgtgtgaggacgcccagcagctgtccctggaggacacgttcagcaccatgaaggctttccgggaccttttcctccgcgccctgaaggagaacaaggaccggaaggagcaggcggcgaaggcagagaggaggaagcagcagctggcggaggaggaggcgcggcggcctcggggagaggacgggaagcctgtcaggaaggggcccgggaagcaggaggaggtgtgtgtcatcgatgccctgctggctgacatcaggaagggcttccagctgcggaagacagcccggggccgcggggacaccgacgggggcagcaaggcagcctccatggatcccccaagagccacagagcctgtggccaccagtaaccctgcaggagaccccgtgggcagcacgcgctgtcccgcctctgagcccggccttgatgctacaacagccagcgagtcccggggctgggaccttgtagacgccgtgacccccggccctcagcccaccctggagcagttggaggagggtggtccccggcccctggagaggcgttcttcctggtatgtggatgccagcgatgtcctaaccactgaggatccccagtgcccccagcccttggagggggcctggccggtgactctgggagatgctcaggccctgaagcccctcaagttctccagcaaccagccccctgcagccggaagttcaaggcaagatgccaaggatcccacgtccttgctgggcgtcctccaggccgaggccgacagcacaagtgaggggctggaggacgctgtccacagccgtggtgccagaccccctgcagcaggcccaggtggggatgaggacgaggacgaggaggacacggccccagagtccgcactggacacatccctggacaagtccttctccgaggatgcggtgaccgactcctcggggtcgggcacactccccagggcccggggccgggcctcaaaggggaccgggaagcgaaggaagaagcgtccctccaggagccaggaagaggttccccctgattctgatgataataaaacaaagaaactgtgtgtgatccagtaaggcctcaggcccaggcccaaggccaagtgagagagcccaggccacaggacatgctgccattctgccaagagaggctcttctgggggccaggctgggactgggccccggaaaccaaaactccgtgccttacccagccggggccctcctggagccttcttggggtgttgtggctgggaacccgacaggcaccagtgccctgccaggcctggtgccctcctggaccgcctgcacgtgccagcctcccacctgcttcctaaaggcaaccctggcccacacccgcatgcgcccggtgcagcctgccaagggccagtcggggggtgctgcgtcctgccagtgtccaccacagctctgcctgcccttcagcccagcaaggtttaatcaaaatgcaatgctttgcaagtctttactgcttggaggtggctgagttgggggccctgggcaggggtaagctggcaggcagtgccatggcaggccagggtcccctcccatggggtctggcccccgttccagcatgtccagcccctgaagttggagtggggggcggtctgcctttgctgccactgccaggcctctgccctgcagctgaaacttggccatcacatcaacagaaaacccctcccagtgccagctgcccagcgtgggcaggccctggggacaatacaggtccacctgaggggctgcagggtgacacccagcagccgctgccccctcactgcccacccagcgagggcagcctacccgagcctgccccctgccaggtgtgtgccctgaggctggcggctggatgcgtggccaataaaaagcagacctag

SEQ ID NO: 308869 - DNA, 837 bp, Homo sapiens
  misc_feature (1)..(1): n is a, c, g, or t
naagaaactgtgtgtgatccagtaaggcctcaggcccaggcccaaggccaagtgagagagcccaggccacaggacatgctgccattctgccaagagaggctcttctgggggccaggctgggactgggccccggaaaccaaaactccgtgccttacccagccggggccctcctggagccttcttggggtgttgtggctgggaacccgacaggcaccagtgccctgccaggcctggtgccctcctggaccgcctgcacgtgccagcctcccacctgcttcctaaaggcaaccctggcccacacccgcatgcgcccggtgcagcctgccaagggccagtcggggggtgctgcgtcctgccagtgtccaccacagctctgcctgcccttcagcccagcaaggtttaatcaaaatgcaatgctttgcaagtctttactgcttggaggtggctgagttgggggccctgggcaggggtaagctggcaggcagtgccatggcaggccagggtcccctcccatggggtctggcccccgttccagcatgtccagcccctgaagttggagtggggggcggtctgcctttgctgccactgccaggcctctgccctgcagctgaaacttggccatcacatcaacagaaaacccctcccagtgccagctgcccagcgtgggcaggccctggggacaatacaggtccacctgaggggctgcagggtgacacccagcagccgctgccccctcactgcccacccagcgagggcagcctacccgagcctgccccctgccaggtgtgtgccctgaggctggcggctggatgcgtggccaataaaaagcagacctag

SEQ ID NO: 308870 - DNA, 2135 bp, Homo sapiens
aggaggtaggaggaggcatgttgtgcggtgtcgtgggagtggggtgtcagtgttgttgagatgtgtggagagttgggggggttacatgggccaggcttgcagcggcctgttgagcccttggtataggagtctgggtggcctcgctcgcagcccgccagccttccagctagctgccctgcacctgcagcccccccgtggcgggaggcatggaggaggtcatcgtggcccaggtggaccatggcttgggctcagcatgggtccccagccatcggcgggtgaacccacccacactgcgcatgaagaagctgaactggcagaagctgccatccaacgtggcacgtgagcacaactctatgtgggcgtccctgagcagccccgacgccgaggctgtggagcccgacttctccagcatcgagcgactattctccttccctgcagccaagcccaaggagcccaccatggtggccccccgggccaggaaggagcccaaggagatcactttcctcgatgccaagaagagcctgaacctcaacatcttcctgaagcaatttaagtgctccaacgaggaggtcgctgctatgatccgggctggagataccaccaagtttgatgtggaggttctcaaacaactccttaagctccttcccgagaagcacgagattgaaaacctgcgggcattcacagaggagcgagccaagctggccagcgccgaccacttctacctcctcctgctggccattccctgctaccagctgcgaatcgagtgcatgctgctgtgtgagggcgcggccgccgtgctggacatggtgcggcccaaggcccagctggtgctggctgcctgcgaaagcctgctcaccagccgccagctgcccatcttctgccagctgatcctgagaattgggaacttcctcaactacggcagccacaccggtgacgccgacggcttcaagatcagcacattgctgaagctcacggagaccaagtcccagcagaaccgcgtgacgctgctgcaccacgtgctggaggaagcggaaaagagccaccccgacctcctgcagctgccccgggacctggaacagccctcgcaagcagcagggatcaacctggagatcatccgctcagaggccagctccaacctgaagaagcttctggagaccgagcggaaggtgtctgcctccgtggccgaggtccaggagcagtacaccgagcgcctccaggccagcatctcggccttccgggcactggacgagctgtttgaggccatcgagcagaagcaacgggagctggccgactacctgtgtgaggacgcccagcagctgtccctggaggacacgttcagcaccatgaaggctttccgggaccttttcctccgcgccctgaaggagaacaaggaccggaaggagcaggcggcgaaggcagagaggaggaagcagcagctggcggaggaggaggcgcggcggcctcggggagaggacgggaagcctgtcaggaaggggcccgggaagcaggaggaggtgtgtgtcatcgatgccctgctggctgacatcaggaagggcttccagctgcggaagacagcccggggccgcggggacaccgacgggggcagcaaggcagcctccatggatcccccaagagccacagagcctgtggccaccagtaaccctgcaggagaccccgtgggcagcacgcgctgtcccgcctctgagcccggccttgatgctacaacagccagcgagtcccggggctgggaccttgtagacgccgtgacccccggccctcagcccaccctggagcagttggaggagggtggtccccggcccctggagaggcgttcttcctggtatgtggatgccagcgatgtcctaaccactgaggatccccagtgcccccagcccttggagggggcctggccggtgactctgggagatgctcaggccctgaagcccctcaagttctccacgtgggcaggccctggggacaatacaggtccacctgaggggctgcagggtgacacccagcagccgctgccccctcactgcccacccagcgagggcagcctacccgagcctgccccctgccaggtgtgtgccctgaggctggcggctggatgcgtggccaataaaaagcagacctag

SEQ ID NO: 308871 - DNA, 4798 bp, Homo sapiens
atggaacactgagacaccgacggaatgctccgaatcgcccccgccgcccaccctgtacgtgcagctccacggagagaccacccggcgcttggaggcggaggagaagccattgcagatccaaaatgactacctcttccaactgggatttggggagctgtggagggtgcaggaggaaggcatggactcggagattggctgcctcatccgcttctatgcaggaaaacctcacagcacgggtagctctgaacggattcagctctcaggaatgtataatgtccgtaaaggcaagatgcagttgccagtgaaccgatggacaagacgccaagtcatcctatgtgggacctgcctgatagtatcatctgtgaaagacagcttgaccggaaagatgcatgttctgccactaattggtggaaaagtagaagaagtgaaaaagcaccaacactgtttagcatttagctcctctggaccccaaagccagacttactacatttgctttgatactttcacagaatacttaaggtggctgcgacaagtctccaaggttgcatcccagcgcattagctcagtggacctctcgtgttgtagcctggaacatctgcctgccaacctcttctacagccaagacctcactcatctcaatttaaaacaaaacttcctaaggcagaaccctagccttccagctgccagggggcttaatgaactgcaaaggttcaccaagttgaagagtcttaacctttccaataatcatttaggggacttccctctggcagtctgcagtattccaaccctggcagagctgaacgtgtcctgcaatgccctgcgatcagtcccggcagccgttggagtgatgcacaacttacagacatttttgttggatggaaactttctccaatcccttcctgctgagttggagaacatgaagcagcttagttatctgggtctttctttcaatgaatttactgacattcccgaagtattggagaaattgactgctgtggataaactttgtatgtctggaaactgtgtggagacccttaggctacaggctttaagaaaaatgcctcacattaaacatgtggatctaaggttgaacgtaattaggaagctgatagcagatgaagtggactttctacagcatgttactcagcttgacctacgagacaataagcttggtgatctagatgctatgattttcaacaacattgaagttttacactgtgaaaggaatcaactggtcacattagacatctgtggctatttcctaaaagcgctctatgcctcttctaatgaacttgttcaacttgatgtttacccagttccaaattatctgtcctacatggatgtttcaaggaaccgcttagaaaatgtgcctgagtgggtatgtgaaagccgaaagctagaagttttggatattggccataatcaaatatgtgaacttcctgcccgcttattttgtaatagcagtctccggaaactactggcaggacacaaccagttggcaaggctgcctgaaaggctagaaagaacctcggtggaggtcttggatgtgcaacacaaccagctccttgagctcccacctaaccttctgatgaaggctgacagcctgagattcctgaacgcctctgcgaacaaactggaaagccttcctccagccacgctttccgaagagacaaacagtatcttacaagagttgtatttgacaaataacagcctcacagacaaatgtgtgcccttgttaacgggacacccccatttgaagatccttcacatggcctataaccgacttcagagttttccagcaagtaaaatggcgaaactggaggaacttgaagaaattgatctcagtgggaataagctgaaagccatcccaacaacgatcatgaattgcaggcgcatgcacaccgtgattgctcactccaactgcatcgaggtctttcccgaagttatgcagctcccagagatcaagtgtgtggacctgagctgtaatgagctaagtgaagtcacattaccagaaaacctgcctcccaaactgcaggagctagacctgactggaaacccgcgccttgtccttgatcacaaaaccctggaactactgaataatatccgctgtttcaagattgatcagccttctacaggagacgcttccggagccccagctgtatggagtcatggttacactgaagcttcgggggtaaaaaacaagttgtgtgtcgcagccctgtcggtgaataacttctgtgacaaccgcgaagccctgtatggtgtgtttgacggagaccggaatgtggaggtgccctaccttctccagtgcactatgagtgacattttggctgaagagctgcaaaaaacaaaaaacgaagaagaatacatggtcaatacattcattgtcatgcaaaggaaacttggaactgctgggcagaagcttggtggtgccgctgtcctttgtcatatcaagcatgaccctgtggatccaggaggatccttcaccttgacctctgctaatgtgggcaagtgccaaacagttctctgtcgaaatggaaagccgctgcctctgtccagatcttacatcatgagctgtgaagaagagctgaagaggattaaacagcacaaggccattatcactgaggatggcaaggtgaacggagtgactgagtccacgcgcatcctgggctacaccttcctccatcccagtgtggtgcctcgcccccacgtgcagtccgtgctcctgactccccaggatgagttcttcatcctaggcagtaaggggttgtgggacagcctgtccgtcgaggaggccgtggaagccgtgcgcaacgtgcccgatgccctggctgctgccaagaagctgtgtaccctggcccagagctacggctgccacgacagcatcagcgctgtggtggtgcagctcagtgtcactgaggacagcttctgctgctgcgagctcagcgccggtggggctgtgccaccacccagtcctggcatctttcctccctcagtgaacatggtgatcaaggatcggccctcagatgggctgggcgtgccgtcctccagcagcggcatggcttccgagattagcagtgagctctccacttctgagatgagcagcgaggtggggtcaacagcctccgatgagcccccgcccggagccctaagcgagaacagccctgcctaccccagtgagcagcgctgcatgctccaccccatctgtctgtccaactccttccagcgccagctatccagcgccacgttctctagcgccttctccgacaacggccttgacagtgacgatgaggagcccatcgagggcgtcttcaccaacggcagccgggtggaggtggaggtggacatccactgcagccgggccaaggagaaggagaaacagcagcacctgcttcaggtgccagcagaggccagtgatgagggcattgtcatcagcgccaacgaggatgagccaggtctgcccaggaaggcagacttctctgccgttgggaccattgggcgccggagggccaatggctctgttgcgccccaggaaaggagccacaatgtgatagaggtggctacagacgcacctcttcgaaagcctggaggctattttgctgccccggctcagccggatcctgatgatcagtttatcatacccccggagctggaagaggaggtcaaagaaatcatgaagcatcaccaggagcaacagcagcagcagcagccgccaccaccccctcagctccagccgcagctgccgcggcactaccagctggaccagctgccagattattacgacacgccactatgacccagccgagctgtttaacaaataaactaaccacaaaagactgagttgcaagagtctcccaggctcacattaaaccaggggttttactccacatccttcccccagacactgttcccaacctgtcatcgcagctaatctgtaggttctctttctttgggttatttttttaagtaatcaccactttcttctagtgatgctttaccaatatgatttacatttgttaacttctccccctaacatatcagatatgtaaagacaaagaacaaaaggtttaatatattacagagaaacagttaatgataatgtaatattttttaaaatggctttttgttgtttgtttggaaggcagggcaggctgccgttgctaaatgatttaataatattgtaattctgtatttctttggggggaaaaggcttttgttttgttttgttttgttttgttttgtttttgtcttgaaaataatagacatttgtagaatatggagactaactcctaggagttgctttactctgtcaggtgacttaagtcactgggattcactaattttctctgagagaacagctgattgagaatttccattgtaaatagctcagtgttgtatagtgaggcttacgatgttttgtagtcttggcgtaaggacacagcccaagtaactgacgtttcccctccccctcccctctgaggagcctgcctgcctcacaactcaccctcacttcactgaatgaggaggctgagcagctgcagtgtttctgtccggaggaaatggatcttaggccactggacaagaacctgcacccaagggccctgaacccattttcctcccctgtcccagccttcccactttgacagacacttttaactgtgttccttactgctgccacaatcagcatggttgtatagtgccccattaggccatttacatacccagagttatactcaagcagaatgcacaaatggacatgtcataatttttgttacaataaatatgaaatttacaagta

SEQ ID NO: 308872 - DNA, 4677 bp, Homo sapiens
cagaaatactaacatagctaaataaccctgcctgcctttgaagagcttatgattttgtatcagaagatgaagtaggcacaatgatatctgttgtaagaaagatgcaggaaggtactgtgggggattaatggaaggagagattacattttttcgggtagaagaagtgaaaaagcaccaacactgtttagcatttagctcctctggaccccaaagccagacttactacatttgctttgatactttcacagaatacttaaggtggctgcgacaagtctccaagcatctagggagagtagactagaatctcgctccatttgggaatatatgcctacagggaatttgacatggataaggatgattgttacaagctccttcagcttccagtttcccccttcaattgtcatctgctcttcttcctatgttgcatcccagcgcattagctcagtggacctctcgtgttgtagcctggaacatctgcctgccaacctcttctacagccaagacctcactcatctcaatttaaaacaaaacttcctaaggcagaaccctagccttccagctgccagggggcttaatgaactgcaaaggttcaccaagttgaagagtcttaacctttccaataatcatttaggggacttccctctggcagtctgcagtattccaaccctggcagagctgaacgtgtcctgcaatgccctgcgatcagtcccggcagccgttggagtgatgcacaacttacagacatttttgttggatggaaactttctccaatcccttcctgctgagttggagaacatgaagcagcttagttatctgggtctttctttcaatgaatttactgacattcccgaagtattggagaaattgactgctgtggataaactttgtatgtctggaaactgtgtggagacccttaggctacaggctttaagaaaaatgcctcacattaaacatgtggatctaaggttgaacgtaattaggaagctgatagcagatgaagtggactttctacagcatgttactcagcttgacctacgagacaataagcttggtgatctagatgctatgattttcaacaacattgaagttttacactgtgaaaggaatcaactggtcacattagacatctgtggctatttcctaaaagcgctctatgcctcttctaatgaacttgttcaacttgatgtttacccagttccaaattatctgtcctacatggatgtttcaaggaaccgcttagaaaatgtgcctgagtgggtatgtgaaagccgaaagctagaagttttggatattggccataatcaaatatgtgaacttcctgcccgcttattttgtaatagcagtctccggaaactactggcaggacacaaccagttggcaaggctgcctgaaaggctagaaagaacctcggtggaggtcttggatgtgcaacacaaccagctccttgagctcccacctaaccttctgatgaaggctgacagcctgagattcctgaacgcctctgcgaacaaactggaaagccttcctccagccacgctttccgaagagacaaacagtatcttacaagagttgtatttgacaaataacagcctcacagacaaatgtgtgcccttgttaacgggacacccccatttgaagatccttcacatggcctataaccgacttcagagttttccagcaagtaaaatggcgaaactggaggaacttgaagaaattgatctcagtgggaataagctgaaagccatcccaacaacgatcatgaattgcaggcgcatgcacaccgtgattgctcactccaactgcatcgaggtctttcccgaagttatgcagctcccagagatcaagtgtgtggacctgagctgtaatgagctaagtgaagtcacattaccagaaaacctgcctcccaaactgcaggagctagacctgactggaaacccgcgccttgtccttgatcacaaaaccctggaactactgaataatatccgctgtttcaagattgatcagccttctacaggagacgcttccggagccccagctgtatggagtcatggttacactgaagcttcgggggtaaaaaacaagttgtgtgtcgcagccctgtcggtgaataacttctgtgacaaccgcgaagccctgtatggtgtgtttgacggagaccggaatgtggaggtgccctaccttctccagtgcactatgagtgacattttggctgaagagctgcaaaaaacaaaaaacgaagaagaatacatggtcaatacattcattgtcatgcaaaggaaacttggaactgctgggcagaagcttggtggtgccgctgtcctttgtcatatcaagcatgaccctgtggatccaggaggatccttcaccttgacctctgctaatgtgggcaagtgccaaacagttctctgtcgaaatggaaagccgctgcctctgtccagatcttacatcatgagctgtgaagaagagctgaagaggattaaacagcacaaggccattatcactgaggatggcaaggtgaacggagtgactgagtccacgcgcatcctgggctacaccttcctccatcccagtgtggtgcctcgcccccacgtgcagtccgtgctcctgactccccaggatgagttcttcatcctaggcagtaaggggttgtgggacagcctgtccgtcgaggaggccgtggaagccgtgcgcaacgtgcccgatgccctggctgctgccaagaagctgtgtaccctggcccagagctacggctgccacgacagcatcagcgctgtggtggtgcagctcagtgtcactgaggacagcttctgctgctgcgagctcagcgccggtggggctgtgccaccacccagtcctggcatctttcctccctcagtgaacatggtgatcaaggatcggccctcagatgggctgggcgtgccgtcctccagcagcggcatggcttccgagattagcagtgagctctccacttctgagatgagcagcgaggtggggtcaacagcctccgatgagcccccgcccggagccctaagcgagaacagccctgcctaccccagtgagcagcgctgcatgctccaccccatctgtctgtccaactccttccagcgccagctatccagcgccacgttctctagcgccttctccgacaacggccttgacagtgacgatgaggagcccatcgagggcgtcttcaccaacggcagccgggtggaggtggaggtggacatccactgcagccgggccaaggagaaggagaaacagcagcacctgcttcaggtgccagcagaggccagtgatgagggcattgtcatcagcgccaacgaggatgagccaggtctgcccaggaaggcagacttctctgccgttgggaccattgggcgccggagggccaatggctctgttgcgccccaggaaaggagccacaatgtgatagaggtggctacagacgcacctcttcgaaagcctggaggctattttgctgccccggctcagccggatcctgatgatcagtttatcatacccccggagctggaagaggaggtcaaagaaatcatgaagcatcaccaggagcaacagcagcagcagcagccgccaccaccccctcagctccagccgcagctgccgcggcactaccagctggaccagctgccagattattacgacacgccactatgacccagccgagctgtttaacaaataaactaaccacaaaagactgagttgcaagagtctcccaggctcacattaaaccaggggttttactccacatccttcccccagacactgttcccaacctgtcatcgcagctaatctgtaggttctctttctttgggttatttttttaagtaatcaccactttcttctagtgatgctttaccaatatgatttacatttgttaacttctccccctaacatatcagatatgtaaagacaaagaacaaaaggtttaatatattacagagaaacagttaatgataatgtaatattttttaaaatggctttttgttgtttgtttggaaggcagggcaggctgccgttgctaaatgatttaataatattgtaattctgtatttctttggggggaaaaggcttttgttttgttttgttttgttttgttttgtttttgtcttgaaaataatagacatttgtagaatatggagactaactcctaggagttgctttactctgtcaggtgacttaagtcactgggattcactaattttctctgagagaacagctgattgagaatttccattgtaaatagctcagtgttgtatagtgaggcttacgatgttttgtagtcttggcgtaaggacacagcccaagtaactgacgtttcccctccccctcccctctgaggagcctgcctgcctcacaactcaccctcacttcactgaatgaggaggctgagcagctgcagtgtttctgtccggaggaaatggatcttaggccactggacaagaacctgcacccaagggccctgaacccattttcctcccctgtcccagccttcccactttgacagacacttttaactgtgttccttactgctgccacaatcagcatggttgtatagtgccccattaggccatttacatacccagagttatactcaagcagaatgcacaaatggacatgtcataatttttgttacaataaatatgaaatttacaagta

SEQ ID NO: 308873 - DNA, 5261 bp, Homo sapiens
  misc_feature (4807)..(4807): n is a, c, g, or t
  misc_feature (5174)..(5174): n is a, c, g, or t
  misc_feature (5214)..(5214): n is a, c, g, or t
  misc_feature (5220)..(5220): n is a, c, g, or t
  misc_feature (5261)..(5261): n is a, c, g, or t
atggaacactgagacaccgacggaatgctccgaatcgcccccgccgcccaccctgtacgtgcagctccacggagagaccacccggcgcttggaggcggaggagaagccattgcagatccaaaatgactacctcttccaactgggatttggggagctgtggagggtgcaggaggaaggcatggactcggagattggctgcctcatccgcttctatgcaggaaaacctcacagcacgggtagctctgaacggattcagctctcaggaatgtataatgtccgtaaaggcaagatgcagttgccagtgaaccgatggacaagacgccaagtcatcctatgtgggacctgcctgatagtatcatctgtgaaagacagcttgaccggaaagatgcatgttctgccactaattggtggaaaagtagaagaagtgaaaaagcaccaacactgtttagcatttagctcctctggaccccaaagccagacttactacatttgctttgatactttcacagaatacttaaggtggctgcgacaagtctccaaggttgcatcccagcgcattagctcagtggacctctcgtgttgtagcctggaacatctgcctgccaacctcttctacagccaagacctcactcatctcaatttaaaacaaaacttcctaaggcagaaccctagccttccagctgccagggggcttaatgaactgcaaaggttcaccaagttgaagagtcttaacctttccaataatcatttaggggacttccctctggcagtctgcagtattccaaccctggcagagctgaacgtgtcctgcaatgccctgcgatcagtcccggcagccgttggagtgatgcacaacttacagacatttttgttggatggaaactttctccaatcccttcctgctgagttggagaacatgaagcagcttagttatctgggtctttctttcaatgaatttactgacattcccgaagtattggagaaattgactgctgtggataaactttgtatgtctggaaactgtgtggagacccttaggctacaggctttaagaaaaatgcctcacattaaacatgtggatctaaggttgaacgtaattaggaagctgatagcagatgaagtggactttctacagcatgttactcagcttgacctacgagacaataagcttggtgatctagatgctatgattttcaacaacattgaagttttacactgtgaaaggaatcaactggtcacattagacatctgtggctatttcctaaaagcgctctatgcctcttctaatgaacttgttcaacttgatgtttacccagttccaaattatctgtcctacatggatgtttcaaggaaccgcttagaaaatgtgcctgagtgggtatgtgaaagccgaaagctagaagttttggatattggccataatcaaatatgtgaacttcctgcccgcttattttgtaatagcagtctccggaaactactggcaggacacaaccagttggcaaggctgcctgaaaggctagaaagaacctcggtggaggtcttggatgtgcaacacaaccagctccttgagctcccacctaaccttctgatgaaggctgacagcctgagattcctgaacgcctctgcgaacaaactggaaagccttcctccagccacgctttccgaagagacaaacagtatcttacaagagttgtatttgacaaataacagcctcacagacaaatgtgtgcccttgttaacgggacacccccatttgaagatccttcacatggcctataaccgacttcagagttttccagcaagtaaaatggcgaaactggaggaacttgaagaaattgatctcagtgggaataagctgaaagccatcccaacaacgatcatgaattgcaggcgcatgcacaccgtgattgctcactccaactgcatcgaggtctttcccgaagttatgcagctcccagagatcaagtgtgtggacctgagctgtaatgagctaagtgaagtcacattaccagaaaacctgcctcccaaactgcaggagctagacctgactggaaacccgcgccttgtccttgatcacaaaaccctggaactactgaataatatccgctgtttcaagattgatcagccttctacaggagacgcttccggagccccagctgtatggagtcatggttacactgaagcttcgggggtaaaaaacaagttgtgtgtcgcagccctgtcggtgaataacttctgtgacaaccgcgaagccctgtatggtgtgtttgacggagaccggaatgtggaggtgccctaccttctccagtgcactatgagtgacattttggctgaagagctgcaaaaaacaaaaaacgaagaagaatacatggtcaatacattcattgtcatgcaaaggaaacttggaactgctgggcagaagcttggtggtgccgctgtcctttgtcatatcaagcatgaccctgtggatccaggaggatccttcaccttgacctctgctaatgtgggcaagtgccaaacagttctctgtcgaaatggaaagccgctgcctctgtccagatcttacatcatgagctgtgaagaagagctgaagaggattaaacagcacaaggccattatcactgaggatggcaaggtgaacggagtgactgagtccacgcgcatcctgggctacaccttcctccatcccagtgtggtgcctcgcccccacgtgcagtccgtgctcctgactccccaggatgagttcttcatcctaggcagtaaggggttgtgggacagcctgtccgtcgaggaggccgtggaagccgtgcgcaacgtgcccgatgccctggctgctgccaagaagctgtgtaccctggcccagagctacggctgccacgacagcatcagcgctgtggtggtgcagctcagtgtcactgaggacagcttctgctgctgcgagctcagcgccggtggggctgtgccaccacccagtcctggcatctttcctccctcagtgaacatggtgatcaaggatcggccctcagatgggctgggcgtgccgtcctccagcagcggcatggcttccgagattagcagtgagctctccacttctgagatgagcagcgaggtggggtcaacagcctccgatgagcccccgcccggagccctaagcgagaacagccctgcctaccccagtgagcagcgctgcatgctccaccccatctgtctgtccaactccttccagcgccagctatccagcgccacgttctctagcgccttctccgacaacggccttgacagtgacgatgaggagcccatcgagggcgtcttcaccaacggcagccgggtggaggtggaggtggacatccactgcagccgggccaaggagaaggagaaacagcagcacctgcttcaggtgccagcagaggccagtgatgagggcattgtcatcagcgccaacgaggatgagccaggtctgcccaggaaggcagacttctctgccgttgggaccattgggcgccggagggccaatggctctgttgcgccccaggaaaggagccacaatgtgatagaggtggctacagacgcacctcttcgaaagcctggaggctattttgctgccccggctcagccggatcctgatgatcagtttatcatacccccggagctggaagaggaggtcaaagaaatcatgaagcatcaccaggagcaacagcagcagcagcagccgccaccaccccctcagctccagccgcagctgccgcggcactaccagctggaccagctgccagattattacgacacgccactatgacccagccgagctgtttaacaaataaactaaccacaaaagactgagttgcaagagtctcccaggctcacattaaaccaggggttttactccacatccttcccccagacactgttcccaacctgtcatcgcagctaatctgtaggttctctttctttgggttatttttttaagtaatcaccactttcttctagtgatgctttaccaatatgatttacatttgttaacttctccccctaacatatcagatatgtaaagacaaagaacaaaaggtttaatatattacagagaaacagttaatgataatgtaatattttttaaaatggctttttgttgtttgtttggaaggcagggcaggctgccgttgctaaatgatttaataatattgtaattctgtatttctttggggggaaaaggcttttgttttgttttgttttgttttgttttgtttttgtcttgaaaataatagacatttgtagaatatggagactaactcctaggagttgctttactctgtcaggtgacttaagtcactgggattcactaattttctctgagagaacagctgattgagaatttccattgtaaatagctcagtgttgtatagtgaggcttacgatgttttgtagtcttggcgtaaggacacagcccaagtaactgacgtttcccctccccctcccctctgaggagcctgcctgcctcacaactcaccctcacttcactgaatgaggaggctgagcagctgcagtgtttctgtccggaggaaatggatcttaggccactggacaagaacctgcacccaagggccctgaacccattttcctcccctgtcccagccttcccactttgacagacacttttaactgtgttccttactgctgccacaatcagcatggttgtatagtgccccattaggccatttacatacccagagttatactcaagcagaatgcacaaatggacatgtcataatttttgttacaataaatatgaaatttacaagtaaaaaaaaanaaaaaaaaaacaaaaaaaaaaatttgtgtggggccgccccggcgccccagaaaaaaagttttttaaaccccattcgtgttggggccgccgcgggccccccgatgttggttttagtggaacccgtgggccccaagggcggttccccagaggagaacaccgcggcgttgcaggaacgagagggctgtggcgtttctctccccaatataaaaaaagaagcaccgcgcgggcgaacgacacgcgaacggcggtttttgtggaacaaacatctccgcagagtgggaggagttcgcgagcgggatccaccaaccggggtagtctcctcacacaaccagagaggacggtctcgccgagcggacgaccggccgantatatcaccagaatttcaggccgcggccccggcgcggggnaggagncacacacaacaacgagccacaacgatccaacagcactacgn

SEQ ID NO: 308874 - DNA, 2874 bp, Homo sapiens
tacccgaatttatatgctcactgctcaacagcatcatgattttcttgacatcagcattaattgagctaaataaagtcgctttacctcaacaacagtctccctgactgcatgagctctacctaactgcaatcctgcgcctatcttcttgattggaaaacccttgcggtactgaataatatccgctgtttcaagattgatcagccttctacaggagacgcttccggagccccagctgtatggagtcatggttacactgaagcttcgggggtaaaaaacaagttgtgtgtcgcagccctgtcggtgaataacttctgtgacaaccgcgaagccctgtatggtgtgtttgacggagaccggaatgtggaggtgccctaccttctccagtgcactatgagtgacattttggctgaagagctgcaaaaaacaaaaaacgaagaagaatacatggtcaatacattcattgtcatgcaaaggaaacttggaactgctgggcagaagcttggtggtgccgctgtcctttgtcatatcaagcatgaccctgtggatccaggaggatccttcaccttgacctctgctaatgtgggcaagtgccaaacagttctctgtcgaaatggaaagccgctgcctctgtccagatcttacatcatgagctgtgaagaagagctgaagaggattaaacagcacaaggccattatcactgaggatggcaaggtgaacggagtgactgagtccacgcgcatcctgggctacaccttcctccatcccagtgtggtgcctcgcccccacgtgcagtccgtgctcctgactccccaggatgagttcttcatcctaggcagtaaggggttgtgggacagcctgtccgtcgaggaggccgtggaagccgtgcgcaacgtgcccgatgccctggctgctgccaagaagctgtgtaccctggcccagagctacggctgccacgacagcatcagcgctgtggtggtgcagctcagtgtcactgaggacagcttctgctgctgcgagctcagcgccggtggggctgtgccaccacccagtcctggcatctttcctccctcagtgaacatggtgatcaaggatcggccctcagatgggctgggcgtgccgtcctccagcagcggcatggcttccgagattagcagtgagctctccacttctgagatgagcagcgaggtggggtcaacagcctccgatgagcccccgcccggagccctaagcgagaacagccctgcctaccccagtgagcagcgctgcatgctccaccccatctgtctgtccaactccttccagcgccagctatccagcgccacgttctctagcgccttctccgacaacggccttgacagtgacgatgaggagcccatcgagggcgtcttcaccaacggcagccgggtggaggtggaggtggacatccactgcagccgggccaaggagaaggagaaacagcagcacctgcttcaggtgccagcagaggccagtgatgagggcattgtcatcagcgccaacgaggatgagccaggtctgcccaggaaggcagacttctctgccgttgggaccattgggcgccggagggccaatggctctgttgcgccccaggaaaggagccacaatgtgatagaggtggctacagacgcacctcttcgaaagcctggaggctattttgctgccccggctcagccggatcctgatgatcagtttatcatacccccggagctggaagaggaggtcaaagaaatcatgaagcatcaccaggagcaacagcagcagcagcagccgccaccaccccctcagctccagccgcagctgccgcggcactaccagctggaccagctgccagattattacgacacgccactatgacccagccgagctgtttaacaaataaactaaccacaaaagactgagttgcaagagtctcccaggctcacattaaaccaggggttttactccacatccttcccccagacactgttcccaacctgtcatcgcagctaatctgtaggttctctttctttgggttatttttttaagtaatcaccactttcttctagtgatgctttaccaatatgatttacatttgttaacttctccccctaacatatcagatatgtaaagacaaagaacaaaaggtttaatatattacagagaaacagttaatgataatgtaatattttttaaaatggctttttgttgtttgtttggaaggcagggcaggctgccgttgctaaatgatttaataatattgtaattctgtatttctttggggggaaaaggcttttgttttgttttgttttgttttgttttgtttttgtcttgaaaataatagacatttgtagaatatggagactaactcctaggagttgctttactctgtcaggtgacttaagtcactgggattcactaattttctctgagagaacagctgattgagaatttccattgtaaatagctcagtgttgtatagtgaggcttacgatgttttgtagtcttggcgtaaggacacagcccaagtaactgacgtttcccctccccctcccctctgaggagcctgcctgcctcacaactcaccctcacttcactgaatgaggaggctgagcagctgcagtgtttctgtccggaggaaatggatcttaggccactggacaagaacctgcacccaagggccctgaacccattttcctcccctgtcccagccttcccactttgacagacacttttaactgtgttccttactgctgccacaatcagcatggttgtatagtgccccattaggccatttacatacccagagttatactcaagcagaatgcacaaatggacatgtcataatttttgttacaataaatatgaaatttacaagta

SEQ ID NO: 308875 - DNA, 2339 bp, Homo sapiens
atggaacactgagacaccgacggaatgctccgaatcgcccccgccgcccaccctgtacgtgcagctccacggagagaccacccggcgcttggaggcggaggagaagccattgcagatccaaaatgactacctcttccaactgggatttggggagctgtggagggtgcaggaggaaggcatggactcggagattggctgcctcatccgcttctatgcaggaaaacctcacagcacgggtagctctgaacggattcagctctcaggaatgtataatgtccgtaaaggcaagatgcagttgccagtgaaccgatggacaagacgccaagtcatcctatgtgggacctgcctgatagtatcatctgtgaaagacagcttgaccggaaagatgcatgttctgccactaattggtggaaaagtagaagaagtgaaaaagcaccaacactgtttagcatttagctcctctggaccccaaagccagacttactacatttgctttgatactttcacagaatacttaaggtggctgcgacaagtctccaaggttgcatcccagcgcattagctcagtggacctctcgtgttgtagcctggaacatctgcctgccaacctcttctacagccaagacctcactcatctcaatttaaaacaaaacttcctaaggcagaaccctagccttccagctgccagggggcttaatgaactgcaaaggttcaccaagttgaagagtcttaacctttccaataatcatttaggggacttccctctggcagtctgcagtattccaaccctggcagagctgaacgtgtcctgcaatgccctgcgatcagtcccggcagccgttggagtgatgcacaacttacagacatttttgttggatggaaactttctccaatcccttcctgctgagttggagaacatgaagcagcttagttatctgggtctttctttcaatgaatttactgacattcccgaagtattggagaaattgactgctgtggataaactttgtatgtctggaaactgtgtggagacccttaggctacaggctttaagaaaaatgcctcacattaaacatgtggatctaaggttgaacgtaattaggaagctgatagcagatgaagtggactttctacagcatgttactcagcttgacctacgagacaataagcttggtgatctagatgctatgattttcaacaacattgaagttttacactgtgaaaggaatcaactggtcacattagacatctgtggctatttcctaaaagcgctctatgcctcttctaatgaacttgttcaacttgatgtttacccagttccaaattatctgtcctacatggatgtttcaaggaaccgcttagaaaatgtgcctgagtgggtatgtgaaagccgaaagctagaagttttggatattggccataatcaaatatgtgaacttcctgcccgcttattttgtaatagcagtctccggaaactactggcaggacacaaccagttggcaaggctgcctgaaaggctagaaagaacctcggtggaggtcttggatgtgcaacacaaccagctccttgagctcccacctaaccttctgatgaaggctgacagcctgagattcctgaacgcctctgcgaacaaactggaaagccttcctccagccacgctttccgaagagacaaacagtatcttacaagagttgtatttgacaaataacagcctcacagacaaatgtgtgcccttgttaacgggacacccccatttgaagatccttcacatggcctataaccgacttcagagttttccagcaagtaaaatggcgaaactggaggaacttgaagaaattgatctcagtgggaataagctgaaagccatcccaacaacgatcatgaattgcaggcgcatgcacaccgtgattgctcactccaactgcatcgaggtctttcccgaagttatgcagctcccagagatcaagtgtgtggacctgagctgtaatgagctaagtgaagtcacattaccagaaaacctgcctcccaaactgcaggagctagacctgactggaaacccgcgccttgtccttgatcacaaaaccctggaactactgaataatatccgctgtttcaagattgatcagccttctacaggagacgcttccggagccccagctgtatggagtcatggttacactgaagcttcgggggtaaaaaacaaaaagatcgaggggccccatcccctttcggaagaaaaaacatatggtgacaaaccccggaaagcccctgaacgggggggtttgacgggagacacggaaaggggggggggggccctaaccttttctccagtgggcccta

SEQ ID NO: 308876 - DNA, 106 bp, Homo sapiens
atgcaggaaggtactgtgggggattaatggaaggagagattacattttttcgggtaagagggaattttgtaatgaaaggtagcaattatgatagaatttgaaggat

SEQ ID NO: 308877 - DNA, 1100 bp, Homo sapiens
aaatggatgcagtaaggtcactgaagtcaaaaagttaacataaagtttggcaggtagccactagaccagtttgtttggcatagtatttggggtgacaaagttggtgcaatgtatcataaagtggggaaggacccttggggcactaggatttgtttcttactttctttttttttttttttgagacggagtctctgttgcccaggctggagcgcaatggcgcaatcttggctcactgcaacctctgcctcctgggttcacccatttcacctgcctcagcctcccaagtagctgggattataggcacccgccaccatgcctggctaatatttttagtagagacggagtttcaccatgttggtcaggctcgtcttgaactcatgactttaagcaatccacctgcctcggcctcccaaagtgctgggattacaggcgtgagccactatgcccagctagatctcattttaaaatatgaaagacctttagatgttcatttatatttgtttctgttctaggctctgtacaaaatgagctaagtagctaaggtatgtgcattccaggtcatctgtcttagataatcatacagaaaggaaatcatagactttacagtatatattaaataactaccagttgacttgctaatgaaagggaaagtttgtatgaatttaaaactctagaccagcactgtttaacagaactctctgtaataataggaatgttctatacctgggatgtccagtgtggtaactgccgccacgtgtatctgttgaatgcttgaaatgtggctaacgtcactacggaactgaattttttatttttttatttttttgagacggagtcttgctctgtcacccaggctggagtgcagtggtgcaatcttggctcatggtaacctccgcctcccggattcaagcaattctcctgctgcagtctcccaagtagctgggactataggtgcacgctgccacacccagctaattttttgtgtttagtagagacgaggtttcaccatgttgcccaggctggttgcaaactcctgagctcaggcaatccgcatgcctctgcctcccagagtgctgggattaccggcatgagccaccatg

SEQ ID NO: 308878 - DNA, 484 bp, Homo sapiens
aaatagatgtttatcattttttatatagactcattgaaaaaatgactttgtgttcttccagtacataccatcatgtctgagagggcagagatctagacaagtgtgggaaagatgactttggatcaaaattttcttgtgaatataatgtgcttatgcgtaatttaaagctgactgtattaaagatacattttttgtcaaccagatgattgttaaatacctgtgaagtatgtgtggcccggtcctatttcctcacctgtttacagtgaatcagacgtcccaatagatgtggagacggtcacatcaacgcctatgccactctatgacaatcagaaggcacgcagcgtgatgaatgagtgtgaacggcatgtcatctttgccaggactgatgcagatgcccctcctccaccagaggactgggaggagcatgtcaacagatctgtgccactgcactccagcccgggcaacagagcaagactccgtctca

SEQ ID NO: 308879 - DNA, 5510 bp, Homo sapiens
cgtggaggcgttaacgcgcacgcgcttagggatccggccgtggccgagcgcgcggccgtaagaccgcgggtgactagcatgcagatacccatgctctgactttctgcccctccactgacatggcccaccggggtggggagagggacttccagacttcagctcgacgcatgggcacctcgctgctcttccagctttcagtgcatgaacgggagctggacctggtttttctggatcatagctatgccaagccttggagtgcccacccagatgccagtagtgcccgccccacccgcatgctctttgtcactccccggcggcagcacgaaagtaccatatgattgttaaatacctgtgaagtatgtgtggcccggtcctatttcctcacctgtttacagtgaatcagacgtcccaatagatgtggagacggtcacatcaacgcctatgccactctatgacaatcagaaggcacgcagcgtgatgaatgagtgtgaacggcatgtcatctttgccaggactgatgcagatgcccctcctccaccagaggactgggaggagcatgtcaacaggactggctggacaatggcccagaacaagctattcaacaagatcctcaaagccctgcagtctgaccggcttgcccgcttggccaacgaaggggcttgtaatgagccagtgctgcgccgtgttgctgtggacaagtgtgcaaggagagtgcggcaggctctggcaagtgtgagctgggataccaagctgatccagtggctgcacaccacccttgtggagaccttgagtctgcccatgctggcagcctacctggatgctttgcagacgctgaaggggaagatcccaaccttgattgaccggatgcttgtgtcatccaacacaaagactggggctgcaggagctgaggccttgtctctcctactgaagaggccctgggaccctgctgtgggtgtgctttctcataacaaaccaagcaaactccctggctctccgctgattctcatcgcctcctctggtccctccagctctgtgtttcccacttcacgccgccaccgcttctggcaatctcagctgtcctgcttgggcaaggtcatccctgtagccacccatctgctgaacaatggcagtggggtaggagttctacagtgtctcgagcatatgattggggcagtgagaagcaaagtgctggagattcacagccatttcccacacaaacccattatcttgattggctggaacacaggagctttggtggcctgtcatgtgtcagtaatggagtatgtcactgcagttgtctgccttgggtttcctctgcttactgtggatggccccagaggggatgtagatgatcccctcttggatatgaagactccagtcctctttgtcattggtcagaattcccttcaatgtcaccctgaagccatggaggacttccgggagaagattcgagctgagaacagcttggtggtggttgggggagctgatgacaatctcagaataagcaaagcaaagaagaaatcagaagggttgactcagagcatggtggacagatgtattcaggatgagattgtggactttctgactggagtgctcactcgtgctgagggtcacatgggctctgaacctcgggatcaggatgctgagaagaagaagaagccccgcgatgtggcccgcagagacttggcctttgaagtccctgagcggggcagtcgacctgcctccccagctgccaagctgcccgcctcaccctcaggctcagaggatctctccagtgtgtccagcagccccacctccagtcccaagaccaaagtgaccacagtgacctctgcccagaagtccagtcagattggaagttctcagctgctgaagagacatgtgcagcggacagaagctgtgctgacccacaaacaagctcaagttcccatttcatcagaaccaccagaggaaggagagaaagaggatcttagggttcagctgaagcgacaccatccctcgagtccccttcctggcagtaagacctccaaacgaccgaagatcaaggtgtcccttatctcccaaggggacacagctggagggccttgtgctccttcccaaggaagtgctccagaagctgcaggtgggaagcccatcaccatgacactggggcaggcttcagcaggggccaaggagctcacaggacttctcaccacagccaagtccagttcttctgaaggtggagtctcagccagcccagtcccttcagtggtctccagcagcactgcacccagtgccttgcacacactgcagagccgcctggtggccacatctcctggcagctccctcccaggggccacatcagccagcagcctcctccaaggcctcagcttcagcttgcaggatatcagcagcaagacctctggccttccagcaaatccctccccaggaccagccccacaggccaccagtgtgaagttgcccacccccatgcagagcctgggtgccatcaccacgggcaccagcaccattgtccgtaccattcctgtggccaccactctctcctccttgggtgccactcctggtgggaagcccacagccatccaccagctgctgaccaatgggggcctcgctaagttggcaagcagcctccctggcctggctcagatctctaaccaagcatcaggcttgaaggtccccaccaccattactctgacacttcgtggccagccgagcaggatcactacactgagccctatgggctcaggagcagccccatccgaggagtcctcttcccaggtgctgccctccagctcacagcgcctgcctccagcaccctgaagatgctgtgtgatatgtcctccttaccaagttggtgatggctgcctcatggtgggccctggacaggtgtgtggtcctgctgagctgtccacgtgtcggaagacctgtttaagacagtcatttttgcctctccgccaactgtcttcagagaaaccattaggttaggtgatacggtgccagcaagggaagcaccatcgtccaggatctgcaaatctggttcctgggaaccccagactcctcagcagatctggctgtacatggatcagaaccacttcttcccccgcttaagctgtggtttgacccaagggtcagcatataggactgcctgctgcatttaatgaaggtgtttccttttggaagtctgtgctaccctctgcgcctagttgggaggagacatccatctggtctgggatttcgggagttagaatggaaagctctttgctaaagactggagtcatcctggcctgccaactggtggttcagagccggacgggcttgttttggacatcactgttgccttcactcagcagccacgggagagtgctccccatgcaactccaccttagaaaccacgtcagatactgagtagcttgctgactcctggaaacttctggtttttgttagtatcataatgaaggcaaagagaactaggctgtcatctttcagcctctttgacttactctagatgttgggagcagtggttgccaggtgaaacctgggccctttgtctttttcaccatgctttgggcagtttctgtatccagagagtccgcaggttcagataagctgaagaagagtaatagaacagcaaaggaagtggcttgaaggatgtgctagtaagccctgtggtttgtgcttaggtctctgctctgctacccaaggaactggtggttcagctggagataaaaagaagaatttgccaagtcagagaagaaaccccaaccccggaaaatcctctgtctccagtctctggaggtgaagcagggacaataagctaaggtagtatcttggccatcccaggaaacttgtggcattaggacgatgaaggccatgcttcagtgttttcgtttctatttcatgagactttttgtcttcctgcttacaagtgggaagatgattgacagtgactctactatgcagggctgttggtaccaacctgagccctataggtggcagtccctggagaagtggtcacagaagatggagctctgatcccctgcttacctcttcacaacacttgtgtgcaaagatagttttagatttggtttagaagctatcctccagaacaggctcccatacttagaatgtttctagttaaggtaataaattaggcaacccaagtgtgactccactcaagtgtccttttctgtaggcaggaagggcccacaacatggcttaaaatgtagtccatggttctggcccacagtacagtgtgtatctataccaggtcacctgtgttcaatctgggagccttcctggccagtctgagtggcagccagaagggagctcatagtgtctaggagtctcaggcaaggtaggtcagggtactgtgggcaggggggatgtgtgtgataggagagggtaccctaaaccccataccttccctccctgacctgaaaagctgatctcaacagggattcacacagaattaggctgtgtttttgcattagctggtaggtgactttctcaaaattcttaaattcagaaagtatttagtaaacttgaggaaggtatgaaatctggaggaggcatccaggacccaggggtttgatagctttacaggtaggatcataccacaccaaaagagcagtggacaataagactatatgagctatatgaagcttttaggaatcatttaggacagacagagccctaaacaacccattcatgacttaagttgttggctcagtgtatgctggggacaaagaaaaactaacaagccgacctgcctttatgataaattctagtgtgcttacaagggatgacttcctgaggtgtgatctgtccaccttgaagaactccacaactgaagaaggggagctgtgagaacgtggattgttctacaacttgcacagggtaacagaggaagtggctgaggcctagagtcacgttttccagttcccttcgcaaactatatttcttggaacgcgaaaggaagctttacctatttcatagaagacctggaatccataacctcagaaggcaatattattgatagaaaatgtggaaggatcaggaagttcttagattcttggatgacagatgcatgttgatgccctatggagatgtccttgtgttttgaggtcactgaggtaggaagacctgtctactcttggtttcaccactagaacagtcttgggctggatgggttatagagctgagcggctgtgatggttctgtttttacattaacaaaaacaattaaaaacaccaaaaacaaaaagccatgggcagacccacggtctgacattgattgaggcgcggaaataccttcacaaaggggggggccgcgagaaacaccgcggtctcactgtaatagtcccccgttgcgtgtgaaatagtcgtgccccccagatacagccacttgtagtctgtgcaagccagggggttacaaaaaggcggggggccaccccctatcagggaggggacgagttgtatctttttccgccaatgccgcggggtgaacgcgaactc

SEQ ID NO: 308880 - DNA, 5605 bp, Homo sapiens
cgtggaggcgttaacgcgcacgcgcttagggatccggccgtggccgagcgcgcggccgtaagaccgcgggtgactagcatgcagatacccatgctctgactttctgcccctccactgacatggcccaccggggtggggagagggacttccagacttcagctcgacgcatgggcacctcgctgctcttccagctttcagtgcatgaacgggagctggacctggtttttctggatcatagctatgccaagccttggagtgcccacccagatgccagtagtgcccgccccacccgcatgctctttgtcactccccggcggcagcacgaaagtaccatgtgaatcagacgtcccaatagatgtggagacggtcacatcaacgcctatgccactctatgacaatcagaaggcacgcagcgtgatgaatgagtgtgaacggcatgtcatctttgccaggactgatgcagatgcccctcctccaccagaggactgggaggagcatgtcaacagggtctcactctgtcacccagactgcagtgcagtggcacgatctcggctcactacaagccttgacctccaggactcagtctccttgtggaccaccacccttctgttatgacattgccacattgccacagattgatgcttacacaccatctcttttggactggctggacaatggcccagaacaagctattcaacaagatcctcaaagccctgcagtctgaccggcttgcccgcttggccaacgaaggggcttgtaatgagccagtgctgcgccgtgttgctgtggacaagtgtgcaaggagagtgcggcaggctctggcaagtgtgagctgggataccaagctgatccagtggctgcacaccacccttgtggagaccttgagtctgcccatgctggcagcctacctggatgctttgcagacgctgaaggggaagatcccaaccttgattgaccggatgcttgtgtcatccaacacaaagactggggctgcaggagctgaggccttgtctctcctactgaagaggccctgggaccctgctgtgggtgtgctttctcataacaaaccaagcaaactccctggctctccgctgattctcatcgcctcctctggtccctccagctctgtgtttcccacttcacgccgccaccgcttctggcaatctcagctgtcctgcttgggcaaggtcatccctgtagccacccatctgctgaacaatggcagtggggtaggagttctacagtgtctcgagcatatgattggggcagtgagaagcaaagtgctggagattcacagccatttcccacacaaacccattatcttgattggctggaacacaggagctttggtggcctgtcatgtgtcagtaatggagtatgtcactgcagttgtctgccttgggtttcctctgcttactgtggatggccccagaggggatgtagatgatcccctcttggatatgaagactccagtcctctttgtcattggtcagaattcccttcaatgtcaccctgaagccatggaggacttccgggagaagattcgagctgagaacagcttggtggtggttgggggagctgatgacaatctcagaataagcaaagcaaagaagaaatcagaagggttgactcagagcatggtggacagatgtattcaggatgagattgtggactttctgactggagtgctcactcgtgctgagggtcacatgggctctgaacctcgggatcaggatgctgagaagaagaagaagccccgcgatgtggcccgcagagacttggcctttgaagtccctgagcggggcagtcgacctgcctccccagctgccaagctgcccgcctcaccctcaggctcagaggatctctccagtgtgtccagcagccccacctccagtcccaagaccaaagtgaccacagtgacctctgcccagaagtccagtcagattggaagttctcagctgctgaagagacatgtgcagcggacagaagctgtgctgacccacaaacaagctcaagttcccatttcatcagaaccaccagaggaaggagagaaagaggatcttagggttcagctgaagcgacaccatccctcgagtccccttcctggcagtaagacctccaaacgaccgaagatcaaggtgtcccttatctcccaaggggacacagctggagggccttgtgctccttcccaaggaagtgctccagaagctgcaggtgggaagcccatcaccatgacactggggcaggcttcagcaggggccaaggagctcacaggacttctcaccacagccaagtccagttcttctgaaggtggagtctcagccagcccagtcccttcagtggtctccagcagcactgcacccagtgccttgcacacactgcagagccgcctggtggccacatctcctggcagctccctcccaggggccacatcagccagcagcctcctccaaggcctcagcttcagcttgcaggatatcagcagcaagacctctggccttccagcaaatccctccccaggaccagccccacaggccaccagtgtgaagttgcccacccccatgcagagcctgggtgccatcaccacgggcaccagcaccattgtccgtaccattcctgtggccaccactctctcctccttgggtgccactcctggtgggaagcccacagccatccaccagctgctgaccaatgggggcctcgctaagttggcaagcagcctccctggcctggctcagatctctaaccaagcatcaggcttgaaggtccccaccaccattactctgacacttcgtggccagccgagcaggatcactacactgagccctatgggctcaggagcagccccatccgaggagtcctcttcccaggtgctgccctccagctcacagcgcctgcctccagcaccctgaagatgctgtgtgatatgtcctccttaccaagttggtgatggctgcctcatggtgggccctggacaggtgtgtggtcctgctgagctgtccacgtgtcggaagacctgtttaagacagtcatttttgcctctccgccaactgtcttcagagaaaccattaggttaggtgatacggtgccagcaagggaagcaccatcgtccaggatctgcaaatctggttcctgggaaccccagactcctcagcagatctggctgtacatggatcagaaccacttcttcccccgcttaagctgtggtttgacccaagggtcagcatataggactgcctgctgcatttaatgaaggtgtttccttttggaagtctgtgctaccctctgcgcctagttgggaggagacatccatctggtctgggatttcgggagttagaatggaaagctctttgctaaagactggagtcatcctggcctgccaactggtggttcagagccggacgggcttgttttggacatcactgttgccttcactcagcagccacgggagagtgctccccatgcaactccaccttagaaaccacgtcagatactgagtagcttgctgactcctggaaacttctggtttttgttagtatcataatgaaggcaaagagaactaggctgtcatctttcagcctctttgacttactctagatgttgggagcagtggttgccaggtgaaacctgggccctttgtctttttcaccatgctttgggcagtttctgtatccagagagtccgcaggttcagataagctgaagaagagtaatagaacagcaaaggaagtggcttgaaggatgtgctagtaagccctgtggtttgtgcttaggtctctgctctgctacccaaggaactggtggttcagctggagataaaaagaagaatttgccaagtcagagaagaaaccccaaccccggaaaatcctctgtctccagtctctggaggtgaagcagggacaataagctaaggtagtatcttggccatcccaggaaacttgtggcattaggacgatgaaggccatgcttcagtgttttcgtttctatttcatgagactttttgtcttcctgcttacaagtgggaagatgattgacagtgactctactatgcagggctgttggtaccaacctgagccctataggtggcagtccctggagaagtggtcacagaagatggagctctgatcccctgcttacctcttcacaacacttgtgtgcaaagatagttttagatttggtttagaagctatcctccagaacaggctcccatacttagaatgtttctagttaaggtaataaattaggcaacccaagtgtgactccactcaagtgtccttttctgtaggcaggaagggcccacaacatggcttaaaatgtagtccatggttctggcccacagtacagtgtgtatctataccaggtcacctgtgttcaatctgggagccttcctggccagtctgagtggcagccagaagggagctcatagtgtctaggagtctcaggcaaggtaggtcagggtactgtgggcaggggggatgtgtgtgataggagagggtaccctaaaccccataccttccctccctgacctgaaaagctgatctcaacagggattcacacagaattaggctgtgtttttgcattagctggtaggtgactttctcaaaattcttaaattcagaaagtatttagtaaacttgaggaaggtatgaaatctggaggaggcatccaggacccaggggtttgatagctttacaggtaggatcataccacaccaaaagagcagtggacaataagactatatgagctatatgaagcttttaggaatcatttaggacagacagagccctaaacaacccattcatgacttaagttgttggctcagtgtatgctggggacaaagaaaaactaacaagccgacctgcctttatgataaattctagtgtgcttacaagggatgacttcctgaggtgtgatctgtccaccttgaagaactccacaactgaagaaggggagctgtgagaacgtggattgttctacaacttgcacagggtaacagaggaagtggctgaggcctagagtcacgttttccagttcccttcgcaaactatatttcttggaacgcgaaaggaagctttacctatttcatagaagacctggaatccataacctcagaaggcaatattattgatagaaaatgtggaaggatcaggaagttcttagattcttggatgacagatgcatgttgatgccctatggagatgtccttgtgttttgaggtcactgaggtaggaagacctgtctactcttggtttcaccactagaacagtcttgggctggatgggttatagagctgagcggctgtgatggttctgtttttacattaacaaaaacaattaaaaacaccaaaaacaaaaagccatgggcagacccacggtctgacattgattgaggcgcggaaataccttcacaaaggggggggccgcgagaaacaccgcggtctcactgtaatagtcccccgttgcgtgtgaaatagtcgtgccccccagatacagccacttgtagtctgtgcaagccagggggttacaaaaaggcggggggccaccccctatcagggaggggacgagttgtatctttttccgccaatgccgcggggtgaacgcgaactc

SEQ ID NO: 308881 - DNA, 5813 bp, Homo sapiens
aaatggatgcagtaaggtcactgaagtcaaaaagttaacataaagtttggcaggtagccactagaccagtttgtttggcatagtatttggggtgacaaagttggtgcaatgtatcataaagtggggaaggacccttggggcactaggatttgtttcttactttctttttttttttttttgagacggagtctctgttgcccaggctggagcgcaatggcgcaatcttggctcactgcaacctctgcctcctgggttcacccatttcacctgcctcagcctcccaagtagctgggattataggcacccgccaccatgcctggctaatatttttagtagagacggagtttcaccatgttggtcaggctcgtcttgaactcatgactttaagcaatccacctgcctcggcctcccaaagtgctgggattacaggcgtgagccactatgcccagctagatctcattttaaaatatgaaagacctttagatgttcatttatatttgtttctgttctaggctctgtacaaaatgagctaagtagctaaggtgaatcagacgtcccaatagatgtggagacggtcacatcaacgcctatgccactctatgacaatcagaaggcacgcagcgtgatgaatgagtgtgaacggcatgtcatctttgccaggactgatgcagatgcccctcctccaccagaggactgggaggagcatgtcaacagggtctcactctgtcacccagactgcagtgcagtggcacgatctcggctcactacaagccttgacctccaggactcagtctccttgtggaccaccacccttctgttatgacattgccacattgccacagattgatgcttacacaccatctcttttggactggctggacaatggcccagaacaagctattcaacaagatcctcaaagccctgcagtctgaccggcttgcccgcttggccaacgaaggggcttgtaatgagccagtgctgcgccgtgttgctgtggacaagtgtgcaaggagagtgcggcaggctctggcaagtgtgagctgggataccaagctgatccagtggctgcacaccacccttgtggagaccttgagtctgcccatgctggcagcctacctggatgctttgcagacgctgaaggggaagatcccaaccttgattgaccggatgcttgtgtcatccaacacaaagactggggctgcaggagctgaggccttgtctctcctactgaagaggccctgggaccctgctgtgggtgtgctttctcataacaaaccaagcaaactccctggctctccgctgattctcatcgcctcctctggtccctccagctctgtgtttcccacttcacgccgccaccgcttctggcaatctcagctgtcctgcttgggcaaggtcatccctgtagccacccatctgctgaacaatggcagtggggtaggagttctacagtgtctcgagcatatgattggggcagtgagaagcaaagtgctggagattcacagccatttcccacacaaacccattatcttgattggctggaacacaggagctttggtggcctgtcatgtgtcagtaatggagtatgtcactgcagttgtctgccttgggtttcctctgcttactgtggatggccccagaggggatgtagatgatcccctcttggatatgaagactccagtcctctttgtcattggtcagaattcccttcaatgtcaccctgaagccatggaggacttccgggagaagattcgagctgagaacagcttggtggtggttgggggagctgatgacaatctcagaataagcaaagcaaagaagaaatcagaagggttgactcagagcatggtggacagatgtattcaggatgagattgtggactttctgactggagtgctcactcgtgctgagggtcacatgggctctgaacctcgggatcaggatgctgagaagaagaagaagccccgcgatgtggcccgcagagacttggcctttgaagtccctgagcggggcagtcgacctgcctccccagctgccaagctgcccgcctcaccctcaggctcagaggatctctccagtgtgtccagcagccccacctccagtcccaagaccaaagtgaccacagtgacctctgcccagaagtccagtcagattggaagttctcagctgctgaagagacatgtgcagcggacagaagctgtgctgacccacaaacaagctcaagttcccatttcatcagaaccaccagaggaaggagagaaagaggatcttagggttcagctgaagcgacaccatccctcgagtccccttcctggcagtaagacctccaaacgaccgaagatcaaggtgtcccttatctcccaaggggacacagctggagggccttgtgctccttcccaaggaagtgctccagaagctgcaggtgggaagcccatcaccatgacactggggcaggcttcagcaggggccaaggagctcacaggacttctcaccacagccaagtccagttcttctgaaggtggagtctcagccagcccagtcccttcagtggtctccagcagcactgcacccagtgccttgcacacactgcagagccgcctggtggccacatctcctggcagctccctcccaggggccacatcagccagcagcctcctccaaggcctcagcttcagcttgcaggatatcagcagcaagacctctggccttccagcaaatccctccccaggaccagccccacaggccaccagtgtgaagttgcccacccccatgcagagcctgggtgccatcaccacgggcaccagcaccattgtccgtaccattcctgtggccaccactctctcctccttgggtgccactcctggtgggaagcccacagccatccaccagctgctgaccaatgggggcctcgctaagttggcaagcagcctccctggcctggctcagatctctaaccaagcatcaggcttgaaggtccccaccaccattactctgacacttcgtggccagccgagcaggatcactacactgagccctatgggctcaggagcagccccatccgaggagtcctcttcccaggtgctgccctccagctcacagcgcctgcctccagcaccctgaagatgctgtgtgatatgtcctccttaccaagttggtgatggctgcctcatggtgggccctggacaggtgtgtggtcctgctgagctgtccacgtgtcggaagacctgtttaagacagtcatttttgcctctccgccaactgtcttcagagaaaccattaggttaggtgatacggtgccagcaagggaagcaccatcgtccaggatctgcaaatctggttcctgggaaccccagactcctcagcagatctggctgtacatggatcagaaccacttcttcccccgcttaagctgtggtttgacccaagggtcagcatataggactgcctgctgcatttaatgaaggtgtttccttttggaagtctgtgctaccctctgcgcctagttgggaggagacatccatctggtctgggatttcgggagttagaatggaaagctctttgctaaagactggagtcatcctggcctgccaactggtggttcagagccggacgggcttgttttggacatcactgttgccttcactcagcagccacgggagagtgctccccatgcaactccaccttagaaaccacgtcagatactgagtagcttgctgactcctggaaacttctggtttttgttagtatcataatgaaggcaaagagaactaggctgtcatctttcagcctctttgacttactctagatgttgggagcagtggttgccaggtgaaacctgggccctttgtctttttcaccatgctttgggcagtttctgtatccagagagtccgcaggttcagataagctgaagaagagtaatagaacagcaaaggaagtggcttgaaggatgtgctagtaagccctgtggtttgtgcttaggtctctgctctgctacccaaggaactggtggttcagctggagataaaaagaagaatttgccaagtcagagaagaaaccccaaccccggaaaatcctctgtctccagtctctggaggtgaagcagggacaataagctaaggtagtatcttggccatcccaggaaacttgtggcattaggacgatgaaggccatgcttcagtgttttcgtttctatttcatgagactttttgtcttcctgcttacaagtgggaagatgattgacagtgactctactatgcagggctgttggtaccaacctgagccctataggtggcagtccctggagaagtggtcacagaagatggagctctgatcccctgcttacctcttcacaacacttgtgtgcaaagatagttttagatttggtttagaagctatcctccagaacaggctcccatacttagaatgtttctagttaaggtaataaattaggcaacccaagtgtgactccactcaagtgtccttttctgtaggcaggaagggcccacaacatggcttaaaatgtagtccatggttctggcccacagtacagtgtgtatctataccaggtcacctgtgttcaatctgggagccttcctggccagtctgagtggcagccagaagggagctcatagtgtctaggagtctcaggcaaggtaggtcagggtactgtgggcaggggggatgtgtgtgataggagagggtaccctaaaccccataccttccctccctgacctgaaaagctgatctcaacagggattcacacagaattaggctgtgtttttgcattagctggtaggtgactttctcaaaattcttaaattcagaaagtatttagtaaacttgaggaaggtatgaaatctggaggaggcatccaggacccaggggtttgatagctttacaggtaggatcataccacaccaaaagagcagtggacaataagactatatgagctatatgaagcttttaggaatcatttaggacagacagagccctaaacaacccattcatgacttaagttgttggctcagtgtatgctggggacaaagaaaaactaacaagccgacctgcctttatgataaattctagtgtgcttacaagggatgacttcctgaggtgtgatctgtccaccttgaagaactccacaactgaagaaggggagctgtgagaacgtggattgttctacaacttgcacagggtaacagaggaagtggctgaggcctagagtcacgttttccagttcccttcgcaaactatatttcttggaacgcgaaaggaagctttacctatttcatagaagacctggaatccataacctcagaaggcaatattattgatagaaaatgtggaaggatcaggaagttcttagattcttggatgacagatgcatgttgatgccctatggagatgtccttgtgttttgaggtcactgaggtaggaagacctgtctactcttggtttcaccactagaacagtcttgggctggatgggttatagagctgagcggctgtgatggttctgtttttacattaacaaaaacaattaaaaacaccaaaaacaaaaagccatgggcagacccacggtctgacattgattgaggcgcggaaataccttcacaaaggggggggccgcgagaaacaccgcggtctcactgtaatagtcccccgttgcgtgtgaaatagtcgtgccccccagatacagccacttgtagtctgtgcaagccagggggttacaaaaaggcggggggccaccccctatcagggaggggacgagttgtatctttttccgccaatgccgcggggtgaacgcgaactc

SEQ ID NO: 308882 - DNA, 5305 bp, Homo sapiens
cgtggaggcgttaacgcgcacgcgcttagggatccggccgtggccgagcgcgcggccgtaagaccgcgggtgactagcatgcagatacccatgctctgactttctgcccctccactgacatggcccaccggggtggggagagggacttccagacttcagctcgacgcatgggcacctcgctgctcttccagctttcagtgcatgaacgggagctggacctggtttttctggatcatagctatgccaagccttggagtgcccacccagatgccagtagtgcccgccccacccgcatgctctttgtcactccccggcggcagcacgaaagtaccatgtgaatcagacgtcccaatagatgtggagacggtcacatcaacgcctatgccactctatgacaatcagaaggcacgcagcgtgatgaatgagtgtgaacggcatgtcatctttgccaggactgatgcagatgcccctcctccaccagaggactgggaggagcatgtcaacaggactggctggacaatggcccagaacaagctattcaacaagatcctcaaagccctgcagtctgaccggcttgcccgcttggccaacgaaggggcttgtaatgagccagtgctgcgccgtgttgctgtggacaagtgtgcaaggagagtgcggcaggctctggcaagtgtgagctgggataccaagctgatccagtggctgcacaccacccttgtggagaccttgagtctgcccatgctggcagcctacctggatgctttgcagacgctgaaggggaagatcccaaccttgattgaccggatgcttgtgtcatccaacacaaagactggggctgcaggagctgaggccttgtctctcctactgaagaggccctgggaccctgctgtgggtgtgctttctcataacaaaccaagcaaactccctggctctccgctgattctcatcgcctcctctggtccctccagctctgtgtttcccacttcacgccgccaccgcttctggcaatctcagctgtcctgcttgggcaaggtcatccctgtagccacccatctgctgaacaatggcagtggggtaggagttctacagtgtctcgagcatatgattggggcagtgagaagcaaagtgctggagattcacagccatttcccacacaaacccattatcttgattggctggaacacaggagctttggtggcctgtcatgtgtcagtaatggagtatgtcactgcagttgtctgccttgggtttcctctgcttactgtggatggccccagaggggatgtagatgatcccctcttggatatgaagactccagtcctctttgtcattggtcagaattcccttcaatgtcaccctgaagccatggaggacttccgggagaagattcgagctgagaacagcttggtggtggttgggggagctgatgacaatctcagaataagcaaagcaaagaagaaatcagaagggttgactcagagcatggtggacagatgtattcaggatgagattgtggactttctgactggagtgctcactcgtgctgagggtcacatgggctctgaacctcgggatcaggatgctgagaagaagaagaagccccgcgatgtggcccgcagagacttggcctttgaagtccctgagcggggcagtcgacctgcctccccagctgccaagctgcccgcctcaccctcaggctcagaggatctctccagtgtgtccagcagccccacctccagtcccaagaccaaagtgaccacagtgacctctgcccagaagtccagtcagattggaagttctcagctgctgaagagacatgtgcagcggacagaagctgtgctgacccacaaacaagctcaagcacagtttgctgcttttctgaaacaaaatatgctggtgaggaaagctcttcctcctggcacctcctcctgtctctttgttcccatttcatcagaaccaccagaggaaggagagaaagaggatcttagggttcagctgaagcgacaccatccctcgagtccccttcctggcagtaagacctccaaacgaccgaagatcaaggtgtcccttatctcccaaggggacacagctggagggccttgtgctccttcccaaggaagtgctccagaagctgcaggtgggaagcccatcaccatgacactggggcaggcttcagcaggggccaaggagctcacaggacttctcaccacagccaagtccagttcttctgaaggtggagtctcagccagcccagtcccttcagtggtctccagcagcactgcacccagtgccttgcacacactgcagagccgcctggtggccacatctcctggcagctccctcccaggggccacatcagccagcagcctcctccaaggcctcagcttcagcttgcaggatatcagcagcaagacctctggccttccagcaaatccctccccaggaccagccccacaggcttgaaggtccccaccaccattactctgacacttcgtggccagccgagcaggatcactacactgagccctatgggctcaggagcagccccatccgaggagtcctcttcccaggtgctgccctccagctcacagcgcctgcctccagcaccctgaagatgctgtgtgatatgtcctccttaccaagttggtgatggctgcctcatggtgggccctggacaggtgtgtggtcctgctgagctgtccacgtgtcggaagacctgtttaagacagtcatttttgcctctccgccaactgtcttcagagaaaccattaggttaggtgatacggtgccagcaagggaagcaccatcgtccaggatctgcaaatctggttcctgggaaccccagactcctcagcagatctggctgtacatggatcagaaccacttcttcccccgcttaagctgtggtttgacccaagggtcagcatataggactgcctgctgcatttaatgaaggtgtttccttttggaagtctgtgctaccctctgcgcctagttgggaggagacatccatctggtctgggatttcgggagttagaatggaaagctctttgctaaagactggagtcatcctggcctgccaactggtggttcagagccggacgggcttgttttggacatcactgttgccttcactcagcagccacgggagagtgctccccatgcaactccaccttagaaaccacgtcagatactgagtagcttgctgactcctggaaacttctggtttttgttagtatcataatgaaggcaaagagaactaggctgtcatctttcagcctctttgacttactctagatgttgggagcagtggttgccaggtgaaacctgggccctttgtctttttcaccatgctttgggcagtttctgtatccagagagtccgcaggttcagataagctgaagaagagtaatagaacagcaaaggaagtggcttgaaggatgtgctagtaagccctgtggtttgtgcttaggtctctgctctgctacccaaggaactggtggttcagctggagataaaaagaagaatttgccaagtcagagaagaaaccccaaccccggaaaatcctctgtctccagtctctggaggtgaagcagggacaataagctaaggtagtatcttggccatcccaggaaacttgtggcattaggacgatgaaggccatgcttcagtgttttcgtttctatttcatgagactttttgtcttcctgcttacaagtgggaagatgattgacagtgactctactatgcagggctgttggtaccaacctgagccctataggtggcagtccctggagaagtggtcacagaagatggagctctgatcccctgcttacctcttcacaacacttgtgtgcaaagatagttttagatttggtttagaagctatcctccagaacaggctcccatacttagaatgtttctagttaaggtaataaattaggcaacccaagtgtgactccactcaagtgtccttttctgtaggcaggaagggcccacaacatggcttaaaatgtagtccatggttctggcccacagtacagtgtgtatctataccaggtcacctgtgttcaatctgggagccttcctggccagtctgagtggcagccagaagggagctcatagtgtctaggagtctcaggcaaggtaggtcagggtactgtgggcaggggggatgtgtgtgataggagagggtaccctaaaccccataccttccctccctgacctgaaaagctgatctcaacagggattcacacagaattaggctgtgtttttgcattagctggtaggtgactttctcaaaattcttaaattcagaaagtatttagtaaacttgaggaaggtatgaaatctggaggaggcatccaggacccaggggtttgatagctttacaggtaggatcataccacaccaaaagagcagtggacaataagactatatgagctatatgaagcttttaggaatcatttaggacagacagagccctaaacaacccattcatgacttaagttgttggctcagtgtatgctggggacaaagaaaaactaacaagccgacctgcctttatgataaattctagtgtgcttacaagggatgacttcctgaggtgtgatctgtccaccttgaagaactccacaactgaagaaggggagctgtgagaacgtggattgttctacaacttgcacagggtaacagaggaagtggctgaggcctagagtcacgttttccagttcccttcgcaaactatatttcttggaacgcgaaaggaagctttacctatttcatagaagacctggaatccataacctcagaaggcaatattattgatagaaaatgtggaaggatcaggaagttcttagattcttggatgacagatgcatgttgatgccctatggagatgtccttgtgttttgaggtcactgaggtaggaagacctgtctactcttggtttcaccactagaacagtcttgggctggatgggttatagagctgagcggctgtgatggttctgtttttacattaacaaaaacaattaaaaacaccaaaaacaaaaagccatgggcagacccacggtctgacattgattgaggcgcggaaataccttcacaaaggggggggccgcgagaaacaccgcggtctcactgtaatagtcccccgttgcgtgtgaaatagtcgtgccccccagatacagccacttgtagtctgtgcaagccagggggttacaaaaaggcggggggccaccccctatcagggaggggacgagttgtatctttttccgccaatgccgcggggtgaacgcgaactc

SEQ ID NO: 308883 - DNA, 5480 bp, Homo sapiens
cgtggaggcgttaacgcgcacgcgcttagggatccggccgtggccgagcgcgcggccgtaagaccgcgggtgactagcatgcagatacccatgctctgactttctgcccctccactgacatggcccaccggggtggggagagggacttccagacttcagctcgacgcatgggcacctcgctgctcttccagctttcagtgcatgaacgggagctggacctggtttttctggatcatagctatgccaagccttggagtgcccacccagatgccagtagtgcccgccccacccgcatgctctttgtcactccccggcggcagcacgaaagtaccatgctctgtacaaaatgagctaagtagctaaggtgaatcagacgtcccaatagatgtggagacggtcacatcaacgcctatgccactctatgacaatcagaaggcacgcagcgtgatgaatgagtgtgaacggcatgtcatctttgccaggactgatgcagatgcccctcctccaccagaggactgggaggagcatgtcaacaggactggctggacaatggcccagaacaagctattcaacaagatcctcaaagccctgcagtctgaccggcttgcccgcttggccaacgaaggggcttgtaatgagccagtgctgcgccgtgttgctgtggacaagtgtgcaaggagagtgcggcaggctctggcaagtgtgagctgggataccaagctgatccagtggctgcacaccacccttgtggagaccttgagtctgcccatgctggcagcctacctggatgctttgcagacgctgaaggggaagatcccaaccttgattgaccggatgcttgtgtcatccaacacaaagactggggctgcaggagctgaggccttgtctctcctactgaagaggccctgggaccctgctgtgggtgtgctttctcataacaaaccaagcaaactccctggctctccgctgattctcatcgcctcctctggtccctccagctctgtgtttcccacttcacgccgccaccgcttctggcaatctcagctgtcctgcttgggcaaggtcatccctgtagccacccatctgctgaacaatggcagtggggtaggagttctacagtgtctcgagcatatgattggggcagtgagaagcaaagtgctggagattcacagccatttcccacacaaacccattatcttgattggctggaacacaggagctttggtggcctgtcatgtgtcagtaatggagtatgtcactgcagttgtctgccttgggtttcctctgcttactgtggatggccccagaggggatgtagatgatcccctcttggatatgaagactccagtcctctttgtcattggtcagaattcccttcaatgtcaccctgaagccatggaggacttccgggagaagattcgagctgagaacagcttggtggtggttgggggagctgatgacaatctcagaataagcaaagcaaagaagaaatcagaagggttgactcagagcatggtggacagatgtattcaggatgagattgtggactttctgactggagtgctcactcgtgctgagggtcacatgggctctgaacctcgggatcaggatgctgagaagaagaagaagccccgcgatgtggcccgcagagacttggcctttgaagtccctgagcggggcagtcgacctgcctccccagctgccaagctgcccgcctcaccctcaggctcagaggatctctccagtgtgtccagcagccccacctccagtcccaagaccaaagtgaccacagtgacctctgcccagaagtccagtcagattggaagttctcagctgctgaagagacatgtgcagcggacagaagctgtgctgacccacaaacaagctcaagttcccatttcatcagaaccaccagaggaaggagagaaagaggatcttagggttcagctgaagcgacaccatccctcgagtccccttcctggcagtaagacctccaaacgaccgaagatcaaggtgtcccttatctcccaaggggacacagctggagggccttgtgctccttcccaaggaagtgctccagaagctgcaggtgggaagcccatcaccatgacactggggcaggcttcagcaggggccaaggagctcacaggacttctcaccacagccaagtccagttcttctgaaggtggagtctcagccagcccagtcccttcagtggtctccagcagcactgcacccagtgccttgcacacactgcagagccgcctggtggccacatctcctggcagctccctcccaggggccacatcagccagcagcctcctccaaggcctcagcttcagcttgcaggatatcagcagcaagacctctggccttccagcaaatccctccccaggaccagccccacaggccaccagtgtgaagttgcccacccccatgcagagcctgggtgccatcaccacgggcaccagcaccattgtccgtaccattcctgtggccaccactctctcctccttgggtgccactcctggtgggaagcccacagccatccaccagctgctgaccaatgggggcctcgctaagttggcaagcagcctccctggcctggctcagatctctaaccaagcatcaggcttgaaggtccccaccaccattactctgacacttcgtggccagccgagcaggatcactacactgagccctatgggctcaggagcagccccatccgaggagtcctcttcccaggtgctgccctccagctcacagcgcctgcctccagcaccctgaagatgctgtgtgatatgtcctccttaccaagttggtgatggctgcctcatggtgggccctggacaggtgtgtggtcctgctgagctgtccacgtgtcggaagacctgtttaagacagtcatttttgcctctccgccaactgtcttcagagaaaccattaggttaggtgatacggtgccagcaagggaagcaccatcgtccaggatctgcaaatctggttcctgggaaccccagactcctcagcagatctggctgtacatggatcagaaccacttcttcccccgcttaagctgtggtttgacccaagggtcagcatataggactgcctgctgcatttaatgaaggtgtttccttttggaagtctgtgctaccctctgcgcctagttgggaggagacatccatctggtctgggatttcgggagttagaatggaaagctctttgctaaagactggagtcatcctggcctgccaactggtggttcagagccggacgggcttgttttggacatcactgttgccttcactcagcagccacgggagagtgctccccatgcaactccaccttagaaaccacgtcagatactgagtagcttgctgactcctggaaacttctggtttttgttagtatcataatgaaggcaaagagaactaggctgtcatctttcagcctctttgacttactctagatgttgggagcagtggttgccaggtgaaacctgggccctttgtctttttcaccatgctttgggcagtttctgtatccagagagtccgcaggttcagataagctgaagaagagtaatagaacagcaaaggaagtggcttgaaggatgtgctagtaagccctgtggtttgtgcttaggtctctgctctgctacccaaggaactggtggttcagctggagataaaaagaagaatttgccaagtcagagaagaaaccccaaccccggaaaatcctctgtctccagtctctggaggtgaagcagggacaataagctaaggtagtatcttggccatcccaggaaacttgtggcattaggacgatgaaggccatgcttcagtgttttcgtttctatttcatgagactttttgtcttcctgcttacaagtgggaagatgattgacagtgactctactatgcagggctgttggtaccaacctgagccctataggtggcagtccctggagaagtggtcacagaagatggagctctgatcccctgcttacctcttcacaacacttgtgtgcaaagatagttttagatttggtttagaagctatcctccagaacaggctcccatacttagaatgtttctagttaaggtaataaattaggcaacccaagtgtgactccactcaagtgtccttttctgtaggcaggaagggcccacaacatggcttaaaatgtagtccatggttctggcccacagtacagtgtgtatctataccaggtcacctgtgttcaatctgggagccttcctggccagtctgagtggcagccagaagggagctcatagtgtctaggagtctcaggcaaggtaggtcagggtactgtgggcaggggggatgtgtgtgataggagagggtaccctaaaccccataccttccctccctgacctgaaaagctgatctcaacagggattcacacagaattaggctgtgtttttgcattagctggtaggtgactttctcaaaattcttaaattcagaaagtatttagtaaacttgaggaaggtatgaaatctggaggaggcatccaggacccaggggtttgatagctttacaggtaggatcataccacaccaaaagagcagtggacaataagactatatgagctatatgaagcttttaggaatcatttaggacagacagagccctaaacaacccattcatgacttaagttgttggctcagtgtatgctggggacaaagaaaaactaacaagccgacctgcctttatgataaattctagtgtgcttacaagggatgacttcctgaggtgtgatctgtccaccttgaagaactccacaactgaagaaggggagctgtgagaacgtggattgttctacaacttgcacagggtaacagaggaagtggctgaggcctagagtcacgttttccagttcccttcgcaaactatatttcttggaacgcgaaaggaagctttacctatttcatagaagacctggaatccataacctcagaaggcaatattattgatagaaaatgtggaaggatcaggaagttcttagattcttggatgacagatgcatgttgatgccctatggagatgtccttgtgttttgaggtcactgaggtaggaagacctgtctactcttggtttcaccactagaacagtcttgggctggatgggttatagagctgagcggctgtgatggttctgtttttacattaacaaaaacaattaaaaacaccaaaaacaaaaagccatgggcagacccacggtctgacattgattgaggcgcggaaataccttcacaaaggggggggccgcgagaaacaccgcggtctcactgtaatagtcccccgttgcgtgtgaaatagtcgtgccccccagatacagccacttgtagtctgtgcaagccagggggttacaaaaaggcggggggccaccccctatcagggaggggacgagttgtatctttttccgccaatgccgcggggtgaacgcgaactc

SEQ ID NO: 308884 - DNA, 4922 bp, Homo sapiens
cgtggaggcgttaacgcgcacgcgcttagggatccggccgtggccgagcgcgcggccgtaagaccgcgggcttgtaatgagccagtgctgcgccgtgttgctgtggacaagtgtgcaaggagagtgcggcaggctctggcaagtgtgagctgggataccaagctgatccagtggctgcacaccacccttgtggagaccttgagtctgcccatgctggcagcctacctggatgctttgcagacgctgaaggggaagatcccaaccttgattgaccggatgcttgtgtcatccaacacaaagactggggctgcaggagctgaggccttgtctctcctactgaagaggccctgggaccctgctgtgggtgtgctttctcataacaaaccaagcaaactccctggctctccgctgattctcatcgcctcctctggtccctccagctctgtgtttcccacttcacgccgccaccgcttctggcaatctcagctgtcctgcttgggcaaggtcatccctgtagccacccatctgctgaacaatggcagtggggtaggagttctacagtgtctcgagcatatgattggggcagtgagaagcaaagtgctggagattcacagccatttcccacacaaacccattatcttgattggctggaacacaggagctttggtggcctgtcatgtgtcagtaatggagtatgtcactgcagttgtctgccttgggtttcctctgcttactgtggatggccccagaggggatgtagatgatcccctcttggatatgaagactccagtcctctttgtcattggtcagaattcccttcaatgtcaccctgaagccatggaggacttccgggagaagattcgagctgagaacagcttggtggtggttgggggagctgatgacaatctcagaataagcaaagcaaagaagaaatcagaagggttgactcagagcatggtggacagatgtattcaggatgagattgtggactttctgactggagtgctcactcgtgctgagggtcacatgggctctgaacctcgggatcaggatgctgagaagaagaagaagccccgcgatgtggcccgcagagacttggcctttgaagtccctgagcggggcagtcgacctgcctccccagctgccaagctgcccgcctcaccctcaggctcagaggatctctccagtgtgtccagcagccccacctccagtcccaagaccaaagtgaccacagtgacctctgcccagaagtccagtcagattggaagttctcagctgctgaagagacatgtgcagcggacagaagctgtgctgacccacaaacaagctcaagttcccatttcatcagaaccaccagaggaaggagagaaagaggatcttagggttcagctgaagcgacaccatccctcgagtccccttcctggcagtaagacctccaaacgaccgaagatcaaggtgtcccttatctcccaaggggacacagctggagggccttgtgctccttcccaaggaagtgctccagaagctgcaggtgggaagcccatcaccatgacactggggcaggcttcagcaggggccaaggagctcacaggacttctcaccacagccaagtccagttcttctgaaggtggagtctcagccagcccagtcccttcagtggtctccagcagcactgcacccagtgccttgcacacactgcagagccgcctggtggccacatctcctggcagctccctcccaggggccacatcagccagcagcctcctccaaggcctcagcttcagcttgcaggatatcagcagcaagacctctggccttccagcaaatccctccccaggaccagccccacaggccaccagtgtgaagttgcccacccccatgcagagcctgggtgccatcaccacgggcaccagcaccattgtccgtaccattcctgtggccaccactctctcctccttgggtgccactcctggtgggaagcccacagccatccaccagctgctgaccaatgggggcctcgctaagttggcaagcagcctccctggcctggctcagatctctaaccaagcatcaggcttgaaggtccccaccaccattactctgacacttcgtggccagccgagcaggatcactacactgagccctatgggctcaggagcagccccatccgaggagtcctcttcccaggtgctgccctccagctcacagcgcctgcctccagcaccctgaagatgctgtgtgatatgtcctccttaccaagttggtgatggctgcctcatggtgggccctggacaggtgtgtggtcctgctgagctgtccacgtgtcggaagacctgtttaagacagtcatttttgcctctccgccaactgtcttcagagaaaccattaggttaggtgatacggtgccagcaagggaagcaccatcgtccaggatctgcaaatctggttcctgggaaccccagactcctcagcagatctggctgtacatggatcagaaccacttcttcccccgcttaagctgtggtttgacccaagggtcagcatataggactgcctgctgcatttaatgaaggtgtttccttttggaagtctgtgctaccctctgcgcctagttgggaggagacatccatctggtctgggatttcgggagttagaatggaaagctctttgctaaagactggagtcatcctggcctgccaactggtggttcagagccggacgggcttgttttggacatcactgttgccttcactcagcagccacgggagagtgctccccatgcaactccaccttagaaaccacgtcagatactgagtagcttgctgactcctggaaacttctggtttttgttagtatcataatgaaggcaaagagaactaggctgtcatctttcagcctctttgacttactctagatgttgggagcagtggttgccaggtgaaacctgggccctttgtctttttcaccatgctttgggcagtttctgtatccagagagtccgcaggttcagataagctgaagaagagtaatagaacagcaaaggaagtggcttgaaggatgtgctagtaagccctgtggtttgtgcttaggtctctgctctgctacccaaggaactggtggttcagctggagataaaaagaagaatttgccaagtcagagaagaaaccccaaccccggaaaatcctctgtctccagtctctggaggtgaagcagggacaataagctaaggtagtatcttggccatcccaggaaacttgtggcattaggacgatgaaggccatgcttcagtgttttcgtttctatttcatgagactttttgtcttcctgcttacaagtgggaagatgattgacagtgactctactatgcagggctgttggtaccaacctgagccctataggtggcagtccctggagaagtggtcacagaagatggagctctgatcccctgcttacctcttcacaacacttgtgtgcaaagatagttttagatttggtttagaagctatcctccagaacaggctcccatacttagaatgtttctagttaaggtaataaattaggcaacccaagtgtgactccactcaagtgtccttttctgtaggcaggaagggcccacaacatggcttaaaatgtagtccatggttctggcccacagtacagtgtgtatctataccaggtcacctgtgttcaatctgggagccttcctggccagtctgagtggcagccagaagggagctcatagtgtctaggagtctcaggcaaggtaggtcagggtactgtgggcaggggggatgtgtgtgataggagagggtaccctaaaccccataccttccctccctgacctgaaaagctgatctcaacagggattcacacagaattaggctgtgtttttgcattagctggtaggtgactttctcaaaattcttaaattcagaaagtatttagtaaacttgaggaaggtatgaaatctggaggaggcatccaggacccaggggtttgatagctttacaggtaggatcataccacaccaaaagagcagtggacaataagactatatgagctatatgaagcttttaggaatcatttaggacagacagagccctaaacaacccattcatgacttaagttgttggctcagtgtatgctggggacaaagaaaaactaacaagccgacctgcctttatgataaattctagtgtgcttacaagggatgacttcctgaggtgtgatctgtccaccttgaagaactccacaactgaagaaggggagctgtgagaacgtggattgttctacaacttgcacagggtaacagaggaagtggctgaggcctagagtcacgttttccagttcccttcgcaaactatatttcttggaacgcgaaaggaagctttacctatttcatagaagacctggaatccataacctcagaaggcaatattattgatagaaaatgtggaaggatcaggaagttcttagattcttggatgacagatgcatgttgatgccctatggagatgtccttgtgttttgaggtcactgaggtaggaagacctgtctactcttggtttcaccactagaacagtcttgggctggatgggttatagagctgagcggctgtgatggttctgtttttacattaacaaaaacaattaaaaacaccaaaaacaaaaagccatgggcagacccacggtctgacattgattgaggcgcggaaataccttcacaaaggggggggccgcgagaaacaccgcggtctcactgtaatagtcccccgttgcgtgtgaaatagtcgtgccccccagatacagccacttgtagtctgtgcaagccagggggttacaaaaaggcggggggccaccccctatcagggaggggacgagttgtatctttttccgccaatgccgcggggtgaacgcgaactc

SEQ ID NO: 308885 - DNA, 5441 bp, Homo sapiens
aatatgtcgtctgttcagtggtgctgtgcgtttatttatgattggaataattttagctactaagtaagtaattagctttgctagcctgaaagacttttttcatgactagtcttgacttgtactgtgtatattattgtgtgtatgtgtgtattattaatacaagtgtgtgctgtgacgatttgatttggtaggattgagaccagaagaatctaggtcttgtgttttaggtcagtggtcttagactaagctacttcgttttactgttccctagcagagacataaaactatggcataatcttctttatatggtgtacatacatggggagcgtccccagggtttgactataattcctcagagtttcccttataggactggctggacaatggcccagaacaagctattcaacaagatcctcaaagccctgcagtctgaccggcttgcccgcttggccaacgaaggggtaagacaccagcaatccgcccacagtgggctcttcgtagttcaggcctcactggctgactgacttgtccccctgcttgttaaccaggtagtcctcatgttttattacttccacttacatccttcaggcttgtaatgagccagtgctgcgccgtgttgctgtggacaagtgtgcaaggagagtgcggcaggctctggcaagtgtgagctgggataccaagctgatccagtggctgcacaccacccttgtggagaccttgagtctgcccatgctggcagcctacctggatgctttgcagacgctgaaggggaagatcccaaccttgattgaccggatgcttgtgtcatccaacacaaagactggggctgcaggagctgaggccttgtctctcctactgaagaggccctgggaccctgctgtgggtgtgctttctcataacaaaccaagcaaactccctggctctccgctgattctcatcgcctcctctggtccctccagctctgtgtttcccacttcacgccgccaccgcttctggcaatctcagctgtcctgcttgggcaaggtcatccctgtagccacccatctgctgaacaatggcagtggggtaggagttctacagtgtctcgagcatatgattggggcagtgagaagcaaagtgctggagattcacagccatttcccacacaaacccattatcttgattggctggaacacaggagctttggtggcctgtcatgtgtcagtaatggagtatgtcactgcagttgtctgccttgggtttcctctgcttactgtggatggccccagaggggatgtagatgatcccctcttggatatgaagactccagtcctctttgtcattggtcagaattcccttcaatgtcaccctgaagccatggaggacttccgggagaagattcgagctgagaacagcttggtggtggttgggggagctgatgacaatctcagaataagcaaagcaaagaagaaatcagaagggttgactcagagcatggtggacagatgtattcaggatgagattgtggactttctgactggagtgctcactcgtgctgagggtcacatgggctctgaacctcgggatcaggatgctgagaagaagaagaagccccgcgatgtggcccgcagagacttggcctttgaagtccctgagcggggcagtcgacctgcctccccagctgccaagctgcccgcctcaccctcaggctcagaggatctctccagtgtgtccagcagccccacctccagtcccaagaccaaagtgaccacagtgacctctgcccagaagtccagtcagattggaagttctcagctgctgaagagacatgtgcagcggacagaagctgtgctgacccacaaacaagctcaagttcccatttcatcagaaccaccagaggaaggagagaaagaggatcttagggttcagctgaagcgacaccatccctcgagtccccttcctggcagtaagacctccaaacgaccgaagatcaaggtgtcccttatctcccaaggggacacagctggagggccttgtgctccttcccaaggaagtgctccagaagctgcaggtgggaagcccatcaccatgacactggggcaggcttcagcaggggccaaggagctcacaggacttctcaccacagccaagtccagttcttctgaaggtggagtctcagccagcccagtcccttcagtggtctccagcagcactgcacccagtgccttgcacacactgcagagccgcctggtggccacatctcctggcagctccctcccaggggccacatcagccagcagcctcctccaaggcctcagcttcagcttgcaggatatcagcagcaagacctctggccttccagcaaatccctccccaggaccagccccacaggccaccagtgtgaagttgcccacccccatgcagagcctgggtgccatcaccacgggcaccagcaccattgtccgtaccattcctgtggccaccactctctcctccttgggtgccactcctggtgggaagcccacagccatccaccagctgctgaccaatgggggcctcgctaagttggcaagcagcctccctggcctggctcagatctctaaccaagcatcaggcttgaaggtccccaccaccattactctgacacttcgtggccagccgagcaggatcactacactgagccctatgggctcaggagcagccccatccgaggagtcctcttcccaggtgctgccctccagctcacagcgcctgcctccagcaccctgaagatgctgtgtgatatgtcctccttaccaagttggtgatggctgcctcatggtgggccctggacaggtgtgtggtcctgctgagctgtccacgtgtcggaagacctgtttaagacagtcatttttgcctctccgccaactgtcttcagagaaaccattaggttaggtgatacggtgccagcaagggaagcaccatcgtccaggatctgcaaatctggttcctgggaaccccagactcctcagcagatctggctgtacatggatcagaaccacttcttcccccgcttaagctgtggtttgacccaagggtcagcatataggactgcctgctgcatttaatgaaggtgtttccttttggaagtctgtgctaccctctgcgcctagttgggaggagacatccatctggtctgggatttcgggagttagaatggaaagctctttgctaaagactggagtcatcctggcctgccaactggtggttcagagccggacgggcttgttttggacatcactgttgccttcactcagcagccacgggagagtgctccccatgcaactccaccttagaaaccacgtcagatactgagtagcttgctgactcctggaaacttctggtttttgttagtatcataatgaaggcaaagagaactaggctgtcatctttcagcctctttgacttactctagatgttgggagcagtggttgccaggtgaaacctgggccctttgtctttttcaccatgctttgggcagtttctgtatccagagagtccgcaggttcagataagctgaagaagagtaatagaacagcaaaggaagtggcttgaaggatgtgctagtaagccctgtggtttgtgcttaggtctctgctctgctacccaaggaactggtggttcagctggagataaaaagaagaatttgccaagtcagagaagaaaccccaaccccggaaaatcctctgtctccagtctctggaggtgaagcagggacaataagctaaggtagtatcttggccatcccaggaaacttgtggcattaggacgatgaaggccatgcttcagtgttttcgtttctatttcatgagactttttgtcttcctgcttacaagtgggaagatgattgacagtgactctactatgcagggctgttggtaccaacctgagccctataggtggcagtccctggagaagtggtcacagaagatggagctctgatcccctgcttacctcttcacaacacttgtgtgcaaagatagttttagatttggtttagaagctatcctccagaacaggctcccatacttagaatgtttctagttaaggtaataaattaggcaacccaagtgtgactccactcaagtgtccttttctgtaggcaggaagggcccacaacatggcttaaaatgtagtccatggttctggcccacagtacagtgtgtatctataccaggtcacctgtgttcaatctgggagccttcctggccagtctgagtggcagccagaagggagctcatagtgtctaggagtctcaggcaaggtaggtcagggtactgtgggcaggggggatgtgtgtgataggagagggtaccctaaaccccataccttccctccctgacctgaaaagctgatctcaacagggattcacacagaattaggctgtgtttttgcattagctggtaggtgactttctcaaaattcttaaattcagaaagtatttagtaaacttgaggaaggtatgaaatctggaggaggcatccaggacccaggggtttgatagctttacaggtaggatcataccacaccaaaagagcagtggacaataagactatatgagctatatgaagcttttaggaatcatttaggacagacagagccctaaacaacccattcatgacttaagttgttggctcagtgtatgctggggacaaagaaaaactaacaagccgacctgcctttatgataaattctagtgtgcttacaagggatgacttcctgaggtgtgatctgtccaccttgaagaactccacaactgaagaaggggagctgtgagaacgtggattgttctacaacttgcacagggtaacagaggaagtggctgaggcctagagtcacgttttccagttcccttcgcaaactatatttcttggaacgcgaaaggaagctttacctatttcatagaagacctggaatccataacctcagaaggcaatattattgatagaaaatgtggaaggatcaggaagttcttagattcttggatgacagatgcatgttgatgccctatggagatgtccttgtgttttgaggtcactgaggtaggaagacctgtctactcttggtttcaccactagaacagtcttgggctggatgggttatagagctgagcggctgtgatggttctgtttttacattaacaaaaacaattaaaaacaccaaaaacaaaaagccatgggcagacccacggtctgacattgattgaggcgcggaaataccttcacaaaggggggggccgcgagaaacaccgcggtctcactgtaatagtcccccgttgcgtgtgaaatagtcgtgccccccagatacagccacttgtagtctgtgcaagccagggggttacaaaaaggcggggggccaccccctatcagggaggggacgagttgtatctttttccgccaatgccgcggggtgaacgcgaactc

SEQ ID NO: 308886 - DNA, 5637 bp, Homo sapiens
cgtggaggcgttaacgcgcacgcgcttagggatccggccgtggccgagcgcgcggccgtaagaccgcgggtgactagcatgcagatacccatgctctgactttctgcccctccactgacatggcccaccggggtggggagagggacttccagacttcagctcgacgcatgggcacctcgctgctcttccagctttcagtgcatgaacgggagctggacctggtttttctggatcatagctatgccaagccttggagtgcccacccagatgccagtagtgcccgccccacccgcatgctctttgtcactccccggcggcagcacgaaagtaccatatgattgttaaatacctgtgaagtatgtgtggcccggtcctatttcctcacctgtttacagtgaatcagacgtcccaatagatgtggagacggtcacatcaacgcctatgccactctatgacaatcagaaggcacgcagcgtgatgaatgagtgtgaacggcatgtcatctttgccaggactgatgcagatgcccctcctccaccagaggactgggaggagcatgtcaacaggactggctggacaatggcccagaacaagctattcaacaagatcctcaaagccctgcagtctgaccggcttgcccgcttggccaacgaaggggtaagacaccagcaatccgcccacagtgggctcttcgtagttcaggcctcactggctgactgacttgtccccctgcttgttaaccaggtagtcctcatgttttattacttccacttacatccttcaggcttgtaatgagccagtgctgcgccgtgttgctgtggacaagtgtgcaaggagagtgcggcaggctctggcaagtgtgagctgggataccaagctgatccagtggctgcacaccacccttgtggagaccttgagtctgcccatgctggcagcctacctggatgctttgcagacgctgaaggggaagatcccaaccttgattgaccggatgcttgtgtcatccaacacaaagactggggctgcaggagctgaggccttgtctctcctactgaagaggccctgggaccctgctgtgggtgtgctttctcataacaaaccaagcaaactccctggctctccgctgattctcatcgcctcctctggtccctccagctctgtgtttcccacttcacgccgccaccgcttctggcaatctcagctgtcctgcttgggcaaggtcatccctgtagccacccatctgctgaacaatggcagtggggtaggagttctacagtgtctcgagcatatgattggggcagtgagaagcaaagtgctggagattcacagccatttcccacacaaacccattatcttgattggctggaacacaggagctttggtggcctgtcatgtgtcagtaatggagtatgtcactgcagttgtctgccttgggtttcctctgcttactgtggatggccccagaggggatgtagatgatcccctcttggatatgaagactccagtcctctttgtcattggtcagaattcccttcaatgtcaccctgaagccatggaggacttccgggagaagattcgagctgagaacagcttggtggtggttgggggagctgatgacaatctcagaataagcaaagcaaagaagaaatcagaagggttgactcagagcatggtggacagatgtattcaggatgagattgtggactttctgactggagtgctcactcgtgctgagggtcacatgggctctgaacctcgggatcaggatgctgagaagaagaagaagccccgcgatgtggcccgcagagacttggcctttgaagtccctgagcggggcagtcgacctgcctccccagctgccaagctgcccgcctcaccctcaggctcagaggatctctccagtgtgtccagcagccccacctccagtcccaagaccaaagtgaccacagtgacctctgcccagaagtccagtcagattggaagttctcagctgctgaagagacatgtgcagcggacagaagctgtgctgacccacaaacaagctcaagttcccatttcatcagaaccaccagaggaaggagagaaagaggatcttagggttcagctgaagcgacaccatccctcgagtccccttcctggcagtaagacctccaaacgaccgaagatcaaggtgtcccttatctcccaaggggacacagctggagggccttgtgctccttcccaaggaagtgctccagaagctgcaggtgggaagcccatcaccatgacactggggcaggcttcagcaggggccaaggagctcacaggacttctcaccacagccaagtccagttcttctgaaggtggagtctcagccagcccagtcccttcagtggtctccagcagcactgcacccagtgccttgcacacactgcagagccgcctggtggccacatctcctggcagctccctcccaggggccacatcagccagcagcctcctccaaggcctcagcttcagcttgcaggatatcagcagcaagacctctggccttccagcaaatccctccccaggaccagccccacaggccaccagtgtgaagttgcccacccccatgcagagcctgggtgccatcaccacgggcaccagcaccattgtccgtaccattcctgtggccaccactctctcctccttgggtgccactcctggtgggaagcccacagccatccaccagctgctgaccaatgggggcctcgctaagttggcaagcagcctccctggcctggctcagatctctaaccaagcatcaggcttgaaggtccccaccaccattactctgacacttcgtggccagccgagcaggatcactacactgagccctatgggctcaggagcagccccatccgaggagtcctcttcccaggtgctgccctccagctcacagcgcctgcctccagcaccctgaagatgctgtgtgatatgtcctccttaccaagttggtgatggctgcctcatggtgggccctggacaggtgtgtggtcctgctgagctgtccacgtgtcggaagacctgtttaagacagtcatttttgcctctccgccaactgtcttcagagaaaccattaggttaggtgatacggtgccagcaagggaagcaccatcgtccaggatctgcaaatctggttcctgggaaccccagactcctcagcagatctggctgtacatggatcagaaccacttcttcccccgcttaagctgtggtttgacccaagggtcagcatataggactgcctgctgcatttaatgaaggtgtttccttttggaagtctgtgctaccctctgcgcctagttgggaggagacatccatctggtctgggatttcgggagttagaatggaaagctctttgctaaagactggagtcatcctggcctgccaactggtggttcagagccggacgggcttgttttggacatcactgttgccttcactcagcagccacgggagagtgctccccatgcaactccaccttagaaaccacgtcagatactgagtagcttgctgactcctggaaacttctggtttttgttagtatcataatgaaggcaaagagaactaggctgtcatctttcagcctctttgacttactctagatgttgggagcagtggttgccaggtgaaacctgggccctttgtctttttcaccatgctttgggcagtttctgtatccagagagtccgcaggttcagataagctgaagaagagtaatagaacagcaaaggaagtggcttgaaggatgtgctagtaagccctgtggtttgtgcttaggtctctgctctgctacccaaggaactggtggttcagctggagataaaaagaagaatttgccaagtcagagaagaaaccccaaccccggaaaatcctctgtctccagtctctggaggtgaagcagggacaataagctaaggtagtatcttggccatcccaggaaacttgtggcattaggacgatgaaggccatgcttcagtgttttcgtttctatttcatgagactttttgtcttcctgcttacaagtgggaagatgattgacagtgactctactatgcagggctgttggtaccaacctgagccctataggtggcagtccctggagaagtggtcacagaagatggagctctgatcccctgcttacctcttcacaacacttgtgtgcaaagatagttttagatttggtttagaagctatcctccagaacaggctcccatacttagaatgtttctagttaaggtaataaattaggcaacccaagtgtgactccactcaagtgtccttttctgtaggcaggaagggcccacaacatggcttaaaatgtagtccatggttctggcccacagtacagtgtgtatctataccaggtcacctgtgttcaatctgggagccttcctggccagtctgagtggcagccagaagggagctcatagtgtctaggagtctcaggcaaggtaggtcagggtactgtgggcaggggggatgtgtgtgataggagagggtaccctaaaccccataccttccctccctgacctgaaaagctgatctcaacagggattcacacagaattaggctgtgtttttgcattagctggtaggtgactttctcaaaattcttaaattcagaaagtatttagtaaacttgaggaaggtatgaaatctggaggaggcatccaggacccaggggtttgatagctttacaggtaggatcataccacaccaaaagagcagtggacaataagactatatgagctatatgaagcttttaggaatcatttaggacagacagagccctaaacaacccattcatgacttaagttgttggctcagtgtatgctggggacaaagaaaaactaacaagccgacctgcctttatgataaattctagtgtgcttacaagggatgacttcctgaggtgtgatctgtccaccttgaagaactccacaactgaagaaggggagctgtgagaacgtggattgttctacaacttgcacagggtaacagaggaagtggctgaggcctagagtcacgttttccagttcccttcgcaaactatatttcttggaacgcgaaaggaagctttacctatttcatagaagacctggaatccataacctcagaaggcaatattattgatagaaaatgtggaaggatcaggaagttcttagattcttggatgacagatgcatgttgatgccctatggagatgtccttgtgttttgaggtcactgaggtaggaagacctgtctactcttggtttcaccactagaacagtcttgggctggatgggttatagagctgagcggctgtgatggttctgtttttacattaacaaaaacaattaaaaacaccaaaaacaaaaagccatgggcagacccacggtctgacattgattgaggcgcggaaataccttcacaaaggggggggccgcgagaaacaccgcggtctcactgtaatagtcccccgttgcgtgtgaaatagtcgtgccccccagatacagccacttgtagtctgtgcaagccagggggttacaaaaaggcggggggccaccccctatcagggaggggacgagttgtatctttttccgccaatgccgcggggtgaacgcgaactc

SEQ ID NO: 308887 - DNA, 5378 bp, Homo sapiens
aaatagatgtttatcattttttatatagactcattgaaaaaatgactttgtgttcttccagtacataccatcatgtctgagagggcagagatctagacaagtgtgggaaagatgactttggatcaaaattttcttgtgaatataatgtgcttatgcgtaatttaaagctgactgtattaaagatacattttttgtcaaccagatgattgttaaatacctgtgaagtatgtgtggcccggtcctatttcctcacctgtttacagtgaatcagacgtcccaatagatgtggagacggtcacatcaacgcctatgccactctatgacaatcagaaggcacgcagcgtgatgaatgagtgtgaacggcatgtcatctttgccaggactgatgcagatgcccctcctccaccagaggactgggaggagcatgtcaacaggactggctggacaatggcccagaacaagctattcaacaagatcctcaaagccctgcagtctgaccggcttgcccgcttggccaacgaaggggcttgtaatgagccagtgctgcgccgtgttgctgtggacaagtgtgcaaggagagtgcggcaggctctggcaagtgtgagctgggataccaagctgatccagtggctgcacaccacccttgtggagaccttgagtctgcccatgctggcagcctacctggatgctttgcagacgctgaaggggaagatcccaaccttgattgaccggatgcttgtgtcatccaacacaaagactggggctgcaggagctgaggccttgtctctcctactgaagaggccctgggaccctgctgtgggtgtgctttctcataacaaaccaagcaaactccctggctctccgctgattctcatcgcctcctctggtccctccagctctgtgtttcccacttcacgccgccaccgcttctggcaatctcagctgtcctgcttgggcaaggtcatccctgtagccacccatctgctgaacaatggcagtggggtaggagttctacagtgtctcgagcatatgattggggcagtgagaagcaaagtgctggagattcacagccatttcccacacaaacccattatcttgattggctggaacacaggagctttggtggcctgtcatgtgtcagtaatggagtatgtcactgcagttgtctgccttgggtttcctctgcttactgtggatggccccagaggggatgtagatgatcccctcttggatatgaagactccagtcctctttgtcattggtcagaattcccttcaatgtcaccctgaagccatggaggacttccgggagaagattcgagctgagaacagcttggtggtggttgggggagctgatgacaatctcagaataagcaaagcaaagaagaaatcagaagggttgactcagagcatggtggacagatgtattcaggatgagattgtggactttctgactggagtgctcactcgtgctgagggtcacatgggctctgaacctcgggatcaggatgctgagaagaagaagaagccccgcgatgtggcccgcagagacttggcctttgaagtccctgagcggggcagtcgacctgcctccccagctgccaagctgcccgcctcaccctcaggctcagaggatctctccagtgtgtccagcagccccacctccagtcccaagaccaaagtgaccacagtgacctctgcccagaagtccagtcagattggaagttctcagctgctgaagagacatgtgcagcggacagaagctgtgctgacccacaaacaagctcaagttcccatttcatcagaaccaccagaggaaggagagaaagaggatcttagggttcagctgaagcgacaccatccctcgagtccccttcctggcagtaagacctccaaacgaccgaagatcaaggtgtcccttatctcccaaggggacacagctggagggccttgtgctccttcccaaggaagtgctccagaagctgcaggtgggaagcccatcaccatgacactggggcaggcttcagcaggggccaaggagctcacaggacttctcaccacagccaagtccagttcttctgaaggtggagtctcagccagcccagtcccttcagtggtctccagcagcactgcacccagtgccttgcacacactgcagagccgcctggtggccacatctcctggcagctccctcccaggggccacatcagccagcagcctcctccaaggcctcagcttcagcttgcaggatatcagcagcaagacctctggccttccagcaaatccctccccaggaccagccccacaggccaccagtgtgaagttgcccacccccatgcagagcctgggtgccatcaccacgggcaccagcaccattgtccgtaccattcctgtggccaccactctctcctccttgggtgccactcctggtgggaagcccacagccatccaccagctgctgaccaatgggggcctcgctaagttggcaagcagcctccctggcctggctcagatctctaaccaagcatcaggcttgaaggtccccaccaccattactctgacacttcgtggccagccgagcaggatcactacactgagccctatgggctcaggagcagccccatccgaggagtcctcttcccaggtgctgccctccagctcacagcgcctgcctccagcaccctgaagatgctgtgtgatatgtcctccttaccaagttggtgatggctgcctcatggtgggccctggacaggtgtgtggtcctgctgagctgtccacgtgtcggaagacctgtttaagacagtcatttttgcctctccgccaactgtcttcagagaaaccattaggttaggtgatacggtgccagcaagggaagcaccatcgtccaggatctgcaaatctggttcctgggaaccccagactcctcagcagatctggctgtacatggatcagaaccacttcttcccccgcttaagctgtggtttgacccaagggtcagcatataggactgcctgctgcatttaatgaaggtgtttccttttggaagtctgtgctaccctctgcgcctagttgggaggagacatccatctggtctgggatttcgggagttagaatggaaagctctttgctaaagactggagtcatcctggcctgccaactggtggttcagagccggacgggcttgttttggacatcactgttgccttcactcagcagccacgggagagtgctccccatgcaactccaccttagaaaccacgtcagatactgagtagcttgctgactcctggaaacttctggtttttgttagtatcataatgaaggcaaagagaactaggctgtcatctttcagcctctttgacttactctagatgttgggagcagtggttgccaggtgaaacctgggccctttgtctttttcaccatgctttgggcagtttctgtatccagagagtccgcaggttcagataagctgaagaagagtaatagaacagcaaaggaagtggcttgaaggatgtgctagtaagccctgtggtttgtgcttaggtctctgctctgctacccaaggaactggtggttcagctggagataaaaagaagaatttgccaagtcagagaagaaaccccaaccccggaaaatcctctgtctccagtctctggaggtgaagcagggacaataagctaaggtagtatcttggccatcccaggaaacttgtggcattaggacgatgaaggccatgcttcagtgttttcgtttctatttcatgagactttttgtcttcctgcttacaagtgggaagatgattgacagtgactctactatgcagggctgttggtaccaacctgagccctataggtggcagtccctggagaagtggtcacagaagatggagctctgatcccctgcttacctcttcacaacacttgtgtgcaaagatagttttagatttggtttagaagctatcctccagaacaggctcccatacttagaatgtttctagttaaggtaataaattaggcaacccaagtgtgactccactcaagtgtccttttctgtaggcaggaagggcccacaacatggcttaaaatgtagtccatggttctggcccacagtacagtgtgtatctataccaggtcacctgtgttcaatctgggagccttcctggccagtctgagtggcagccagaagggagctcatagtgtctaggagtctcaggcaaggtaggtcagggtactgtgggcaggggggatgtgtgtgataggagagggtaccctaaaccccataccttccctccctgacctgaaaagctgatctcaacagggattcacacagaattaggctgtgtttttgcattagctggtaggtgactttctcaaaattcttaaattcagaaagtatttagtaaacttgaggaaggtatgaaatctggaggaggcatccaggacccaggggtttgatagctttacaggtaggatcataccacaccaaaagagcagtggacaataagactatatgagctatatgaagcttttaggaatcatttaggacagacagagccctaaacaacccattcatgacttaagttgttggctcagtgtatgctggggacaaagaaaaactaacaagccgacctgcctttatgataaattctagtgtgcttacaagggatgacttcctgaggtgtgatctgtccaccttgaagaactccacaactgaagaaggggagctgtgagaacgtggattgttctacaacttgcacagggtaacagaggaagtggctgaggcctagagtcacgttttccagttcccttcgcaaactatatttcttggaacgcgaaaggaagctttacctatttcatagaagacctggaatccataacctcagaaggcaatattattgatagaaaatgtggaaggatcaggaagttcttagattcttggatgacagatgcatgttgatgccctatggagatgtccttgtgttttgaggtcactgaggtaggaagacctgtctactcttggtttcaccactagaacagtcttgggctggatgggttatagagctgagcggctgtgatggttctgtttttacattaacaaaaacaattaaaaacaccaaaaacaaaaagccatgggcagacccacggtctgacattgattgaggcgcggaaataccttcacaaaggggggggccgcgagaaacaccgcggtctcactgtaatagtcccccgttgcgtgtgaaatagtcgtgccccccagatacagccacttgtagtctgtgcaagccagggggttacaaaaaggcggggggccaccccctatcagggaggggacgagttgtatctttttccgccaatgccgcggggtgaacgcgaactc

SEQ ID NO: 308888 - DNA, 5363 bp, Homo sapiens
cctcgtcgcgaactctggatgaccttggccaaatcgcttcagttccccgagctggcgacttcgtctgtaaaatgtgactagcatgcagatacccatgctctgactttctgcccctccactgacatggcccaccggggtggggagagggacttccagacttcagctcgacgcatgggcacctcgctgctcttccagctttcagtgcatgaacgggagctggacctggtttttctggatcatagctatgccaagccttggagtgcccacccagatgccagtagtgcccgccccacccgcatgctctttgtcactccccggcggcagcacgaaagtaccatgtgaatcagacgtcccaatagatgtggagacggtcacatcaacgcctatgccactctatgacaatcagaaggcacgcagcgtgatgaatgagtgtgaacggcatgtcatctttgccaggactgatgcagatgcccctcctccaccagaggactgggaggagcatgtcaacaggcttgtaatgagccagtgctgcgccgtgttgctgtggacaagtgtgcaaggagagtgcggcaggctctggcaagtgtgagctgggataccaagctgatccagtggctgcacaccacccttgtggagaccttgagtctgcccatgctggcagcctacctggatgctttgcagacgctgaaggggaagatcccaaccttgattgaccggatgcttgtgtcatccaacacaaagactggggctgcaggagctgaggccttgtctctcctactgaagaggccctgggaccctgctgtgggtgtgctttctcataacaaaccaagcaaactccctggctctccgctgattctcatcgcctcctctggtccctccagctctgtgtttcccacttcacgccgccaccgcttctggcaatctcagctgtcctgcttgggcaaggtcatccctgtagccacccatctgctgaacaatggcagtggggtaggagttctacagtgtctcgagcatatgattggggcagtgagaagcaaagtgctggagattcacagccatttcccacacaaacccattatcttgattggctggaacacaggagctttggtggcctgtcatgtgtcagtaatggagtatgtcactgcagttgtctgccttgggtttcctctgcttactgtggatggccccagaggggatgtagatgatcccctcttggatatgaagactccagtcctctttgtcattggtcagaattcccttcaatgtcaccctgaagccatggaggacttccgggagaagattcgagctgagaacagcttggtggtggttgggggagctgatgacaatctcagaataagcaaagcaaagaagaaatcagaagggttgactcagagcatggtggacagatgtattcaggatgagattgtggactttctgactggagtgctcactcgtgctgagggtcacatgggctctgaacctcgggatcaggatgctgagaagaagaagaagccccgcgatgtggcccgcagagacttggcctttgaagtccctgagcggggcagtcgacctgcctccccagctgccaagctgcccgcctcaccctcaggctcagaggatctctccagtgtgtccagcagccccacctccagtcccaagaccaaagtgaccacagtgacctctgcccagaagtccagtcagattggaagttctcagctgctgaagagacatgtgcagcggacagaagctgtgctgacccacaaacaagctcaagttcccatttcatcagaaccaccagaggaaggagagaaagaggatcttagggttcagctgaagcgacaccatccctcgagtccccttcctggcagtaagacctccaaacgaccgaagatcaaggtgtcccttatctcccaaggggacacagctggagggccttgtgctccttcccaaggaagtgctccagaagctgcaggtgggaagcccatcaccatgacactggggcaggcttcagcaggggccaaggagctcacaggacttctcaccacagccaagtccagttcttctgaaggtggagtctcagccagcccagtcccttcagtggtctccagcagcactgcacccagtgccttgcacacactgcagagccgcctggtggccacatctcctggcagctccctcccaggggccacatcagccagcagcctcctccaaggcctcagcttcagcttgcaggatatcagcagcaagacctctggccttccagcaaatccctccccaggaccagccccacaggccaccagtgtgaagttgcccacccccatgcagagcctgggtgccatcaccacgggcaccagcaccattgtccgtaccattcctgtggccaccactctctcctccttgggtgccactcctggtgggaagcccacagccatccaccagctgctgaccaatgggggcctcgctaagttggcaagcagcctccctggcctggctcagatctctaaccaagcatcaggcttgaaggtccccaccaccattactctgacacttcgtggccagccgagcaggatcactacactgagccctatgggctcaggagcagccccatccgaggagtcctcttcccaggtgctgccctccagctcacagcgcctgcctccagcaccctgaagatgctgtgtgatatgtcctccttaccaagttggtgatggctgcctcatggtgggccctggacaggtgtgtggtcctgctgagctgtccacgtgtcggaagacctgtttaagacagtcatttttgcctctccgccaactgtcttcagagaaaccattaggttaggtgatacggtgccagcaagggaagcaccatcgtccaggatctgcaaatctggttcctgggaaccccagactcctcagcagatctggctgtacatggatcagaaccacttcttcccccgcttaagctgtggtttgacccaagggtcagcatataggactgcctgctgcatttaatgaaggtgtttccttttggaagtctgtgctaccctctgcgcctagttgggaggagacatccatctggtctgggatttcgggagttagaatggaaagctctttgctaaagactggagtcatcctggcctgccaactggtggttcagagccggacgggcttgttttggacatcactgttgccttcactcagcagccacgggagagtgctccccatgcaactccaccttagaaaccacgtcagatactgagtagcttgctgactcctggaaacttctggtttttgttagtatcataatgaaggcaaagagaactaggctgtcatctttcagcctctttgacttactctagatgttgggagcagtggttgccaggtgaaacctgggccctttgtctttttcaccatgctttgggcagtttctgtatccagagagtccgcaggttcagataagctgaagaagagtaatagaacagcaaaggaagtggcttgaaggatgtgctagtaagccctgtggtttgtgcttaggtctctgctctgctacccaaggaactggtggttcagctggagataaaaagaagaatttgccaagtcagagaagaaaccccaaccccggaaaatcctctgtctccagtctctggaggtgaagcagggacaataagctaaggtagtatcttggccatcccaggaaacttgtggcattaggacgatgaaggccatgcttcagtgttttcgtttctatttcatgagactttttgtcttcctgcttacaagtgggaagatgattgacagtgactctactatgcagggctgttggtaccaacctgagccctataggtggcagtccctggagaagtggtcacagaagatggagctctgatcccctgcttacctcttcacaacacttgtgtgcaaagatagttttagatttggtttagaagctatcctccagaacaggctcccatacttagaatgtttctagttaaggtaataaattaggcaacccaagtgtgactccactcaagtgtccttttctgtaggcaggaagggcccacaacatggcttaaaatgtagtccatggttctggcccacagtacagtgtgtatctataccaggtcacctgtgttcaatctgggagccttcctggccagtctgagtggcagccagaagggagctcatagtgtctaggagtctcaggcaaggtaggtcagggtactgtgggcaggggggatgtgtgtgataggagagggtaccctaaaccccataccttccctccctgacctgaaaagctgatctcaacagggattcacacagaattaggctgtgtttttgcattagctggtaggtgactttctcaaaattcttaaattcagaaagtatttagtaaacttgaggaaggtatgaaatctggaggaggcatccaggacccaggggtttgatagctttacaggtaggatcataccacaccaaaagagcagtggacaataagactatatgagctatatgaagcttttaggaatcatttaggacagacagagccctaaacaacccattcatgacttaagttgttggctcagtgtatgctggggacaaagaaaaactaacaagccgacctgcctttatgataaattctagtgtgcttacaagggatgacttcctgaggtgtgatctgtccaccttgaagaactccacaactgaagaaggggagctgtgagaacgtggattgttctacaacttgcacagggtaacagaggaagtggctgaggcctagagtcacgttttccagttcccttcgcaaactatatttcttggaacgcgaaaggaagctttacctatttcatagaagacctggaatccataacctcagaaggcaatattattgatagaaaatgtggaaggatcaggaagttcttagattcttggatgacagatgcatgttgatgccctatggagatgtccttgtgttttgaggtcactgaggtaggaagacctgtctactcttggtttcaccactagaacagtcttgggctggatgggttatagagctgagcggctgtgatggttctgtttttacattaacaaaaacaattaaaaacaccaaaaacaaaaagccatgggcagacccacggtctgacattgattgaggcgcggaaataccttcacaaaggggggggccgcgagaaacaccgcggtctcactgtaatagtcccccgttgcgtgtgaaatagtcgtgccccccagatacagccacttgtagtctgtgcaagccagggggttacaaaaaggcggggggccaccccctatcagggaggggacgagttgtatctttttccgccaatgccgcggggtgaacgcgaactc

SEQ ID NO: 308889 - DNA, 5173 bp, Homo sapiens
cgtggaggcgttaacgcgcacgcgcttagggatccggccgtggccgagcgcgcggccgtaagaccgcgggtgactagcatgcagatacccatgctctgactttctgcccctccactgacatggcccaccggggtggggagagggacttccagacttcagctcgacgcatgggcacctcgctgctcttccagctttcagtgcatgaacgggagctggacctggtttttctggatcatagctatgccaagccttggagtgcccacccagatgccagtagtgcccgccccacccgcatgctctttgtcactccccggcggcagcacgaaagtaccatgtgaatcagacgtcccaatagatgtggagacggtcacatcaacgcctatgccactctatgacaatcagaaggcacgcagcgtgatgaatgagtgtgaacggcatgtcatctttgccaggactgatgcagatgcccctcctccaccagaggactgggaggagcatgtcaacagatcccaaccttgattgaccggatgcttgtgtcatccaacacaaagactggggctgcaggagctgaggccttgtctctcctactgaagaggccctgggaccctgctgtgggtgtgctttctcataacaaaccaagcaaactccctggctctccgctgattctcatcgcctcctctggtccctccagctctgtgtttcccacttcacgccgccaccgcttctggcaatctcagctgtcctgcttgggcaaggtcatccctgtagccacccatctgctgaacaatggcagtggggtaggagttctacagtgtctcgagcatatgattggggcagtgagaagcaaagtgctggagattcacagccatttcccacacaaacccattatcttgattggctggaacacaggagctttggtggcctgtcatgtgtcagtaatggagtatgtcactgcagttgtctgccttgggtttcctctgcttactgtggatggccccagaggggatgtagatgatcccctcttggatatgaagactccagtcctctttgtcattggtcagaattcccttcaatgtcaccctgaagccatggaggacttccgggagaagattcgagctgagaacagcttggtggtggttgggggagctgatgacaatctcagaataagcaaagcaaagaagaaatcagaagggttgactcagagcatggtggacagatgtattcaggatgagattgtggactttctgactggagtgctcactcgtgctgagggtcacatgggctctgaacctcgggatcaggatgctgagaagaagaagaagccccgcgatgtggcccgcagagacttggcctttgaagtccctgagcggggcagtcgacctgcctccccagctgccaagctgcccgcctcaccctcaggctcagaggatctctccagtgtgtccagcagccccacctccagtcccaagaccaaagtgaccacagtgacctctgcccagaagtccagtcagattggaagttctcagctgctgaagagacatgtgcagcggacagaagctgtgctgacccacaaacaagctcaagttcccatttcatcagaaccaccagaggaaggagagaaagaggatcttagggttcagctgaagcgacaccatccctcgagtccccttcctggcagtaagacctccaaacgaccgaagatcaaggtgtcccttatctcccaaggggacacagctggagggccttgtgctccttcccaaggaagtgctccagaagctgcaggtgggaagcccatcaccatgacactggggcaggcttcagcaggggccaaggagctcacaggacttctcaccacagccaagtccagttcttctgaaggtggagtctcagccagcccagtcccttcagtggtctccagcagcactgcacccagtgccttgcacacactgcagagccgcctggtggccacatctcctggcagctccctcccaggggccacatcagccagcagcctcctccaaggcctcagcttcagcttgcaggatatcagcagcaagacctctggccttccagcaaatccctccccaggaccagccccacaggccaccagtgtgaagttgcccacccccatgcagagcctgggtgccatcaccacgggcaccagcaccattgtccgtaccattcctgtggccaccactctctcctccttgggtgccactcctggtgggaagcccacagccatccaccagctgctgaccaatgggggcctcgctaagttggcaagcagcctccctggcctggctcagatctctaaccaagcatcaggcttgaaggtccccaccaccattactctgacacttcgtggccagccgagcaggatcactacactgagccctatgggctcaggagcagccccatccgaggagtcctcttcccaggtgctgccctccagctcacagcgcctgcctccagcaccctgaagatgctgtgtgatatgtcctccttaccaagttggtgatggctgcctcatggtgggccctggacaggtgtgtggtcctgctgagctgtccacgtgtcggaagacctgtttaagacagtcatttttgcctctccgccaactgtcttcagagaaaccattaggttaggtgatacggtgccagcaagggaagcaccatcgtccaggatctgcaaatctggttcctgggaaccccagactcctcagcagatctggctgtacatggatcagaaccacttcttcccccgcttaagctgtggtttgacccaagggtcagcatataggactgcctgctgcatttaatgaaggtgtttccttttggaagtctgtgctaccctctgcgcctagttgggaggagacatccatctggtctgggatttcgggagttagaatggaaagctctttgctaaagactggagtcatcctggcctgccaactggtggttcagagccggacgggcttgttttggacatcactgttgccttcactcagcagccacgggagagtgctccccatgcaactccaccttagaaaccacgtcagatactgagtagcttgctgactcctggaaacttctggtttttgttagtatcataatgaaggcaaagagaactaggctgtcatctttcagcctctttgacttactctagatgttgggagcagtggttgccaggtgaaacctgggccctttgtctttttcaccatgctttgggcagtttctgtatccagagagtccgcaggttcagataagctgaagaagagtaatagaacagcaaaggaagtggcttgaaggatgtgctagtaagccctgtggtttgtgcttaggtctctgctctgctacccaaggaactggtggttcagctggagataaaaagaagaatttgccaagtcagagaagaaaccccaaccccggaaaatcctctgtctccagtctctggaggtgaagcagggacaataagctaaggtagtatcttggccatcccaggaaacttgtggcattaggacgatgaaggccatgcttcagtgttttcgtttctatttcatgagactttttgtcttcctgcttacaagtgggaagatgattgacagtgactctactatgcagggctgttggtaccaacctgagccctataggtggcagtccctggagaagtggtcacagaagatggagctctgatcccctgcttacctcttcacaacacttgtgtgcaaagatagttttagatttggtttagaagctatcctccagaacaggctcccatacttagaatgtttctagttaaggtaataaattaggcaacccaagtgtgactccactcaagtgtccttttctgtaggcaggaagggcccacaacatggcttaaaatgtagtccatggttctggcccacagtacagtgtgtatctataccaggtcacctgtgttcaatctgggagccttcctggccagtctgagtggcagccagaagggagctcatagtgtctaggagtctcaggcaaggtaggtcagggtactgtgggcaggggggatgtgtgtgataggagagggtaccctaaaccccataccttccctccctgacctgaaaagctgatctcaacagggattcacacagaattaggctgtgtttttgcattagctggtaggtgactttctcaaaattcttaaattcagaaagtatttagtaaacttgaggaaggtatgaaatctggaggaggcatccaggacccaggggtttgatagctttacaggtaggatcataccacaccaaaagagcagtggacaataagactatatgagctatatgaagcttttaggaatcatttaggacagacagagccctaaacaacccattcatgacttaagttgttggctcagtgtatgctggggacaaagaaaaactaacaagccgacctgcctttatgataaattctagtgtgcttacaagggatgacttcctgaggtgtgatctgtccaccttgaagaactccacaactgaagaaggggagctgtgagaacgtggattgttctacaacttgcacagggtaacagaggaagtggctgaggcctagagtcacgttttccagttcccttcgcaaactatatttcttggaacgcgaaaggaagctttacctatttcatagaagacctggaatccataacctcagaaggcaatattattgatagaaaatgtggaaggatcaggaagttcttagattcttggatgacagatgcatgttgatgccctatggagatgtccttgtgttttgaggtcactgaggtaggaagacctgtctactcttggtttcaccactagaacagtcttgggctggatgggttatagagctgagcggctgtgatggttctgtttttacattaacaaaaacaattaaaaacaccaaaaacaaaaagccatgggcagacccacggtctgacattgattgaggcgcggaaataccttcacaaaggggggggccgcgagaaacaccgcggtctcactgtaatagtcccccgttgcgtgtgaaatagtcgtgccccccagatacagccacttgtagtctgtgcaagccagggggttacaaaaaggcggggggccaccccctatcagggaggggacgagttgtatctttttccgccaatgccgcggggtgaacgcgaactc

SEQ ID NO: 308890 - DNA, 3492 bp, Homo sapiens
gctagtagagccgggatcaaatcggacgaggcttatctcccaaggggacacagctggagggccttgtgctccttcccaaggaagtgctccagaagctgcaggtgggaagcccatcaccatgacactggggcaggcttcagcaggggccaaggagctcacaggacttctcaccacagccaagtccagttcttctgaaggtggagtctcagccagcccagtcccttcagtggtctccagcagcactgcacccagtgccttgcacacactgcagagccgcctggtggccacatctcctggcagctccctcccaggggccacatcagccagcagcctcctccaaggcctcagcttcagcttgcaggatatcagcagcaagacctctggccttccagcaaatccctccccaggaccagccccacaggccaccagtgtgaagttgcccacccccatgcagagcctgggtgccatcaccacgggcaccagcaccattgtccgtaccattcctgtggccaccactctctcctccttgggtgccactcctggtgggaagcccacagccatccaccagctgctgaccaatgggggcctcgctaagttggcaagcagcctccctggcctggctcagatctctaaccaagcatcaggcttgaaggtccccaccaccattactctgacacttcgtggccagccgagcaggatcactacactgagccctatgggctcaggagcagccccatccgaggagtcctcttcccaggtgctgccctccagctcacagcgcctgcctccagcaccctgaagatgctgtgtgatatgtcctccttaccaagttggtgatggctgcctcatggtgggccctggacaggtgtgtggtcctgctgagctgtccacgtgtcggaagacctgtttaagacagtcatttttgcctctccgccaactgtcttcagagaaaccattaggttaggtgatacggtgccagcaagggaagcaccatcgtccaggatctgcaaatctggttcctgggaaccccagactcctcagcagatctggctgtacatggatcagaaccacttcttcccccgcttaagctgtggtttgacccaagggtcagcatataggactgcctgctgcatttaatgaaggtgtttccttttggaagtctgtgctaccctctgcgcctagttgggaggagacatccatctggtctgggatttcgggagttagaatggaaagctctttgctaaagactggagtcatcctggcctgccaactggtggttcagagccggacgggcttgttttggacatcactgttgccttcactcagcagccacgggagagtgctccccatgcaactccaccttagaaaccacgtcagatactgagtagcttgctgactcctggaaacttctggtttttgttagtatcataatgaaggcaaagagaactaggctgtcatctttcagcctctttgacttactctagatgttgggagcagtggttgccaggtgaaacctgggccctttgtctttttcaccatgctttgggcagtttctgtatccagagagtccgcaggttcagataagctgaagaagagtaatagaacagcaaaggaagtggcttgaaggatgtgctagtaagccctgtggtttgtgcttaggtctctgctctgctacccaaggaactggtggttcagctggagataaaaagaagaatttgccaagtcagagaagaaaccccaaccccggaaaatcctctgtctccagtctctggaggtgaagcagggacaataagctaaggtagtatcttggccatcccaggaaacttgtggcattaggacgatgaaggccatgcttcagtgttttcgtttctatttcatgagactttttgtcttcctgcttacaagtgggaagatgattgacagtgactctactatgcagggctgttggtaccaacctgagccctataggtggcagtccctggagaagtggtcacagaagatggagctctgatcccctgcttacctcttcacaacacttgtgtgcaaagatagttttagatttggtttagaagctatcctccagaacaggctcccatacttagaatgtttctagttaaggtaataaattaggcaacccaagtgtgactccactcaagtgtccttttctgtaggcaggaagggcccacaacatggcttaaaatgtagtccatggttctggcccacagtacagtgtgtatctataccaggtcacctgtgttcaatctgggagccttcctggccagtctgagtggcagccagaagggagctcatagtgtctaggagtctcaggcaaggtaggtcagggtactgtgggcaggggggatgtgtgtgataggagagggtaccctaaaccccataccttccctccctgacctgaaaagctgatctcaacagggattcacacagaattaggctgtgtttttgcattagctggtaggtgactttctcaaaattcttaaattcagaaagtatttagtaaacttgaggaaggtatgaaatctggaggaggcatccaggacccaggggtttgatagctttacaggtaggatcataccacaccaaaagagcagtggacaataagactatatgagctatatgaagcttttaggaatcatttaggacagacagagccctaaacaacccattcatgacttaagttgttggctcagtgtatgctggggacaaagaaaaactaacaagccgacctgcctttatgataaattctagtgtgcttacaagggatgacttcctgaggtgtgatctgtccaccttgaagaactccacaactgaagaaggggagctgtgagaacgtggattgttctacaacttgcacagggtaacagaggaagtggctgaggcctagagtcacgttttccagttcccttcgcaaactatatttcttggaacgcgaaaggaagctttacctatttcatagaagacctggaatccataacctcagaaggcaatattattgatagaaaatgtggaaggatcaggaagttcttagattcttggatgacagatgcatgttgatgccctatggagatgtccttgtgttttgaggtcactgaggtaggaagacctgtctactcttggtttcaccactagaacagtcttgggctggatgggttatagagctgagcggctgtgatggttctgtttttacattaacaaaaacaattaaaaacaccaaaaacaaaaagccatgggcagacccacggtctgacattgattgaggcgcggaaataccttcacaaaggggggggccgcgagaaacaccgcggtctcactgtaatagtcccccgttgcgtgtgaaatagtcgtgccccccagatacagccacttgtagtctgtgcaagccagggggttacaaaaaggcggggggccaccccctatcagggaggggacgagttgtatctttttccgccaatgccgcggggtgaacgcgaactc

SEQ ID NO: 308891 - DNA, 3385 bp, Homo sapiens
ggacggtgggtcgacccacgcgtcgggcttcagcaggggccaaggagctcacaggacttctcaccacagccaagtccagttcttctgaaggtggagtctcagccagcccagtcccttcagtggtctccagcagcactgcacccagtgccttgcacacactgcagagccgcctggtggccacatctcctggcagctccctcccaggggccacatcagccagcagcctcctccaaggcctcagcttcagcttgcaggatatcagcagcaagacctctggccttccagcaaatccctccccaggaccagccccacaggccaccagtgtgaagttgcccacccccatgcagagcctgggtgccatcaccacgggcaccagcaccattgtccgtaccattcctgtggccaccactctctcctccttgggtgccactcctggtgggaagcccacagccatccaccagctgctgaccaatgggggcctcgctaagttggcaagcagcctccctggcctggctcagatctctaaccaagcatcaggcttgaaggtccccaccaccattactctgacacttcgtggccagccgagcaggatcactacactgagccctatgggctcaggagcagccccatccgaggagtcctcttcccaggtgctgccctccagctcacagcgcctgcctccagcaccctgaagatgctgtgtgatatgtcctccttaccaagttggtgatggctgcctcatggtgggccctggacaggtgtgtggtcctgctgagctgtccacgtgtcggaagacctgtttaagacagtcatttttgcctctccgccaactgtcttcagagaaaccattaggttaggtgatacggtgccagcaagggaagcaccatcgtccaggatctgcaaatctggttcctgggaaccccagactcctcagcagatctggctgtacatggatcagaaccacttcttcccccgcttaagctgtggtttgacccaagggtcagcatataggactgcctgctgcatttaatgaaggtgtttccttttggaagtctgtgctaccctctgcgcctagttgggaggagacatccatctggtctgggatttcgggagttagaatggaaagctctttgctaaagactggagtcatcctggcctgccaactggtggttcagagccggacgggcttgttttggacatcactgttgccttcactcagcagccacgggagagtgctccccatgcaactccaccttagaaaccacgtcagatactgagtagcttgctgactcctggaaacttctggtttttgttagtatcataatgaaggcaaagagaactaggctgtcatctttcagcctctttgacttactctagatgttgggagcagtggttgccaggtgaaacctgggccctttgtctttttcaccatgctttgggcagtttctgtatccagagagtccgcaggttcagataagctgaagaagagtaatagaacagcaaaggaagtggcttgaaggatgtgctagtaagccctgtggtttgtgcttaggtctctgctctgctacccaaggaactggtggttcagctggagataaaaagaagaatttgccaagtcagagaagaaaccccaaccccggaaaatcctctgtctccagtctctggaggtgaagcagggacaataagctaaggtagtatcttggccatcccaggaaacttgtggcattaggacgatgaaggccatgcttcagtgttttcgtttctatttcatgagactttttgtcttcctgcttacaagtgggaagatgattgacagtgactctactatgcagggctgttggtaccaacctgagccctataggtggcagtccctggagaagtggtcacagaagatggagctctgatcccctgcttacctcttcacaacacttgtgtgcaaagatagttttagatttggtttagaagctatcctccagaacaggctcccatacttagaatgtttctagttaaggtaataaattaggcaacccaagtgtgactccactcaagtgtccttttctgtaggcaggaagggcccacaacatggcttaaaatgtagtccatggttctggcccacagtacagtgtgtatctataccaggtcacctgtgttcaatctgggagccttcctggccagtctgagtggcagccagaagggagctcatagtgtctaggagtctcaggcaaggtaggtcagggtactgtgggcaggggggatgtgtgtgataggagagggtaccctaaaccccataccttccctccctgacctgaaaagctgatctcaacagggattcacacagaattaggctgtgtttttgcattagctggtaggtgactttctcaaaattcttaaattcagaaagtatttagtaaacttgaggaaggtatgaaatctggaggaggcatccaggacccaggggtttgatagctttacaggtaggatcataccacaccaaaagagcagtggacaataagactatatgagctatatgaagcttttaggaatcatttaggacagacagagccctaaacaacccattcatgacttaagttgttggctcagtgtatgctggggacaaagaaaaactaacaagccgacctgcctttatgataaattctagtgtgcttacaagggatgacttcctgaggtgtgatctgtccaccttgaagaactccacaactgaagaaggggagctgtgagaacgtggattgttctacaacttgcacagggtaacagaggaagtggctgaggcctagagtcacgttttccagttcccttcgcaaactatatttcttggaacgcgaaaggaagctttacctatttcatagaagacctggaatccataacctcagaaggcaatattattgatagaaaatgtggaaggatcaggaagttcttagattcttggatgacagatgcatgttgatgccctatggagatgtccttgtgttttgaggtcactgaggtaggaagacctgtctactcttggtttcaccactagaacagtcttgggctggatgggttatagagctgagcggctgtgatggttctgtttttacattaacaaaaacaattaaaaacaccaaaaacaaaaagccatgggcagacccacggtctgacattgattgaggcgcggaaataccttcacaaaggggggggccgcgagaaacaccgcggtctcactgtaatagtcccccgttgcgtgtgaaatagtcgtgccccccagatacagccacttgtagtctgtgcaagccagggggttacaaaaaggcggggggccaccccctatcagggaggggacgagttgtatctttttccgccaatgccgcggggtgaacgcgaactc

SEQ ID NO: 308892 - DNA, 5517 bp, Homo sapiens
  misc_feature (3389)..(3389): n is a, c, g, or t
cgtggaggcgttaacgcgcacgcgcttagggatccggccgtggccgagcgcgcggccgtaagaccgcgggtgactagcatgcagatacccatgctctgactttctgcccctccactgacatggcccaccggggtggggagagggacttccagacttcagctcgacgcatgggcacctcgctgctcttccagctttcagtgcatgaacgggagctggacctggtttttctggatcatagctatgccaagccttggagtgcccacccagatgccagtagtgcccgccccacccgcatgctctttgtcactccccggcggcagcacgaaagtaccatgctctgtacaaaatgagctaagtagctaaggtgaatcagacgtcccaatagatgtggagacggtcacatcaacgcctatgccactctatgacaatcagaaggcacgcagcgtgatgaatgagtgtgaacggcatgtcatctttgccaggactgatgcagatgcccctcctccaccagaggactgggaggagcatgtcaacaggactggctggacaatggcccagaacaagctattcaacaagatcctcaaagccctgcagtctgaccggcttgcccgcttggccaacgaaggggcttgtaatgagccagtgctgcgccgtgttgctgtggacaagtgtgcaaggagagtgcggcaggctctggcaagtgtgagctgggataccaagctgatccagtggctgcacaccacccttgtggagaccttgagtctgcccatgctggcagcctacctggatgctttgcagacgctgaaggggaagatcccaaccttgattgaccggatgcttgtgtcatccaacacaaagactggggctgcaggagctgaggccttgtctctcctactgaagaggccctgggaccctgctgtgggtgtgctttctcataacaaaccaagcaaactccctggctctccgctgattctcatcgcctcctctggtccctccagctctgtgtttcccacttcacgccgccaccgcttctggcaatctcagctgtcctgcttgggcaaggtcatccctgtagccacccatctgctgaacaatggcagtggggtaggagttctacagtgtctcgagcatatgattggggcagtgagaagcaaagtgctggagattcacagccatttcccacacaaacccattatcttgattggctggaacacaggagctttggtggcctgtcatgtgtcagtaatggagtatgtcactgcagttgtctgccttgggtttcctctgcttactgtggatggccccagaggggatgtagatgatcccctcttggatatgaagactccagtcctctttgtcattggtcagaattcccttcaatgtcaccctgaagccatggaggacttccgggagaagattcgagctgagaacagcttggtggtggttgggggagctgatgacaatctcagaataagcaaagcaaagaagaaatcagaagggttgactcagagcatggtggacagatgtattcaggatgagattgtggactttctgactggagtgctcactcgtgctgagggtcacatgggctctgaacctcgggatcaggatgctgagaagaagaagaagccccgcgatgtggcccgcagagacttggcctttgaagtccctgagcggggcagtcgacctgcctccccagctgccaagctgcccgcctcaccctcaggctcagaggatctctccagtgtgtccagcagccccacctccagtcccaagaccaaagtgaccacagtgacctctgcccagaagtccagtcagattggaagttctcagctgctgaagagacatgtgcagcggacagaagctgtgctgacccacaaacaagctcaagttcccatttcatcagaaccaccagaggaaggagagaaagaggatcttagggttcagctgaagcgacaccatccctcgagtccccttcctggcagtaagacctccaaacgaccgaagatcaaggtgtcccttatctcccaaggggacacagctggagggccttgtgctccttcccaaggaagtgctccagaagctgcaggtgggaagcccatcaccatgacactggggcaggcttcagcaggggccaaggagctcacaggacttctcaccacagccaagtccagttcttctgaaggtggagtctcagccagcccagtcccttcagtggtctccagcagcactgcacccagtgccttgcacacactgcagagccgcctggtggccacatctcctggcagctccctcccaggggccacatcagccagcagcctcctccaaggcctcagcttcagcttgcaggatatcagcagcaagacctctggccttccagcaaatccctccccaggaccagccccacaggccaccagtgtgaagttgcccacccccatgcagagcctgggtgccatcaccacgggcaccagcaccattgtccgtaccattcctgtggccaccactctctcctccttgggtgccactcctggtgggaagcccacagccatccaccagctgctgaccaatgggggcctcgctaagttggcaagcagcctccctggcctggctcagatctctaaccaagcatcaggcttgaaggtccccaccaccattactctgacacttcgtggccagccgagcaggatcactacactgagccctatgggctcaggagcagccccatccgaggagtcctcttcccaggtgctgccctccagctcacagcgcctgcctccagcaccctgaagatgctgtgtgatatgtcctccttaccaagttggtgatggctgcctcatggtgggccctggacaggtgtgtggtcctgctgagctgtccacgtgtcggaagacctgtttaagacagtcatttttgcctctccgccaactgtcttcagagaaaccattaggttaggtgatacggtgccagcaagggaagcaccatcgtccaggatctgcaaatctggttcctgggaaccccagactcctcagcagatctggctgtacatggatcagaaccacttcttcccccgcttaagctgtggtttgacccaagggtcagcatataggactgcctgctgcatttaatgaaggtgtttccttttggaagtctgtgctaccctctgcgcctagttgggaggagacatccatctggtctgggatttcgggagttagaatggaaagctctttgctaaagactggagtcatcctggcctgccaactggtggttcagagccggacgggcttgttttggacatcactgttgccttcactcagcagccacgggagagtgctccccatgcaactccaccttaggaaaaaccagcgttccagggaaattaaccgttgggncaggtttaaggccccttttggccctttggaaactcctggaaacttctggtttttgttagtatcataatgaaggcaaagagaactaggctgtcatctttcagcctctttgacttactctagatgttgggagcagtggttgccaggtgaaacctgggccctttgtctttttcaccatgctttgggcagtttctgtatccagagagtccgcaggttcagataagctgaagaagagtaatagaacagcaaaggaagtggcttgaaggatgtgctagtaagccctgtggtttgtgcttaggtctctgctctgctacccaaggaactggtggttcagctggagataaaaagaagaatttgccaagtcagagaagaaaccccaaccccggaaaatcctctgtctccagtctctggaggtgaagcagggacaataagctaaggtagtatcttggccatcccaggaaacttgtggcattaggacgatgaaggccatgcttcagtgttttcgtttctatttcatgagactttttgtcttcctgcttacaagtgggaagatgattgacagtgactctactatgcagggctgttggtaccaacctgagccctataggtggcagtccctggagaagtggtcacagaagatggagctctgatcccctgcttacctcttcacaacacttgtgtgcaaagatagttttagatttggtttagaagctatcctccagaacaggctcccatacttagaatgtttctagttaaggtaataaattaggcaacccaagtgtgactccactcaagtgtccttttctgtaggcaggaagggcccacaacatggcttaaaatgtagtccatggttctggcccacagtacagtgtgtatctataccaggtcacctgtgttcaatctgggagccttcctggccagtctgagtggcagccagaagggagctcatagtgtctaggagtctcaggcaaggtaggtcagggtactgtgggcaggggggatgtgtgtgataggagagggtaccctaaaccccataccttccctccctgacctgaaaagctgatctcaacagggattcacacagaattaggctgtgtttttgcattagctggtaggtgactttctcaaaattcttaaattcagaaagtatttagtaaacttgaggaaggtatgaaatctggaggaggcatccaggacccaggggtttgatagctttacaggtaggatcataccacaccaaaagagcagtggacaataagactatatgagctatatgaagcttttaggaatcatttaggacagacagagccctaaacaacccattcatgacttaagttgttggctcagtgtatgctggggacaaagaaaaactaacaagccgacctgcctttatgataaattctagtgtgcttacaagggatgacttcctgaggtgtgatctgtccaccttgaagaactccacaactgaagaaggggagctgtgagaacgtggattgttctacaacttgcacagggtaacagaggaagtggctgaggcctagagtcacgttttccagttcccttcgcaaactatatttcttggaacgcgaaaggaagctttacctatttcatagaagacctggaatccataacctcagaaggcaatattattgatagaaaatgtggaaggatcaggaagttcttagattcttggatgacagatgcatgttgatgccctatggagatgtccttgtgttttgaggtcactgaggtaggaagacctgtctactcttggtttcaccactagaacagtcttgggctggatgggttatagagctgagcggctgtgatggttctgtttttacattaacaaaaacaattaaaaacaccaaaaacaaaaagccatgggcagacccacggtctgacattgattgaggcgcggaaataccttcacaaaggggggggccgcgagaaacaccgcggtctcactgtaatagtcccccgttgcgtgtgaaatagtcgtgccccccagatacagccacttgtagtctgtgcaagccagggggttacaaaaaggcggggggccaccccctatcagggaggggacgagttgtatctttttccgccaatgccgcggggtgaacgcgaactc

SEQ ID NO: 308893 - DNA, 5271 bp, Homo sapiens
cgtggaggcgttaacgcgcacgcgcttagggatccggccgtggccgagcgcgcggccgtaagaccgcgggtgactagcatgcagatacccatgctctgactttctgcccctccactgacatggcccaccggggtggggagagggacttccagacttcagctcgacgcatgggcacctcgctgctcttccagctttcagtgcatgaacgggagctggacctggtttttctggatcatagctatgccaagccttggagtgcccacccagatgccagtagtgcccgccccacccgcatgctctttgtcactccccggcggcagcacgaaagtaccatgctctgtacaaaatgagctaagtagctaaggtgaatcagacgtcccaatagatgtggagacggtcacatcaacgcctatgccactctatgacaatcagaaggcacgcagcgtgatgaatgagtgtgaacggcatgtcatctttgccaggactgatgcagatgcccctcctccaccagaggactgggaggagcatgtcaacaggactggctggacaatggcccagaacaagctattcaacaagatcctcaaagccctgcagtctgaccggcttgcccgcttggccaacgaaggggcttgtaatgagccagtgctgcgccgtgttgctgtggacaagtgtgcaaggagagtgcggcaggctctggcaagtgtgagctgggataccaagctgatccagtggctgcacaccacccttgtggagaccttgagtctgcccatgctggcagcctacctggatgctttgcagacgctgaaggggaagatcccaaccttgattgaccggatgcttgtgtcatccaacacaaagactggggctgcaggagctgaggccttgtctctcctactgaagaggccctgggaccctgctgtgggtgtgctttctcataacaaaccaagcaaactccctggctctccgctgattctcatcgcctcctctggtccctccagctctgtgtttcccacttcacgccgccaccgcttctggcaatctcagctgtcctgcttgggcaaggtcatccctgtagccacccatctgctgaacaatggcagtggggtaggagttctacagtgtctcgagcatatgattggggcagtgagaagcaaagtgctggagattcacagccatttcccacacaaacccattatcttgattggctggaacacaggagctttggtggcctgtcatgtgtcagtaatggagtatgtcactgcagttgtctgccttgggtttcctctgcttactgtggatggccccagaggggatgtagatgatcccctcttggatatgaagactccagtcctctttgtcattggtcagaattcccttcaatgtcaccctgaagccatggaggacttccgggagaagattcgagctgagaacagcttggtggtggttgggggagctgatgacaatctcagaataagcaaagcaaagaagaaatcagaagggttgactcagagcatggtggacagatgtattcaggatgagattgtggactttctgactggagtgctcactcgtgctgagggtcacatgggctctgaacctcgggatcaggatgctgagaagaagaagaagccccgcgatgtggcccgcagagacttggcctttgaagtccctgagcggggcagtcgacctgcctccccagctgccaagctgcccgcctcaccctcaggctcagaggatctctccagtgtgtccagcagccccacctccagtcccaagaccaaagtgaccacagtgacctctgcccagaagtccagtcagattggaagttctcagctgctgaagagacatgtgcagcggacagaagctgtgctgacccacaaacaagctcaagttcccatttcatcagaaccaccagaggaaggagagaaagaggatcttagggttcagctgaagcgacaccatccctcgagtccccttcctggcagtaagacctccaaacgaccgaagatcaaggtgtcccttatctcccaaggggacacagctggagggccttgtgctccttcccaaggaagtgctccagaagctgcaggtgggaagcccatcaccatgacactggggcaggcttcagcaggggccaaggagctcacaggacttctcaccacagccaagtccagttcttctgaaggtggagtctcagccagcccagtcccttcagtggtctccagcagcactgcacccagtgccttgcacacactgcagagccgcctggtggccacatctcctggcagctccctcccaggggccacatcagccagcagcctcctccaaggcctcagcttcagcttgcaggatatcagcagcaagacctctggccttccagcaaatccctccccaggaccagccccacaggccaccagtgtgaagttgcccacccccatgcagagcctgggtgccatcaccacgggcaccagcaccattgtccgtaccattcctgtggccaccactctctcctccttgggtgccactcctggtgggaagcccacagccatccaccagctgctgaccaatgggggcctcgctaagttggcaagcagcctccctggcctggctcagatctctaaccaagcatcaggcttgaaggtccccaccaccattactctgacacttcgtggccagccgagcaggatcactacactgagccctatgggctcaggagcagccccatccgaggagtcctcttcccaggtgctgccctccagctcacagcgcctgcctccagcaccctgaagatgctgtgtgatatgtcctccttaccaagttggtgatggctgcctcatggtgggccctggacaggtgtgtggtcctgctgagctgtccacgtgtcggaagacctgtttaagacagtcatttttgcctctccgccaactgtcttcagagaaaccattaggttaggtgatacggtgccagcaagggaagcaccatcgtccaggatctgcaaatctggttcctgggaaccccagactcctcagcagatctggctgtacatggatcagaaccacttcttcccccgcttaagctgtggtttgacccaagggtcagcatataggactgcctgctgcatttaatgaaggtgtttccttttggaagtctgtgctaccctctgcgcctagttgggaggagacatccatctggtctgggatttcgggagttagaatggaaagctctttgctaaagactggagtcatcctggcctgccaactggtggttcagagccggacgggcttgttttggacatcactgttgccttcactcagcagccacgggagagtgctccccatgcaactccaccttagaaaccacgtcagatactgagtagcttgctgactcctggaaacttctggtttttgttagtatcataatgaaggcaaagagaactaggctgtcatctttcagcctctttgacttactctagatgttgggagcagtggttgccaggtgaaacctgggccctttgtctttttcaccatgctttgggcagtttctgtatccagagagtccgcaggttcagataagctgaagaagagtaatagaacagcaaaggaagtggcttgaaggatgtgctagtaagccctgtggtttgtgcttaggtctctgctctgctacccaaggaactggtggttcagctggagataaaaagaagaatttgccaagtcagagaagaaaccccaaccccggaaaatcctctgtctccagtctctggaggtgaagcagggacaataagctaaggtagtatcttggccatcccaggaaacttgtggcattaggacgatgaaggccatgcttcagtgttttcgtttctatttcatgagactttttgtcttcctgcttacaagtgggaagatgattgacagtgactctactatgcagggctgttggtaccaacctgagccctataggtggcagtccctggagaagtggtcacagaagatggagctctgatcccctgcttacctcttcacaacacttgtgtgcaaagatagttttagatttggtttagaagctatcctccagaacaggctcccatacttagaatgtttctagttaaggtaataaattaggcaacccaagtgtgactccactcaagtgtccttttctgtaggcaggaagggcccacaacatggcttaaaatgtagtccatggttctggcccacagtacagtgtgtatctataccaggtcacctgtgttcaatctgggagccttcctggccagtctgagtggcagccagaagggagctcatagtgtctaggagtctcaggcaaggtaggtcagggtactgtgggcaggggggatgtgtgtgataggagagggtaccctaaaccccataccttccctccctgacctgaaaagctgatctcaacagggattcacacagaattaggctgtgtttttgcattagctggtaggtgactttctcaaaattcttaaattcagaaagtatttagtaaacttgaggaaggtatgaaatctggaggaggcatccaggacccaggggtttgatagctttacaggtaggatcataccacaccaaaagagcagtggacaataagactatatgagctatatgaagcttttaggaatcatttaggacagacagagccctaaacaacccattcatgacttaagttgttggctcagtgtatgctggggacaaagaaaaactaacaagccgacctgcctttatgataaattctagtgtgcttacaagggatgacttcctgaggtgtgatctgtccaccttgaagaactccacaactgaagaaggggagctgtgagaacgtggattgttctacaacttgcacagggtaaccccgagtctaataaaacgtataatcacaaaaaaaaaaaaaaaaaaaaaaaaaaaaaaaaaaaaaaaatacaaaaaaaaaaaaaaaaaaaaaaaaagcaaaaaaaaaaaaaaaaaacaccaccacagaagggcggccataaacatctccctgtcccacaccaccacagaacacgcggctggcaaaaaacaagaaacggcgtccacaggacgctgccataatcaaactatgcagcggaggacgccaattacccgaaaggcccctctgcgacgaacaacccaccacggggacatcgcccgagcccccaccccggcgacgaacacaagcggagcaaccacccacgaacagcccaccgacggcacaaaaccaccgtcgttggaaaacgagcagagcggcgaccatccg

SEQ ID NO: 308894 - DNA, 1275 bp, Homo sapiens
tgcttagtcgaggccgggcgtgaatcggccgaggctgtgttcaatctgggagccttcctggccagtctgagtggcagccagaagggagctcatagtgtctaggagtctcaggcaaggtaggtcagggtactgtgggcaggggggatgtgtgtgataggagagggtaccctaaaccccataccttccctccctgacctgaaaagctgatctcaacagggattcacacagaattaggctgtgtttttgcattagctggtaggtgactttctcaaaattcttaaattcagaaagtatttagtaaacttgaggaaggtatgaaatctggaggaggcatccaggacccaggggtttgatagctttacaggtaggatcataccacaccaaaagagcagtggacaataagactatatgagctatatgaagcttttaggaatcatttaggacagacagagccctaaacaacccattcatgacttaagttgttggctcagtgtatgctggggacaaagaaaaactaacaagccgacctgcctttatgataaattctagtgtgcttacaagggatgacttcctgaggtgtgatctgtccaccttgaagaactccacaactgaagaaggggagctgtgagaacgtggattgttctacaacttgcacagggtaacagaggaagtggctgaggcctagagtcacgttttccagttcccttcgcaaactatatttcttggaacgcgaaaggaagctttacctatttcatagaagacctggaatccataacctcagaaggcaatattattgatagaaaatgtggaaggatcaggaagttcttagattcttggatgacagatgcatgttgatgccctatggagatgtccttgtgttttgaggtcactgaggtaggaagacctgtctactcttggtttcaccactagaacagtcttgggctggatgggttatagagctgagcggctgtgatggttctgtttttacattaacaaaaacaattaaaaacaccaaaaacaaaaagccatgggcagacccacggtctgacattgattgaggcgcggaaataccttcacaaaggggggggccgcgagaaacaccgcggtctcactgtaatagtcccccgttgcgtgtgaaatagtcgtgccccccagatacagccacttgtagtctgtgcaagccagggggttacaaaaaggcggggggccaccccctatcagggaggggacgagttgtatctttttccgccaatgccgcggggtgaacgcgaactc

SEQ ID NO: 308895 - DNA, 858 bp, Homo sapiens
agcccggctccaattccattccagcgtacacagagccctaaacaacccattcatgacttaagttgttggctcagtgtatgctggggacaaagaaaaactaacaagccgacctgcctttatgataaattctagtgtgcttacaagggatgacttcctgaggtgtgatctgtccaccttgaagaactccacaactgaagaaggggagctgtgagaacgtggattgttctacaacttgcacagggtaacagaggaagtggctgaggcctagagtcacgttttccagttcccttcgcaaactatatttcttggaacgcgaaaggaagctttacctatttcatagaagacctggaatccataacctcagaaggcaatattattgatagaaaatgtggaaggatcaggaagttcttagattcttggatgacagatgcatgttgatgccctatggagatgtccttgtgttttgaggtcactgaggtaggaagacctgtctactcttggtttcaccactagaacagtcttgggctggatgggttatagagctgagcggctgtgatggttctgtttttacattaacaaaaacaattaaaaacaccaaaaacaaaaagccatgggcagacccacggtctgacattgattgaggcgcggaaataccttcacaaaggggggggccgcgagaaacaccgcggtctcactgtaatagtcccccgttgcgtgtgaaatagtcgtgccccccagatacagccacttgtagtctgtgcaagccagggggttacaaaaaggcggggggccaccccctatcagggaggggacgagttgtatctttttccgccaatgccgcggggtgaacgcgaactc

SEQ ID NO: 308896 - DNA, 801 bp, Homo sapiens
gtctgtggtcacgtggtctgtctgtgtgacaacgatcgatgaatgggaccgacctgcctttatgataaattctagtgtgcttacaagggatgacttcctgaggtgtgatctgtccaccttgaagaactccacaactgaagaaggggagctgtgagaacgtggattgttctacaacttgcacagggtaacagaggaagtggctgaggcctagagtcacgttttccagttcccttcgcaaactatatttcttggaacgcgaaaggaagctttacctatttcatagaagacctggaatccataacctcagaaggcaatattattgatagaaaatgtggaaggatcaggaagttcttagattcttggatgacagatgcatgttgatgccctatggagatgtccttgtgttttgaggtcactgaggtaggaagacctgtctactcttggtttcaccactagaacagtcttgggctggatgggttatagagctgagcggctgtgatggttctgtttttacattaacaaaaacaattaaaaacaccaaaaacaaaaagccatgggcagacccacggtctgacattgattgaggcgcggaaataccttcacaaaggggggggccgcgagaaacaccgcggtctcactgtaatagtcccccgttgcgtgtgaaatagtcgtgccccccagatacagccacttgtagtctgtgcaagccagggggttacaaaaaggcggggggccaccccctatcagggaggggacgagttgtatctttttccgccaatgccgcggggtgaacgcgaactc

SEQ ID NO: 308897 - DNA, 5132 bp, Homo sapiens
cgtggaggcgttaacgcgcacgcgcttagggatccggccgtggccgagcgcgcggccgtaagaccgcgggtgactagcatgcagatacccatgctctgactttctgcccctccactgacatggcccaccggggtggggagagggacttccagacttcagctcgacgcatgggcacctcgctgctcttccagctttcagtgcatgaacgggagctggacctggtttttctggatcatagctatgccaagccttggagtgcccacccagatgccagtagtgcccgccccacccgcatgctctttgtcactccccggcggcagcacgaaagtaccatgctctgtacaaaatgagctaagtagctaaggtgaatcagacgtcccaatagatgtggagacggtcacatcaacgcctatgccactctatgacaatcagaaggcacgcagcgtgatgaatgagtgtgaacggcatgtcatctttgccaggactgatgcagatgcccctcctccaccagaggactgggaggagcatgtcaacaggactggctggacaatggcccagaacaagctattcaacaagatcctcaaagccctgcagtctgaccggcttgcccgcttggccaacgaaggggcttgtaatgagccagtgctgcgccgtgttgctgtggacaagtgtgcaaggagagtgcggcaggctctggcaagtgtgagctgggataccaagctgatccagtggctgcacaccacccttgtggagaccttgagtctgcccatgctggcagcctacctggatgctttgcagacgctgaaggggaagatcccaaccttgattgaccggatgcttgtgtcatccaacacaaagactggggctgcaggagctgaggccttgtctctcctactgaagaggccctgggaccctgctgtgggtgtgctttctcataacaaaccaagcaaactccctggctctccgctgattctcatcgcctcctctggtccctccagctctgtgtttcccacttcacgccgccaccgcttctggcaatctcagctgtcctgcttgggcaaggtcatccctgtagccacccatctgctgaacaatggcagtggggtaggagttctacagtgtctcgagcatatgattggggcagtgagaagcaaagtgctggagattcacagccatttcccacacaaacccattatcttgattggctggaacacaggagctttggtggcctgtcatgtgtcagtaatggagtatgtcactgcagttgtctgccttgggtttcctctgcttactgtggatggccccagaggggatgtagatgatcccctcttggatatgaagactccagtcctctttgtcattggtcagaattcccttcaatgtcaccctgaagccatggaggacttccgggagaagattcgagctgagaacagcttggtggtggttgggggagctgatgacaatctcagaataagcaaagcaaagaagaaatcagaagggttgactcagagcatggtggacagatgtattcaggatgagattgtggactttctgactggagtgctcactcgtgctgagggtcacatgggctctgaacctcgggatcaggatgctgagaagaagaagaagccccgcgatgtggcccgcagagacttggcctttgaagtccctgagcggggcagtcgacctgcctccccagctgccaagctgcccgcctcaccctcaggctcagaggatctctccagtgtgtccagcagccccacctccagtcccaagaccaaagtgaccacagtgacctctgcccagaagtccagtcagattggaagttctcagctgctgaagagacatgtgcagcggacagaagctgtgctgacccacaaacaagctcaagttcccatttcatcagaaccaccagaggaaggagagaaagaggatcttagggttcagctgaagcgacaccatccctcgagtccccttcctggcagtaagacctccaaacgaccgaagatcaaggtgtcccttatctcccaaggggacacagctggagggccttgtgctccttcccaaggaagtgctccagaagctgcaggtgggaagcccatcaccatgacactggggcaggcttcagcaggggccaaggagctcacaggacttctcaccacagccaagtccagttcttctgaaggtggagtctcagccagcccagtcccttcagtggtctccagcagcactgcacccagtgccttgcacacactgcagagccgcctggtggccacatctcctggcagctccctcccaggggccacatcagccagcagcctcctccaaggcctcagcttcagcttgcaggatatcagcagcaagacctctggccttccagcaaatccctccccaggaccagccccacaggccaccagtgtgaagttgcccacccccatgcagagcctgggtgccatcaccacgggcaccagcaccattgtccgtaccattcctgtggccaccactctctcctccttgggtgccactcctggtgggaagcccacagccatccaccagctgctgaccaatgggggcctcgctaagttggcaagcagcctccctggcctggctcagatctctaaccaagcatcaggcttgaaggtccccaccaccattactctgacacttcgtggccagccgagcaggatcactacactgagccctatgggctcaggagcagccccatccgaggagtcctcttcccaggtgctgccctccagctcacaggtgagtctgccaggaaggactgaggacatgggcttcattattgggaagtttaagaccagctgactggctgattgaaggggctgcccatgcactggacagacgagattcagattcaaattcaaatctgtattctggagtttgtggctttataatattgagcgaatcatggacatctttgagcttcctcttctacatccctcccttgatattgtgaagagtacatatgttcaagtgggtagcagtgtctagtatttaatgtttttgtttacttttcctttcgtttcatttttttctcatccttggtttcatccttcagaggttatgagtagaggctacttggctaatgctctttctttgtttttatttttattttttgagatggagtcttgctctatcgcccaagctggagtgcaggggtgtgatctcggctccctgcaacctccacctccccggttcaagcaattctcctgcctcagcctcccaagtaactgggattacaggcgcccgccaccatgcccggctacaacagggtttcactgtgttgaccaggctggcctcgtactcctgacctcaagtgatctacttgtctcggcctctgaaagtgctgggattacaggtgtgagccaccgctcctggccctttctttgtttttaaggacatggagacagagatatctcactatgttgcccaagctggccttgaactccaaggtttaagtggtcctcccgcctcggcccccaagtataatactctttctttgacattggctttctagcactgtgccttcccatatcttagcatttattgctgtctttttagggcacagctaggtttttataggtctcacccaggaagtcatgattagtttctcttagctgatctaatttcccctgtgaccttttcaagtcaaatatttctaatcttaaaatggtaatctgaggagccactcaaagattagaagttaagccaaaaaacagtttgagtctagtactgagtgtgctttccttcagtatccgctatacagccaaggccttcctgtgtctccctgtcctttccaccatgtcaacctgcttgtgaactggaggtgcagtgatagttcctgagccattctaaaagctcttctgtctcttcctctttagggaaaatactgcacagaggtcaacacctgacattcgttgggatcatagctacctttttttgcagagggatggaaatgttttaattttatcttatttcttattttttcaattataaaaatgattatgcttattttaaataattcaaacattatagaaataattaatttagaaagggaaagtttcccatgatgctactcctagagatgatgttcactgttaatagcctgatatggatccattcaaatttttttttctacacaaagtatgttattttatttattttgtacaaatatgggattacagagtatggactgttttgtaacttgcctttttttataaatcatgtcgtgacacgtttccctgtctgtgtcttttcagaggctggctagtatttcactgagtagatgtatgaagatgtatttcaccaccttctgttaggtagatagctgggttctattttggtttttgatattttaaataatgctctggtgaacacttgtttattcttgtgtacctctgggagcatttctccaggccagagaataagtagaggatgtgtacctctaatatctgggcagctgctcactaactgcccttcaaaaagtttttgctactttacaattctagccacggtgatgaaaatatgtttcatattttgtggaaatcaaaattttaactttattaatctgggtgaaaaatgaaattgttttaatgtgcattttcctgattacttaagaagttttatgtcttttatgaaatgtttgtcatactctttgaattatagtggctttgtatattcagatgttaaatctttatctgttacacaaattacatatatgttattcctgtcaaaaaaaaaaaaaaaaaaaaaaaaaaaaaaaaaaaaaaaaatacaaaaaaaaaaaaaaaaaaaaaaaaagcaaaaaaaaaaaaaaaaaacaccaccacagaagggcggccataaacatctccctgtcccacaccaccacagaacacgcggctggcaaaaaacaagaaacggcgtccacaggacgctgccataatcaaactatgcagcggaggacgccaattacccgaaaggcccctctgcgacgaacaacccaccacggggacatcgcccgagcccccaccccggcgacgaacacaagcggagcaaccacccacgaacagcccaccgacggcacaaaaccaccgtcgttggaaaacgagcagagcggcgaccatccg

SEQ ID NO: 308898 - DNA, 5061 bp, Homo sapiens
  misc_feature (5056)..(5056): n is a, c, g, or t
cgtggaggcgttaacgcgcacgcgcttagggatccggccgtggccgagcgcgcggccgtaagaccgcgggtgactagcatgcagatacccatgctctgactttctgcccctccactgacatggcccaccggggtggggagagggacttccagacttcagctcgacgcatgggcacctcgctgctcttccagctttcagtgcatgaacgggagctggacctggtttttctggatcatagctatgccaagccttggagtgcccacccagatgccagtagtgcccgccccacccgcatgctctttgtcactccccggcggcagcacgaaagtaccatgctctgtacaaaatgagctaagtagctaaggtgaatcagacgtcccaatagatgtggagacggtcacatcaacgcctatgccactctatgacaatcagaaggcacgcagcgtgatgaatgagtgtgaacggcatgtcatctttgccaggactgatgcagatgcccctcctccaccagaggactgggaggagcatgtcaacaggactggctggacaatggcccagaacaagctattcaacaagatcctcaaagccctgcagtctgaccggcttgcccgcttggccaacgaaggggcttgtaatgagccagtgctgcgccgtgttgctgtggacaagtgtgcaaggagagtgcggcaggctctggcaagtgtgagctgggataccaagctgatccagtggctgcacaccacccttgtggagaccttgagtctgcccatgctggcagcctacctggatgctttgcagacgctgaaggggaagatcccaaccttgattgaccggatgcttgtgtcatccaacacaaagactggggctgcaggagctgaggccttgtctctcctactgaagaggccctgggaccctgctgtgggtgtgctttctcataacaaaccaagcaaactccctggctctccgctgattctcatcgcctcctctggtccctccagctctgtgtttcccacttcacgccgccaccgcttctggcaatctcagctgtcctgcttgggcaaggtcatccctgtagccacccatctgctgaacaatggcagtggggtaggagttctacagtgtctcgagcatatgattggggcagtgagaagcaaagtgctggagattcacagccatttcccacacaaacccattatcttgattggctggaacacaggagctttggtggcctgtcatgtgtcagtaatggagtatgtcactgcagttgtctgccttgggtttcctctgcttactgtggatggccccagaggggatgtagatgatcccctcttggatatgaagactccagtcctctttgtcattggtcagaattcccttcaatgtcaccctgaagccatggaggacttccgggagaagattcgagctgagaacagcttggtggtggttgggggagctgatgacaatctcagaataagcaaagcaaagaagaaatcagaagggttgactcagagcatggtggacagatgtattcaggatgagattgtggactttctgactggagtgctcactcgtgctgagggtcacatgggctctgaacctcgggatcaggatgctgagaagaagaagaagccccgcgatgtggcccgcagagacttggcctttgaagtccctgagcggggcagtcgacctgcctccccagctgccaagctgcccgcctcaccctcaggctcagaggatctctccagtgtgtccagcagccccacctccagtcccaagaccaaagtgaccacagtgacctctgcccagaagtccagtcagattggaagttctcagctgctgaagagacatgtgcagcggacagaagctgtgctgacccacaaacaagctcaagttcccatttcatcagaaccaccagaggaaggagagaaagaggatcttagggttcagctgaagcgacaccatccctcgagtccccttcctggcagtaagacctccaaacgaccgaagatcaaggtgtcccttatctcccaaggggacacagctggagggccttgtgctccttcccaaggaagtgctccagaagctgcaggtgggaagcccatcaccatgacactggggcaggcttcagcaggggccaaggagctcacaggacttctcaccacagccaagtccagttcttctgaaggtggagtctcagccagcccagtcccttcagtggtctccagcagcactgcacccagtgccttgcacacactgcagagccgcctggtggccacatctcctggcagctccctcccaggggccacatcagccagcagcctcctccaaggcctcagcttcagcttgcaggatatcagcagcaagacctctggccttccagcaaatccctccccaggaccagccccacaggccaccagtgtgaagttgcccacccccatgcagagcctgggtgccatcaccacgggcaccagcaccattgtccgtaccattcctgtggccaccactctctcctccttgggtgccactcctggtgggaagcccacagccatccaccagctgctgaccaatgggggcctcgctaagttggcaagcagcctccctggcctggctcagatctctaaccaagcatcaggcttgaaggtccccaccaccattactctgacacttcgtggccagccgagcaggatcactacactgagccctatgggctcaggagcagccccatccgaggagtcctcttcccaggtgctgccctccagctcacaggtgagtctgccaggaaggactgaggacatgggcttcattattgggaagtttaagaccagctgactggctgattgaaggggctgcccatgcactggacagacgagattcagattcaaattcaaatctgtattctggagtttgtggctttataatattgagcgaatcatggacatctttgagcttcctcttctacatccctcccttgatattgtgaagagtacatatgttcaagtgggtagcagtgtctagtatttaatgtttttgtttacttttcctttcgtttcatttttttctcatccttggtttcatccttcagaggttatgagtagaggctacttggctaatgctctttctttgtttttatttttattttttgagatggagtcttgctctatcgcccaagctggagtgcaggggtgtgatctcggctccctgcaacctccacctccccggttcaagcaattctcctgcctcagcctcccaagtaactgggattacaggcgcccgccaccatgcccggctacaacagggtttcactgtgttgaccaggctggcctcgtactcctgacctcaagtgatctacttgtctcggcctctgaaagtgctgggattacaggtgtgagccaccgctcctggccctttctttgtttttaaggacatggagacagagatatctcactatgttgcccaagctggccttgaactccaaggtttaagtggtcctcccgcctcggcccccaagtataatactctttctttgacattggctttctagcactgtgccttcccatatcttagcatttattgctgtctttttagggcacagctaggtttttataggtctcacccaggaagtcatgattagtttctcttagctgatctaatttcccctgtgaccttttcaagtcaaatatttctaatcttaaaatggtaatctgaggagccactcaaagattagaagttaagccaaaaaacagtttgagtctagtactgagtgtgctttccttcagtatccgctatacagccaaggccttcctgtgtctccctgtcctttccaccatgtcaacctgcttgtgaactggaggtgcagtgatagttcctgagccattctaaaagctcttctgtctcttcctctttagggaaaatactgcacagaggtcaacacctgacattcgttgggatcatagctacctttttttgcagagggatggaaatgttttaattttatcttatttcttattttttcaattataaaaatgattatgcttattttaaataattcaaacattatagaaataattaatttagaaagggaaagtttcccatgatgctactcctagagatgatgttcactgttaatagcctgatatggatccattcaaatttttttttctacacaaagtatgttattttatttattttgtacaaatatgggattacagagtatggactgttttgtaacttgcctttttttataaatcatgtcgtgacacgtttccctgtctgtgtcttttcagaggctggctagtatttcactgagtagatgtatgaagatgtatttcaccaccttctgttaggtagatagctgggttctattttggtttttgatattttaaataatgctctggtgaacacttgtttattcttgtgtacctctgggagcatttctccaggccagagaataagtagaggatgtgtacctctaatatctgggcagctgctcactaactgcccttcaaaaagtttttgctactttacaattctagccacggtgatgaaaatatgtttcatattttgtggaaatcaaaattttaactttattaatctgggtgaaaaatgaaattgttttaatgtgcattttcctgattacttaagaagttttatgtcttttatgaaatgtttgtcatactctttgaattatagtggctttgtatattcagatgttaaatctttatctgttacacaaattacatatatgttattcctgtcaaaaaaaaaataaaataaaataaacccttttcctttaagagaacctttcttatggctttgaggctacttccttacggcttggatggtgtgaggcgaagtgaaagtgggatatttataattcttgtggcttaaaaagttcttccctggaaagaaaggaacaaacttggatttctcaaaatggtctaaaatgtatgactgatggtttgcagcaggtgcagagcaagtccggggcagtgtctggcacagtatctttcctgtgtgggatccattgcgtgtgtgcctagttggggagagcttctgncttct

SEQ ID NO: 308899 - DNA, 724 bp, Homo sapiens
caacgatggtcctcagctacttcctgtgtgatctgtccaccttgaagaactccacaactgaagaaggggagctgtgagaacgtggattgttctacaacttgcacagggtaacagaggaagtggctgaggcctagagtcacgttttccagttcccttcgcaaactatatttcttggaacgcgaaaggaagctttacctatttcatagaagacctggaatccataacctcagaaggcaatattattgatagaaaatgtggaaggatcaggaagttcttagattcttggatgacagatgcatgttgatgccctatggagatgtccttgtgttttgaggtcactgaggtaggaagacctgtctactcttggtttcaccactagaacagtcttgggctggatgggttatagagctgagcggctgtgatggttctgtttttacattaacaaaaacaattaaaaacaccaaaaacaaaaagccatgggcagacccacggtctgacattgattgaggcgcggaaataccttcacaaaggggggggccgcgagaaacaccgcggtctcactgtaatagtcccccgttgcgtgtgaaatagtcgtgccccccagatacagccacttgtagtctgtgcaagccagggggttacaaaaaggcggggggccaccccctatcagggaggggacgagttgtatctttttccgccaatgccgcggggtgaacgcgaactc

SEQ ID NO: 308900 - DNA, 2247 bp, Homo sapiens
aaatagatgtttatcattttttatatagactcattgaaaaaatgactttgtgttcttccagtacataccatcatgtctgagagggcagagatctagacaagtgtgggaaagatgactttggatcaaaattttcttgtgaatataatgtgcttatgcgtaatttaaagctgactgtattaaagatacattttttgtcaaccagatgattgttaaatacctgtgaagtatgtgtggcccggtcctatttcctcacctgtttacagtgaatcagacgtcccaatagatgtggagacggtcacatcaacgcctatgccactctatgacaatcagaaggcacgcagcgtgatgaatgagtgtgaacggcatgtcatctttgccaggactgatgcagatgcccctcctccaccagaggactgggaggagcatgtcaacaggactggctggacaatggcccagaacaagctattcaacaagatcctcaaagccctgcagtctgaccggcttgcccgcttggccaacgaaggggcttgtaatgagccagtgctgcgccgtgttgctgtggacaagtgtgcaaggagagtgcggcaggctctggcaagtgtgagctgggataccaagctgatccagtggctgcacaccacccttgtggagaccttgagtctgcccatgctggcagcctacctggatgctttgcagacgctgaaggggaagatcccaaccttgattgaccggatgcttgtgtcatccaacacaaagactggggctgcaggagctgaggccttgtctctcctactgaagaggccctgggaccctgctgtgggtgtgctttctcataacaaaccaagcaaactccctggctctccgctgattctcatcgcctcctctggtccctccagctctgtgtttcccacttcacgccgccaccgcttctggcaatctcagctgtcctgcttgggcaaggtcatccctgtagccacccatctgctgaacaatggcagtggggtaggagttctacagtgtctcgagcatatgattggggcagtgagaagcaaagtgctggagattcacagccatttcccacacaaacccattatcttgattggctggaacacaggagctttggtggcctgtcatgtgtcagtaatggagtatgtcactgcagttgtctgccttgggtttcctctgcttactgtggatggccccagaggggatgtagatgatcccctcttggatatgaagactccagtcctctttgtcattggtcagaattcccttcaatgtcaccctgaagccatggaggacttccgggagaagattcgagctgagaacagcttggtggtggttgggggagctgatgacaatctcagaataagcaaagcaaagaagaaatcagaagggttgactcagagcatggtggacagatgtattcaggatgagattgtggactttctgactggagtgctcactcgtgctgagggtcacatgggctctgaacctcgggatcaggatgctgagaagaagaagaagccccgcgatgtggcccgcagagacttggcctttgaagtccctgagcggggcagtcgacctgcctccccagctgccaagctgcccgcctcaccctcaggctcagaggatctctccagtgtgtccagcagccccacctccagtcccaagaccaaagtgaccacagtgacctctgcccagaagtccagtcagattggaagttctcagctgctgaagagacatgtgcagcggacagaagctgtgctgacccacaaacaagctcaagttcccatttcatcagaaccaccagaggaaggagagaaagaggatcttagggttcagctgaagcgacaccatccctcgagtccccttcctgtctactcttggtttcaccactagaacagtcttgggctggatgggttatagagctgagcggctgtgatggttctgtttttacattaacaaaaacaattaaaaacaccaaaaacaaaaagccatgggcagacccacggtctgacattgattgaggcgcggaaataccttcacaaaggggggggccgcgagaaacaccgcggtctcactgtaatagtcccccgttgcgtgtgaaatagtcgtgccccccagatacagccacttgtagtctgtgcaagccagggggttacaaaaaggcggggggccaccccctatcagggaggggacgagttgtatctttttccgccaatgccgcggggtgaacgcgaactc

SEQ ID NO: 308901 - DNA, 2344 bp, Homo sapiens
cgtggaggcgttaacgcgcacgcgcttagggatccggccgtggccgagcgcgcggccgtaagaccgcgggtgactagcatgcagatacccatgctctgactttctgcccctccactgacatggcccaccggggtggggagagggacttccagacttcagctcgacgcatgggcacctcgctgctcttccagctttcagtgcatgaacgggagctggacctggtttttctggatcatagctatgccaagccttggagtgcccacccagatgccagtagtgcccgccccacccgcatgctctttgtcactccccggcggcagcacgaaagtaccatgctctgtacaaaatgagctaagtagctaaggtgaatcagacgtcccaatagatgtggagacggtcacatcaacgcctatgccactctatgacaatcagaaggcacgcagcgtgatgaatgagtgtgaacggcatgtcatctttgccaggactgatgcagatgcccctcctccaccagaggactgggaggagcatgtcaacaggactggctggacaatggcccagaacaagctattcaacaagatcctcaaagccctgcagtctgaccggcttgcccgcttggccaacgaaggggcttgtaatgagccagtgctgcgccgtgttgctgtggacaagtgtgcaaggagagtgcggcaggctctggcaagtgtgagctgggataccaagctgatccagtggctgcacaccacccttgtggagaccttgagtctgcccatgctggcagcctacctggatgctttgcagacgctgaaggggaagatcccaaccttgattgaccggatgcttgtgtcatccaacacaaagactggggctgcaggagctgaggccttgtctctcctactgaagaggccctgggaccctgctgtgggtgtgctttctcataacaaaccaagcaaactccctggctctccgctgattctcatcgcctcctctggtccctccagctctgtgtttcccacttcacgccgccaccgcttctggcaatctcagctgtcctgcttgggcaaggtcatccctgtagccacccatctgctgaacaatggcagtggggtaggagttctacagtgtctcgagcatatgattggggcagtgagaagcaaagtgctggagattcacagccatttcccacacaaacccattatcttgattggctggaacacaggagctttggtggcctgtcatgtgtcagtaatggagtatgtcactgcagttgtctgccttgggtttcctctgcttactgtggatggccccagaggggatgtagatgatcccctcttggatatgaagactccagtcctctttgtcattggtcagaattcccttcaatgtcaccctgaagccatggaggacttccgggagaagattcgagctgagaacagcttggtggtggttgggggagctgatgacaatctcagaataagcaaagcaaagaagaaatcagaagggttgactcagagcatggtggacagatgtattcaggatgagattgtggactttctgactggagtgctcactcgtgctgagggtcacatgggctctgaacctcgggatcaggatgctgagaagaagaagaagccccgcgatgtggcccgcagagacttggcctttgaagtccctgagcggggcagtcgacctgcctccccagctgccaagctgcccgcctcaccctcaggctcagaggatctctccagtgtgtccagcagccccacttccagttcccttcgcaaactatatttcttggaacgcgaaaggaagctttacctatttcatagaagacctggaatccataacctcagaaggcaatattattgatagaaaatgtggaaggatcaggaagttcttagattcttggatgacagatgcatgttgatgccctatggagatgtccttgtgttttgaggtcactgaggtaggaagacctgtctactcttggtttcaccactagaacagtcttgggctggatgggttatagagctgagcggctgtgatggttctgtttttacattaacaaaaacaattaaaaacaccaaaaacaaaaagccatgggcagacccacggtctgacattgattgaggcgcggaaataccttcacaaaggggggggccgcgagaaacaccgcggtctcactgtaatagtcccccgttgcgtgtgaaatagtcgtgccccccagatacagccacttgtagtctgtgcaagccagggggttacaaaaaggcggggggccaccccctatcagggaggggacgagttgtatctttttccgccaatgccgcggggtgaacgcgaactc

SEQ ID NO: 308902 - DNA, 3993 bp, Homo sapiens
cgtggaggcgttaacgcgcacgcgcttagggatccggccgtggccgagcgcgcggccgtaagaccgcgggtgactagcatgcagatacccatgctctgactttctgcccctccactgacatggcccaccggggtggggagagggacttccagacttcagctcgacgcatgggcacctcgctgctcttccagctttcagtgcatgaacgggagctggacctggtttttctggatcatagctatgccaagccttggagtgcccacccagatgccagtagtgcccgccccacccgcatgctctttgtcactccccggcggcagcacgaaagtaccatgctctgtacaaaatgagctaagtagctaaggtgaatcagacgtcccaatagatgtggagacggtcacatcaacgcctatgccactctatgacaatcagaaggcacgcagcgtgatgaatgagtgtgaacggcatgtcatctttgccaggactgatgcagatgcccctcctccaccagaggactgggaggagcatgtcaacaggactggctggacaatggcccagaacaagctattcaacaagatcctcaaagccctgcagtctgaccggcttgcccgcttggccaacgaaggggcttgtaatgagccagtgctgcgccgtgttgctgtggacaagtgtgcaaggagagtgcggcaggctctggcaagtgtgagctgggataccaagctgatccagtggctgcacaccacccttgtggagaccttgagtctgcccatgctggcagcctacctggatgctttgcagacgctgaaggggaagatcccaaccttgattgaccggatgcttgtgtcatccaacacaaagactggggctgcaggagctgaggccttgtctctcctactgaagaggccctgggaccctgctgtgggtgtgctttctcataacaaaccaagcaaactccctggctctccgctgattctcatcgcctcctctggtccctccagctctgtgtttcccacttcacgccgccaccgcttctggcaatctcagctgtcctgcttgggcaaggtcatccctgtagccacccatctgctgaacaatggcagtggggtaggagttctacagtgtctcgagcatatgattggggcagtgagaagcaaagtgctggagattcacagccatttcccacacaaacccattatcttgattggctggaacacaggagctttggtggcctgtcatgtgtcagtaatggagtatgtcactgcagttgtctgccttgggtttcctctgcttactgtggatggccccagaggggatgtagatgatcccctcttggatatgaagactccagtcctctttgtcattggtcagaattcccttcaatgtcaccctgaagccatggaggacttccgggagaagattcgagctgagaacagcttggtggtggttgggggagctgatgacaatctcagaataagcaaagcaaagaagaaatcagaagggttgactcagagcatggtggacagatgtattcaggatgagattgtggactttctgactggagtgctcactcgtgctgagggtcacatgggctctgaacctcgggatcaggatgctgagaagaagaagaagccccgcgatgtggcccgcagagacttggcctttgaagtccctgagcggggcagtcgacctgcctccccagctgccaagctgcccgcctcaccctcaggctcagaggatctctccagtgtgtccagcagccccacctccagtcccaagaccaaagtgaccacagtgacctctgcccagaagtccagtcagattggaagttctcagctgctgaagagacatgtgcagcggacagaagctgtgctgacccacaaacaagctcaagttcccatttcatcagaaccaccagaggaaggagagaaagaggatcttagggttcagctgaagcgacaccatccctcgagtccccttcctggcagtaagacctccaaacgaccgaagatcaaggtgtcccttatctcccaaggggacacagctggagggccttgtgctccttcccaaggaagtgctccagaagctgcaggtgggaagcccatcaccatgacactggggcaggcttcagcaggggccaaggagctcacaggacttctcaccacagccaagtccagttcttctgaaggtggagtctcagccagcccagtcccttcagtggtctccagcagcactgcacccagtgccttgcacacactgcagagccgcctggtggccacatctcctggcagctccctcccaggggccacatcagccagcagcctcctccaaggcctcagcttcagcttgcaggatatcagcagcaagacctctggccttccagcaaatccctccccaggaccagccccacaggccaccagtgtgaagttgcccacccccatgcagagcctgggtgccatcaccacgggcaccagcaccattgtccgtaccattcctgtggccaccactctctcctccttgggtgccactcctggtgggaagcccacagccatccaccagctgctgaccaatgggggcctcgctaagttggcaagcagcctccctggcctggctcagatctctaaccaagcatcaggcttgaaggtccccaccaccattactctgacacttcgtggccagccgagcaggatcactacactgagccctatgggctcaggagcagccccatccgaggagtcctcttcccaggtgctgccctccagctcacagggaaaatactgcacagaggtcaacacctgacattcgttgggatcatagctacctttttttgcagagggatggaaatgttttaattttatcttatttcttattttttcaattataaaaatgattatgcttattttaaataattcaaacattatagaaataattaatttagaaagggaaagtttcccatgatgctactcctagagatgatgttcactgttaatagcctgatatggatccattcaaatttttttttctacacaaagtatgttattttatttattttgtacaaatatgggattacagagtatggactgttttgtaacttgcctttttttataaatcatgtcgtgacacgtttccctgtctgtgtcttttcagaggctggctagtatttcactgagtagatgtatgaagatgtatttcaccaccttctgttaggtagatagctgggttctattttggtttttgatattttaaataatgctctggtgaacacttgtttattcttgtgtacctctgggagcatttctccaggccagagaataagtagaggatgtgtacctctaatatctgggcagctgctcactaactgcccttcaaaaagtttttgctactttacaattctagccacggtgatgaaaatatgtttcatattttgtggaaatcaaaattttaactttattaatctgggtgaaaaatgaaattgttttaatgtgcattttcctgattacttaagaagttttatgtcttttatgaaatgtttgtcatactctttgaattatagtggctttgtatattcagatgttaaatctttatctgttacacaaattacatatatgttattcctgtcaaaaaaaaaaaaaaaaaaaaaaaaaaaaaaaaaaaaaaaaatacaaaaaaaaaaaaaaaaaaaaaaaaagcaaaaaaaaaaaaaaaaaacaccaccacagaagggcggccataaacatctccctgtcccacaccaccacagaacacgcggctggcaaaaaacaagaaacggcgtccacaggacgctgccataatcaaactatgcagcggaggacgccaattacccgaaaggcccctctgcgacgaacaacccaccacggggacatcgcccgagcccccaccccggcgacgaacacaagcggagcaaccacccacgaacagcccaccgacggcacaaaaccaccgtcgttggaaaacgagcagagcggcgaccatccg

SEQ ID NO: 308903 - DNA, 3150 bp, Homo sapiens
cgtggaggcgttaacgcgcacgcgcttagggatccggccgtggccgagcgcgcggccgtaagaccgcgggtgactagcatgcagatacccatgctctgactttctgcccctccactgacatggcccaccggggtggggagagggacttccagacttcagctcgacgcatgggcacctcgctgctcttccagctttcagtgcatgaacgggagctggacctggtttttctggatcatagctatgccaagccttggagtgcccacccagatgccagtagtgcccgccccacccgcatgctctttgtcactccccggcggcagcacgaaagtaccatgctctgtacaaaatgagctaagtagctaaggtgaatcagacgtcccaatagatgtggagacggtcacatcaacgcctatgccactctatgacaatcagaaggcacgcagcgtgatgaatgagtgtgaacggcatgtcatctttgccaggactgatgcagatgcccctcctccaccagaggactgggaggagcatgtcaacaggactggctggacaatggcccagaacaagctattcaacaagatcctcaaagccctgcagtctgaccggcttgcccgcttggccaacgaaggggcttgtaatgagccagtgctgcgccgtgttgctgtggacaagtgtgcaaggagagtgcggcaggctctggcaagtgtgagctgggataccaagctgatccagtggctgcacaccacccttgtggagaccttgagtctgcccatgctggcagcctacctggatgctttgcagacgctgaaggggaagatcccaaccttgattgaccggatgcttgtgtcatccaacacaaagactggggctgcaggagctgaggccttgtctctcctactgaagaggccctgggaccctgctgtgggtgtgctttctcataacaaaccaagcaaactccctggctctccgctgattctcatcgcctcctctggtccctccagctctgtgtttcccacttcacgccgccaccgcttctggcaatctcagctgtcctgcttgggcaaggtcatccctgtagccacccatctgctgaacaatggcagtggggtaggagttctacagtgtctcgagcatatgattggggcagtgagaagcaaagtgctggagattcacagccatttcccacacaaacccattatcttgattggctggaacacaggagctttggtggcctgtcatgtgtcagtaatggagtatgtcactgcagttgtctgccttgggtttcctctgcttactgtggatggccccagaggggatgtagatgatcccctcttggatatgaagactccagtcctctttgtcattggtcagaattcccttcaatgtcaccctgaagccatggaggacttccgggagaagattcgagctgagaacagcttggtggtggttgggggagctgatgacaatctcagaataagcaaagcaaagaagaaatcagaagggttgactcagagcatggtggacagatgtattcaggatgagattgtggactttctgactggagtgctcactcgtgctgagggtcacatgggctctgaacctcgggatcaggatgctgagaagaagaagaagccccgcgatgtggcccgcagagacttggcctttgaagtccctgagcggggcagtcgacctgcctccccagctgccaagctgcccgcctcaccctcaggctcagaggatctctccagtgtgtccagcagccccacctccagtcccaagaccaaagtgaccacagtgacctctgcccagaagtccagtcagattggaagttctcagctgctgaagagacatgtgcagcggacagaagctgtgctgacccacaaacaagctcaagttcccatttcatcagaaccaccagaggaaggagagaaagaggatcttagggttcagctgaagcgacaccatccctcgagtccccttcctggcagtaagacctccaaacgaccgaagatcaaggtgtcccttatctcccaaggggacacagctggagggccttgtgctccttcccaaggaagtgctccagaagctgcaggtgggaagcccatcaccatgacactggggcaggcttcagcaggggccaaggagctcacaggacttctcaccacagccaagtccagttcttctgaaggtggagtctcagccagcccagtcccttcagtggtctccagcagcactgcacccagtgccttgcacacactgcagagccgcctggtggccacatctcctggcagctccctcccaggggccacatcagccagcagcctcctccaaggcctcagcttcagcttgcaggatatcagcagcaagacctctggccttccagcaaatccctccccaggaccagccccacaggccaccagtgtgaagttgcccacccccatgcagagcctgggtgccatcaccacgggcaccagcaccattgtccgtaccattcctgtggccaccactctctcctccttgggtgccactcctggtgggaagcccacagccatccaccagctgctgaccaatgggggcctcgctaagttggcaagcagcctccctggcctggctcagatctctaaccaagcatcaggcttgaaggtccccaccaccattactctgacacttcgtggccagccgagcaggatcactacactgagccctatgggctcaggagcagccccatccgaggagtcctcttcccaggtgctgccctccagctcacagcaacatggatgaacttggaggacatgttaagtgaagtaagtctggacagaaaaatactgcgtgttctcacccacaggtaggagctaaaaaagctgatcttatagaagtagggagtgtaggtgggatgaataacttctagtgttctataacactataggctgactataattaacaatttattatagattttcaaattcctagaaaaccagattttgaatgttcccaggataaagaaatgagaaatgttttgaggtgctggatatgccaattatcctgatttgatcattacacattgtatacacgctttgaaatattgtactctgccccataaatacatacaattatatgccagttaaaaataataaaagctggccgagtgcagtg

SEQ ID NO: 308904 - DNA, 3004 bp, Homo sapiens
cgtggaggcgttaacgcgcacgcgcttagggatccggccgtggccgagcgcgcggccgtaagaccgcgggtgactagcatgcagatacccatgctctgactttctgcccctccactgacatggcccaccggggtggggagagggacttccagacttcagctcgacgcatgggcacctcgctgctcttccagctttcagtgcatgaacgggagctggacctggtttttctggatcatagctatgccaagccttggagtgcccacccagatgccagtagtgcccgccccacccgcatgctctttgtcactccccggcggcagcacgaaagtaccatgctctgtacaaaatgagctaagtagctaaggtgaatcagacgtcccaatagatgtggagacggtcacatcaacgcctatgccactctatgacaatcagaaggcacgcagcgtgatgaatgagtgtgaacggcatgtcatctttgccaggactgatgcagatgcccctcctccaccagaggactgggaggagcatgtcaacaggactggctggacaatggcccagaacaagctattcaacaagatcctcaaagccctgcagtctgaccggcttgcccgcttggccaacgaaggggcttgtaatgagccagtgctgcgccgtgttgctgtggacaagtgtgcaaggagagtgcggcaggctctggcaagtgtgagctgggataccaagctgatccagtggctgcacaccacccttgtggagaccttgagtctgcccatgctggcagcctacctggatgctttgcagacgctgaaggggaagatcccaaccttgattgaccggatgcttgtgtcatccaacacaaagactggggctgcaggagctgaggccttgtctctcctactgaagaggccctgggaccctgctgtgggtgtgctttctcataacaaaccaagcaaactccctggctctccgctgattctcatcgcctcctctggtccctccagctctgtgtttcccacttcacgccgccaccgcttctggcaatctcagctgtcctgcttgggcaaggtcatccctgtagccacccatctgctgaacaatggcagtggggtaggagttctacagtgtctcgagcatatgattggggcagtgagaagcaaagtgctggagattcacagccatttcccacacaaacccattatcttgattggctggaacacaggagctttggtggcctgtcatgtgtcagtaatggagtatgtcactgcagttgtctgccttgggtttcctctgcttactgtggatggccccagaggggatgtagatgatcccctcttggatatgaagactccagtcctctttgtcattggtcagaattcccttcaatgtcaccctgaagccatggaggacttccgggagaagattcgagctgagaacagcttggtggtggttgggggagctgatgacaatctcagaataagcaaagcaaagaagaaatcagaagggttgactcagagcatggtggacagatgtattcaggatgagattgtggactttctgactggagtgctcactcgtgctgagggtcacatgggctctgaacctcgggatcaggatgctgagaagaagaagaagccccgcgatgtggcccgcagagacttggcctttgaagtccctgagcggggcagtcgacctgcctccccagctgccaagctgcccgcctcaccctcaggctcagaggatctctccagtgtgtccagcagccccacctccagtcccaagaccaaagtgaccacagtgacctctgcccagaagtccagtcagattggaagttctcagctgctgaagagacatgtgcagcggacagaagctgtgctgacccacaaacaagctcaagttcccatttcatcagaaccaccagaggaaggagagaaagaggatcttagggttcagctgaagcgacaccatccctcgagtccccttcctggcagtaagacctccaaacgaccgaagatcaaggtgtcccttatctcccaaggggacacagctggagggccttgtgctccttcccaaggaagtgctccagaagctgcaggtgggaagcccatcaccatgacactggggcaggcttcagcaggggccaaggagctcacaggacttctcaccacagccaagtccagttcttctgaaggtggagtctcagccagcccagtcccttcagtggtctccagcagcactgcacccagtgccttgcacacactgcagagccgcctggtggccacatctcctggcagctccctcccaggggccacatcagccagcagcctcctccaaggcctcagcttcagcttgcaggatatcagcagcaagacctctggccttccagcaaatccctccccaggaccagccccacaggccaccagtgtgaagttgcccacccccatgcagagcctgggtgccatcaccacgggcaccagcaccattgtccgtaccattcctgtggccaccactctctcctccttgggtgccactcctggtgggaagcccacagccatccaccagctgctgaccaatgggggcctcgctaagttggcaagcagcctccctggcctggctcagatctctaaccaagcatcaggcttgaaggtccccaccaccattactctgacacttcgtggccagccgagcaggatcactacactgagccctatgggctcaggagcagccccatccgaggagtcctcttcccaggtgctgccctccagctcacagcaacatggatgaacttggaggacatgttaagtgaagtaagtctggacagaaaaatactgcgtgttctcacccacagtgacctcgggcaactcaatctcccttagcctcatcctgtggaacccgggatgagaacagaactttctcctaagggggctgtgagaagaaataactcctgggacctgcctagcaccaagcctggagcaaagtcagtacggaataaatattattgtcctgccta

SEQ ID NO: 308905 - DNA, 2497 bp, Homo sapiens
cgtggaggcgttaacgcgcacgcgcttagggatccggccgtggccgagcgcgcggccgtaagaccgcgggtgactagcatgcagatacccatgctctgactttctgcccctccactgacatggcccaccggggtggggagagggacttccagacttcagctcgacgcatgggcacctcgctgctcttccagctttcagtgcatgaacgggagctggacctggtttttctggatcatagctatgccaagccttggagtgcccacccagatgccagtagtgcccgccccacccgcatgctctttgtcactccccggcggcagcacgaaagtaccatgctctgtacaaaatgagctaagtagctaaggtgaatcagacgtcccaatagatgtggagacggtcacatcaacgcctatgccactctatgacaatcagaaggcacgcagcgtgatgaatgagtgtgaacggcatgtcatctttgccaggactgatgcagatgcccctcctccaccagaggactgggaggagcatgtcaacaggactggctggacaatggcccagaacaagctattcaacaagatcctcaaagccctgcagtctgaccggcttgcccgcttggccaacgaaggggcttgtaatgagccagtgctgcgccgtgttgctgtggacaagtgtgcaaggagagtgcggcaggctctggcaagtgtgagctgggataccaagctgatccagtggctgcacaccacccttgtggagaccttgagtctgcccatgctggcagcctacctggatgctttgcagacgctgaaggggaagatcccaaccttgattgaccggatgcttgtgtcatccaacacaaagactggggctgcaggagctgaggccttgtctctcctactgaagaggccctgggaccctgctgtgggtgtgctttctcataacaaaccaagcaaactccctggctctccgctgattctcatcgcctcctctggtccctccagctctgtgtttcccacttcacgccgccaccgcttctggcaatctcagctgtcctgcttgggcaaggtcatccctgtagccacccatctgctgaacaatggcagtggggtaggagttctacagtgtctcgagcatatgattggggcagtgagaagcaaagtgctggagattcacagccatttcccacacaaacccattatcttgattggctggaacacaggagctttggtggcctgtcatgtgtcagtaatggagtatgtcactgcagttgtctgccttgggtttcctctgcttactgtggatggccccagaggggatgtagatgatcccctcttggatatgaagactccagtcctctttgtcattggtcagaattcccttcaatgtcaccctgaagccatggaggacttccgggagaagattcgagctgagaacagcttggtggtggttgggggagctgatgacaatctcagaataagcaaagcaaagaagaaatcagaagggttgactcagagcatggtggacagatgtattcaggatgagattgtggactttctgactggagtgctcactcgtgctgagggtcacatgggctctgaacctcgggatcaggatgctgagaagaagaagaagccccgcgatgtggcccgcagagacttggcctttgaagtccctgagcggggcagtcgacctgcctccccagctgccaagctgcccgcctcaccctcaggctcagaggatctctccagtgtgtccagcagccccacctccagtcccaagaccaaagtgaccacagtgacctctgcccagaagtccagtcagattggaagttctcagctgctgaagagacatgtgcagcggacagaagctgtgctgacccacaaacaagctcaagttcccatttcatcagaaccaccagaggaaggagagaaagaggatcttagggttcagctgaagcgacaccatccctcgagtccccttcctggcagtaagacctccaaacgaccgaagatcaaggtgtcccttatctcccaaggggacacagctggagggccttgtgctccttcccaaggaagtgctccagaagctgcaggtgggaagcccatcaccatgacactggggcaggcttcagcaggggccaaggagctcacaggacttctcaccacagccaagtccagttcttctgaaggtggagtctcagccagcccagtcccttcagtggtctccagcagcactgcacccagtgccttgcacacactgcagagccgcctggtggccacatctcctggcagctccctcccaggtatcttgtggcccagcattctccccttccaacacagaatttttggtctgctgcttctgggtggtcctgggaaagcatccctggagctaaatccataggatgggcctctgggtcttagagtgatcatagaggcttgacgtgaagctggaattagcttgggcagagggattccttggccttgaataaatgcagtgagta

SEQ ID NO: 308906 - DNA, 2079 bp, Homo sapiens
cgtggaggcgttaacgcgcacgcgcttagggatccggccgtggccgagcgcgcggccgtaagaccgcgggtgactagcatgcagatacccatgctctgactttctgcccctccactgacatggcccaccggggtggggagagggacttccagacttcagctcgacgcatgggcacctcgctgctcttccagctttcagtgcatgaacgggagctggacctggtttttctggatcatagctatgccaagccttggagtgcccacccagatgccagtagtgcccgccccacccgcatgctctttgtcactccccggcggcagcacgaaagtaccatgctctgtacaaaatgagctaagtagctaaggtgaatcagacgtcccaatagatgtggagacggtcacatcaacgcctatgccactctatgacaatcagaaggcacgcagcgtgatgaatgagtgtgaacggcatgtcatctttgccaggactgatgcagatgcccctcctccaccagaggactgggaggagcatgtcaacaggactggctggacaatggcccagaacaagctattcaacaagatcctcaaagccctgcagtctgaccggcttgcccgcttggccaacgaaggggcttgtaatgagccagtgctgcgccgtgttgctgtggacaagtgtgcaaggagagtgcggcaggctctggcaagtgtgagctgggataccaagctgatccagtggctgcacaccacccttgtggagaccttgagtctgcccatgctggcagcctacctggatgctttgcagacgctgaaggggaagatcccaaccttgattgaccggatgcttgtgtcatccaacacaaagactggggctgcaggagctgaggccttgtctctcctactgaagaggccctgggaccctgctgtgggtgtgctttctcataacaaaccaagcaaactccctggctctccgctgattctcatcgcctcctctggtccctccagctctgtgtttcccacttcacgccgccaccgcttctggcaatctcagctgtcctgcttgggcaaggtcatccctgtagccacccatctgctgaacaatggcagtggggtaggagttctacagtgtctcgagcatatgattggggcagtgagaagcaaagtgctggagattcacagccatttcccacacaaacccattatcttgattggctggaacacaggagctttggtggcctgtcatgtgtcagtaatggagtatgtcactgcagttgtctgccttgggtttcctctgcttactgtggatggccccagaggggatgtagatgatcccctcttggatatgaagactccagtcctctttgtcattggtcagaattcccttcaatgtcaccctgaagccatggaggacttccgggagaagattcgagctgagaacagcttggtggtggttgggggagctgatgacaatctcagaataagcaaagcaaagaagaaatcagaagggttgactcagagcatggtggacagatgtattcaggatgagattgtggactttctgactggagtgctcactcgtgctgagggtcacatgggctctgaacctcgggatcaggatgctgagaagaagaagaagccccgcgatgtggcccgcagagacttggcctttgaagtccctgagcggggcagtcgacctgcctccccagctgccaagctgcccgcctcaccctcaggctcagaggatctctccagtgtgtccagcagccccacctccagtcccaagaccaaagtgaccacagtgacctctgcccagaagtccagtcagattggaagttctcagctgctgaagagacatgtgcagcggaaacccaaggcagacaactgcagtgacatactccattactgacacatgacaggccaccaaagctcctgtgttccagccaatcaagataataggtttgtgtgggaaatggctgtgaatctccagcactttgcttctcactgccccaatcatatgctcgagacactgtagaactcctaccccactgccattgttcagcagatgggtggctacatgatgactacg

SEQ ID NO: 308907 - DNA, 1853 bp, Homo sapiens
cgtggaggcgttaacgcgcacgcgcttagggatccggccgtggccgagcgcgcggccgtaagaccgcgggtgactagcatgcagatacccatgctctgactttctgcccctccactgacatggcccaccggggtggggagagggacttccagacttcagctcgacgcatgggcacctcgctgctcttccagctttcagtgcatgaacgggagctggacctggtttttctggatcatagctatgccaagccttggagtgcccacccagatgccagtagtgcccgccccacccgcatgctctttgtcactccccggcggcagcacgaaagtaccatgctctgtacaaaatgagctaagtagctaaggtgaatcagacgtcccaatagatgtggagacggtcacatcaacgcctatgccactctatgacaatcagaaggcacgcagcgtgatgaatgagtgtgaacggcatgtcatctttgccaggactgatgcagatgcccctcctccaccagaggactgggaggagcatgtcaacaggactggctggacaatggcccagaacaagctattcaacaagatcctcaaagccctgcagtctgaccggcttgcccgcttggccaacgaaggggcttgtaatgagccagtgctgcgccgtgttgctgtggacaagtgtgcaaggagagtgcggcaggctctggcaagtgtgagctgggataccaagctgatccagtggctgcacaccacccttgtggagaccttgagtctgcccatgctggcagcctacctggatgctttgcagacgctgaaggggaagatcccaaccttgattgaccggatgcttgtgtcatccaacacaaagactggggctgcaggagctgaggccttgtctctcctactgaagaggccctgggaccctgctgtgggtgtgctttctcataacaaaccaagcaaactccctggctctccgctgattctcatcgcctcctctggtccctccagctctgtgtttcccacttcacgccgccaccgcttctggcaatctcagctgtcctgcttgggcaaggtcatccctgtagccacccatctgctgaacaatggcagtggggtaggagttctacagtgtctcgagcatatgattggggcagtgagaagcaaagtgctggagattcacagccatttcccacacaaacccattatcttgattggctggaacacaggagctttggtggcctgtcatgtgtcagtaatggagtatgtcactgcagttgtctgccttgggtttcctctgcttactgtggatggccccagaggggatgtagatgatcccctcttggatatgaagactccagtcctctttgtcattggtcagaattcccttcaatgtcaccctgaagccatggaggacttccgggagaagattcgagctgagaacagcttggtggtggttgggggagctgatgacaatctcaggtgggtggattctcccagagctgcaagagagctgtgttacagtgttagagataagcctggaagctggcaatgtaactacagaccagtctggttcagttaaaagacagcattagccgggcgcggtggctcacgcctgtaatcccaggactttgggaggctgaggcaggcggatcacgaggtcaggagattgagaccatcctggctaacacggtgaaaccccgtctctactaaaaatacaaaaaattagccaggcctggtgtcgggcgcctgtagtcccagctactcgggaggctgaggcaggagaatggtgtgaacccagaaggcggagcttgcagtgagccgagatcccgccactgcactccagcctgggtgacagagcaagac

SEQ ID NO: 308908 - DNA, 1352 bp, Homo sapiens
cgtggaggcgttaacgcgcacgcgcttagggatccggccgtggccgagcgcgcggccgtaagaccgcgggtgactagcatgcagatacccatgctctgactttctgcccctccactgacatggcccaccggggtggggagagggacttccagacttcagctcgacgcatgggcacctcgctgctcttccagctttcagtgcatgaacgggagctggacctggtttttctggatcatagctatgccaagccttggagtgcccacccagatgccagtagtgcccgccccacccgcatgctctttgtcactccccggcggcagcacgaaagtaccatgtgaatcagacgtcccaatagatgtggagacggtcacatcaacgcctatgccactctatgacaatcagaaggcacgcagcgtgatgaatgagtgtgaacggcatgtcatctttgccaggactgatgcagatgcccctcctccaccagaggactgggaggagcatgtcaacagggtctcactctgtcacccagactgcagtgcagtggcacgatctcggctcactacaagccttgacctccaggactcagtctccttgtggaccaccacccttctgttatgacattgccacattgccacagattgatgcttacacaccatctcttttggtaggtaacttttgtacatagccgattttattatttatgataacttattagtttcagtttcagataccaccattttatgaccctgtccctgaatctgtagcctgtttggagcttgcagttccttctgctctgattataatcatcgtgttgccattctttccctgacttgattgttaaattgctgcttcctttcttcttatataaagtcatgtaaaattagtttgccacatcaagagctccatgaacggtgtaggtcggctccctagaactctggagttctttcccggagagtttactgattgctctttgtctgtggaggcagaaacttaatttccttgttaagagcttttttcctctctcttgaatgatttcagtagaaactgtcttcagatagctttgtgtatataggctaggcgcagtagctctcgcctgtaatcccagcactttgggatgctgaggcgggaagataatttgaggtgaggagtttgagaccagcctgaccaacatagtgaaaccccgtctctactaaaaatagtaaaaattagctggtgtggtggcaaacgcctgtaatctcagctactcgggaggctgaggcaggagaatctcttgaacctggaaggcagaggttgcagtgagccgagatctgtgccactgcactccagcccgggcaacagagcaagactccgtctca

SEQ ID NO: 308909 - DNA, 755 bp, Homo sapiens
agtgtctgatgagattttggaggccttctctcattggcagcaggcttacacaccatctcttttggtaggtaacttttgtacatagccgattttattatttatgataacttattagtttcagtttcagataccaccattttatgaccctgtccctgaatctgtagcctgtttggagcttgcagttccttctgctctgattataatcatcgtgttgccattctttccctgacttgattgttaaattgctgcttcctttcttcttatataaagtcatgtaaaattagtttgccacatcaagagctccatgaacggtgtaggtcggctccctagaactctggagttctttcccggagagtttactgattgctctttgtctgtggaggcagaaacttaatttccttgttaagagcttttttcctctctcttgaatgatttcagtagaaactgtcttcagatagctttgtgtatataggctaggcgcagtagctctcgcctgtaatcccagcactttgggatgctgaggcgggaagataatttgaggtgaggagtttgagaccagcctgaccaacatagtgaaaccccgtctctactaaaaatagtaaaaattagctggtgtggtggcaaacgcctgtaatctcagctactcgggaggctgaggcaggagaatctcttgaacctggaaggcagaggttgcagtgagccgagatctgtgccactgcactccagcccgggcaacagagcaagactccgtctca

SEQ ID NO: 308910 - DNA, 378 bp, Homo sapiens
tttgcagacgctgaaggggaaggtaaggctgtgattggggtctgccctgtcctagggatagccatcctcccctgtgggttcaggatgtggggttaggcaaagtaattatctggtcggtctggagtgcatggccaaaactaatgggtttggtactaaaattgggagacagggtatcatttcacatttgtgtctggtgtaaacgttttcagccctgctggctccaggatgaggtatggggcctgaaaaccagagtatacatttagccttcctagccttgcagcttgtggtttgagtcatggctgaattgaattatcatgaaggagacgaagggtttaccagggaagagtttgttgagaaaggtgacagaagcagaccctt

SEQ ID NO: 308911 - DNA, 349 bp, Homo sapiens
gcgttggcttcgaggggagtggcgggccgtggggatcgcggccgtggttgggacggccgggggtctcggcgagggcttcagggctcccggggcatgcgggggcccgggctagggccggctgccggtgctggtcgggcggggcgggtcgggccgggggcgggctggcaggggccgcgtctgggcctccgtgacgcggacgccgagccctgccccagggagcgggaggcgggaggcgggggccaggcggctcctcctcgtcgcgaactctggatgaccttggccaaatcgcttcagttccccgagctggcgacttcgtctgtaaaatgcgagtcatagccctgtctcctag

SEQ ID NO: 308912 - DNA, 182 bp, Homo sapiens
tccatggttatgattaagaggtttttgtggacaattcatacttatcaaagtcattagagacttaataatactataaataccagtttgtttcttttttcttttttttgagacagggtctcactctgtcacccagactgcagtgcagtggcacgatctcggctcactacaagccttgacctcca

SEQ ID NO: 308913 - DNA, 412 bp, Homo sapiens
agtacattgtggcatacccagcattctggggttgttctgcacctatctttggcctcctgtcttactgtcttctttctcttcccatgaagattcacagccatttcccacacaaacccattatcttgattggctggaacacaggagctttggtggcctgtcatgtaagtaatttctatcttatttggaggttgtcctgggatggaataccactaatcatagctaccattgagtcctttactgtgtgtcaggctctgcgctagatactttacctatataattacattttaaactgtagaagacaaattttattaaaacaatttttaatttattttggaaaactttaagcagaaacaaaagcaggtgtagtataataaacccccggatcctcacccagctttaccagtgatcaact

SEQ ID NO: 308914 - DNA, 424 bp, Homo sapiens
tggctgatcctccttagtggagtttctgggtcagtgctttgtgaatatgaagaagccgattctaaaacctatacctgttttaggatgtagatgatcccctcttggatatgaagactccagtcctctttgtcattggtcagaattcccttcaatgtcaccctgaagccatggaggacttccgggagaagattcgagctgagaacagcttggtggtggttgggggagctgatgacaatctcaggtgggtggattctcccagagctgcaagagagctgtgttacagtgttagagataagcctggaagctggcaatgtaactacagaccagtctggttcagttaaaagacagcattagccgggcgcggtggctcacgcctgtaatcccaggactttgggaggctgaggcaggcggatcacgaggtcag

SEQ ID NO: 308915 - DNA, 204 bp, Homo sapiens
tgtcctgtgacctttggataacagagctccttcctttgtctccaggtccagttcttctgaaggtggagtctcagccagcccagtcccttcagtggtctccagcagcactgcacccagtgccttgcacacactgcagagccgcctggtggccacatctcctggcagctccctcccaggtatcttgtggcccagcattctcccctt

SEQ ID NO: 308916 - DNA, 389 bp, Homo sapiens
cagtaagacctccaaacgaccgaagatcaaggtgtcccttatctcccaaggggacacagctggagggccttgtgctccttcccaaggaagtgctccagaaggtgagtttctcttggtacgttaaatgagaactgagctctctcaggtacacagcattgccctttggtggccattcaccagcatgtcagcctttgctttattttgagagatgcccggagcaaagaagacatgagtctgtacatgtgggtaaagttggcatgagtccatctgaatgaggaccaggcaggcagaatatgagaggaagctgtgccatcgttcaaagcatcctatattttgttctttttttgttggcttcaattaaaggtacagaatatttcaggaagtttaga

SEQ ID NO: 308917 - DNA, 352 bp, Homo sapiens
agagaaacactgacagattcttgtctttggcttatctttctccagtctccttgtggaccaccacccttctgttatgacattgccacattgccacagattgatgtaatccattaaagctcaatttatcagattatttgttttcttagtgtctgatgagattttggaggccttctctcattggcagcaggcttacacaccatctcttttggtaggtaacttttgtacatagccgattttattatttatgataacttattagtttcagtttcagataccaccattttatgaccctgtccctgaatctgtagcctgtttggagcttgcagttccttctgctctgattataatcatc

SEQ ID NO: 308918 - DNA, 949 bp, Homo sapiens
ctcaatgcaagctctccctcctgggttcacgccattttcctgtctcagcctcccgagtagctgggactacaggcactcgccaccacgcccgcctaatttttttgtatttttagtagagacaaggtttcaccatgttagccaggatggtctcgatctcctgaccttgtgatccgcccacctcggcctcccaaagtgctgagattacaggcgtgagccaccgcacctggccagaacttaatttttttttttaaattttcactctaccaagtctcaggcgctgattaggactttataaataatgaagtcaaactaatattttttcagttaaatagtagattaccttggtgcaaagcaggtaacatttctatcccatggctgccatttaaatctctagaaaagtgatctgggaaagcatagtaattgatacctttgctagctgttttaagttttcagtgttataaacatgaatggatattgacttatttttaggaaacgtaaatattttcaccacgatcgattagactgggatgaacacagttctgccggcagatatgtttcaagacgctgtaaacctctgaaggaatttatgctttctcaagatgttgaacatgagcgtctctttgacctcattcagaaaatgttggagtatgatccagccaaaagaattactctcagagaagccttaaagcatcctttctttgaccttctgaagaaaagtatatagatctgtaattggacagctctctcgaagagatcttacagactgtatcagtctaatttttaaattttaagttattttgtacagctttgtaaattcttaacatttttatattgccatgtttattttgtttgggtaatttggttcattaagtacatagctaaggtaatgaacatctttttcagtaattgtaaagtgatttattcagaataaattttttgtgcttatgaa

SEQ ID NO: 308919 - DNA, 1835 bp, Homo sapiens
atttttagataatcattaaagaccacagaaaatgtaacagatcctactcttcaaaataattgctattcagtattaaaacgagcagtcagctgcgtgattcccgtgattgcgttacaagctttgtctccttcgacttggagtctttgtccaggacgatgagacactcaaagagaacttactgtcctgattgggatgacaaggattgggattatggaaaatggaggagcagcagcagtcataaaagaaggaagagatcacatagcagtgcccaggagaacaagcgctgcaaatacaatcactctaaaatgtgtgatagccattatttggaaagcaggtctataaatgagaaagattatcatagtcgacgctacattgatgagtacagaaatgactacactcaaggatgtgaacctggacatcgccaaagagaccatgaaagccggtatcagaaccatagtagcaagtcttctggtagaagtggaagaagtagttataaaagcaaacacaggattcaccacagtacttcacatcgtcgttcacatgggaagagtcaccgaaggaaaagaaccaggagtgtagaggatgatgaggagggtcacctgatctgtcagagtggagacgtactaagtgcaagatatgaaattgttgatactttaggtgaaggagcttttggaaaagttgtggagtgcatcgatcataaagcgggaggtagacatgtagcagtaaaaatagttaaaaatgtggatagatactgtgaagctgctcgctcagaaatacaagttctggaacatctgaatacaacagaccccaacagtactttccgctgtgtccagatgttggaatggtttgagcatcatggtcacatttgcattgtttttgaactattgggacttagtacttacgacttcattaaagaaaatggttttctaccatttcgactggatcatatcagaaagatggcatatcagatatgcaagtctgtgaattttttgcacagtaataagttgactcacacagacttaaagcctgaaaacatcttatttgtgcagtctgactacacagaggcgtataatcccaaaataaaacgtgatgaacgcaccttaataaatccagatattaaagttgtagactttggtagtgcaacatatgatgacgaacatcacagtacattggtatctacaagacattatagagcacctgaagttattttagccctagggtggtcccaaccatgtgatgtctggagcataggatgcattcttattgaatactatcttgggtttaccgtatttccaacacacgatagtaaggagcatttagcaatgatggaaaggattcttggacctctaccaaaacatatgatacagaaaaccaggaaacgtaaatattttcaccacgatcgattagactgggatgaacacagttctgccggcagatatgtttcaagacgctgtaaacctctgaaggaatttatgctttctcaagatgttgaacatgagcgtctctttgacctcattcagaaaatgttggagtatgatccagccaaaagaattactctcagagaagccttaaagcatcctttctttgaccttctgaagaaaagtatatagatctgtaattggacagctctctcgaagagatcttacagactgtatcagtctaatttttaaattttaagttattttgtacagctttgtaaattcttaacatttttatattgccatgtttattttgtttgggtaatttggttcattaagtacatagctaaggtaatgaacatctttttcagtaattgtaaagtgatttattcagaataaattttttgtgcttatgaa

SEQ ID NO: 308920 - DNA, 1744 bp, Homo sapiens
atttttagataatcattaaagaccacagaaaatgtaacagatcctactcttcaaaataattgctattcagtattaaaacgagcagtcagctgcgtgattcccgtgattgcgttacaagctttgtctccttcgacttggagtctttgtccaggacgatgagacactcaaagagaacttactgtcctgattgggatgacaaggattgggattatggaaaatggaggagcagcagcagtcataaaagaaggaagagatcacatagcagtgcccaggagaacaagcgctgcaaatacaatcactctaaaatgtgtgatagccattatttggaaagcaggtctataaatgagaaagattatcatagtcgacgctacattgatgagtacagaaatgactacactcaaggatgtgaacctggacatcgccaaagagaccatgaaagccggtatcagaaccatagtagcaagtcttctggtagaagtggaagaagtagttataaaagcaaacacaggattcaccacagtacttcacatcgtcgttcacatgggatgaaattgttgatactttaggtgaaggagcttttggaaaagttgtggagtgcatcgatcataaagcgggaggtagacatgtagcagtaaaaatagttaaaaatgtggatagatactgtgaagctgctcgctcagaaatacaagttctggaacatctgaatacaacagaccccaacagtactttccgctgtgtccagatgttggaatggtttgagcatcatggtcacatttgcattgtttttgaactattgggacttagtacttacgacttcattaaagaaaatggttttctaccatttcgactggatcatatcagaaagatggcatatcagatatgcaagtctgtgaattttttgcacagtaataagttgactcacacagacttaaagcctgaaaacatcttatttgtgcagtctgactacacagaggcgtataatcccaaaataaaacgtgatgaacgcaccttaataaatccagatattaaagttgtagactttggtagtgcaacatatgatgacgaacatcacagtacattggtatctacaagacattatagagcacctgaagttattttagccctagggtggtcccaaccatgtgatgtctggagcataggatgcattcttattgaatactatcttgggtttaccgtatttccaacacacgatagtaaggagcatttagcaatgatggaaaggattcttggacctctaccaaaacatatgatacagaaaaccaggaaacgtaaatattttcaccacgatcgattagactgggatgaacacagttctgccggcagatatgtttcaagacgctgtaaacctctgaaggaatttatgctttctcaagatgttgaacatgagcgtctctttgacctcattcagaaaatgttggagtatgatccagccaaaagaattactctcagagaagccttaaagcatcctttctttgaccttctgaagaaaagtatatagatctgtaattggacagctctctcgaagagatcttacagactgtatcagtctaatttttaaattttaagttattttgtacagctttgtaaattcttaacatttttatattgccatgtttattttgtttgggtaatttggttcattaagtacatagctaaggtaatgaacatctttttcagtaattgtaaagtgatttattcagaataaattttttgtgcttatgaa

SEQ ID NO: 308921 - DNA, 549 bp, Homo sapiens
  misc_feature (39)..(39): n is a, c, g, or t
gcggccgcctactactactactactactactaattcgcngcgctcgagattcttggacctctaccaaaacatatgatacagaaaaccaggaaacgtaaatattttcaccacgatcgattagactgggatgaacacagttctgccggcagatatgtttcaagacgctgtaaacctctgaaggaatttatgctttctcaagatgttgaacatgagcgtctctttgacctcattcagaaaatgttggagtatgatccagccaaaagaattactctcagagaagccttaaagcatcctttctttgaccttctgaagaaaagtatatagatctgtaattggacagctctctcgaagagatcttacagactgtatcagtctaatttttaaattttaagttattttgtacagctttgtaaattcttaacatttttatattgccatgtttattttgtttgggtaatttggttcattaagtacatagctaaggtaatgaacatctttttcagtaattgtaaagtgatttattcagaataaattttttgtgcttatgaa

SEQ ID NO: 308922 - DNA, 801 bp, Homo sapiens
ctcaatgcaagctctccctcctgggttcacgccattttcctgtctcagcctcccgagtagctgggactacaggcactcgccaccacgcccgcctaatttttttgtatttttagtagagacaaggtttcaccatgttagccaggatggtctcgatctcctgaccttgtgatccgcccacctcggcctcccaaagtgctgagattacaggcgtgagccaccgcacctggccagaacttaatttttttttttaaattttcactctaccaagtctcaggcgctgattaggactttataaataatgaagtcaaactaatattttttcagttaaatagtagattaccttggtgcaaagcaggtaacatttctatcccatggctgccatttaaatctctagaaaagtgatctgggaaagcatagtaattgatacctttgctagctgttttaagttttcagtgttataaacatgaatggatattgacttatttttaggaaacgtaaatattttcaccacgatcgattagactgggatgaacacagttctgccggcagatatgtttcaagacgctgtaaacctctgaaggtaagcctttgagacattgctcaaatagtcaaaactgagtttcttctgtttgtcttttgagaccgagccttgcttcgttgtccaggctggagtagagtggcacgatgttggcccagctcactgcaacctctgcatcctaggctcaagcaggtctcagcctcccaagtagctgggattacagatggatgccaccacgctttttttttttttttttttttttt

SEQ ID NO: 308923 - DNA, 3221 bp, Homo sapiens
atcgagtgttttcgagacgagtctcgacgcagcagctgtcagctccattttgttgttggtgcgcgacgcagtcagctgcgtgattcccgtgattgcgttacaagctttgtctccttcgacttggagtctttgtccaggacgatgagacactcaaagagaacttactgtcctgattgggatgacaaggattgggattatggaaaatggaggagcagcagcagtcataaaagaaggaagagatcacatagcagtgcccaggagaacaagcgctgcaaatacaatcactctaaaatgtgtgatagccattatttggaaagcaggtctataaatgagaaagattatcatagtcgacgctacattgatgagtacagaaatgactacactcaaggatgtgaacctggacatcgccaaagagaccatgaaagccggtatcagaaccatagtagcaagtcttctggtagaagtggaagaagtagttataaaagcaaacacaggattcaccacagtacttcacatcgtcgttcacatggggtatgaacgtttttaaaacattttggaaattttatatcccatgtggaacagggaaacttgaatttttgtgtttgattatttgagaaagttttaagatgaaatcatctcagttttaacctgcaggattttttctgtgtttgtgcattggataggaaattccggaaataaagtacacatttagttctataatttaattattggttggctcctaattgacattccagtgaaatgatgggagttaattgatttaatttagattagttgaaaattattacaaaatattctaaaagggttttttgtggtacttcaagaaacctgattagttttgatctattgaaatcacaaaagtagaacagggcattttatttttgtataatttaggattaggtatgcttctttgttctaacaagtcatgttttctaacccttctttcactaagcaaaccagaacagatttgaactgttatgggttatatattagtatggagatcagctcagatgacattaaaaatgccgtagtgttattcttgtatgccaaatctttttttccccaaaattagcactttaattttatttactgttataatatttgttttcttagattaggtaggaaatcttaatttggccaccgcctactttgacaagtaaatattacatcatacgattttgcaacattaaattagaacactagaaactaaaaaattatgtttcagtgaatgctacaactaagcattttttttttttaagaaaaacaattgtattatgttttgttgccttgccactttgagtatcttatctgaaaatctgttccttgccatgtttttctcctgttaacataaactatgtgccctgtgaatttctggggactgaatttgaaattgctcctgccaaccgtttgtggcctggcgtgtatctgaatgcctgaatatctccccgctgaatgaatttcgtattctgccctgaattcactcgggtatattgattggctggatgatcttggtgccgcccacttgacgtttccagaagagtcaccgaaggaaaagaaccaggagtgtagaggatgatgaggagggtcacctgatctgtcagagtggagacgtactaagtgcaagatgtatagaatatttttcaacacttattaacttttcagataacataatctatatatagattaagctttcagggatttggaaatctttttttctttctcttttttgtttttgttttatttttccatttcttttggtgggggggattgtatttttgctttctttagaaatgtaatgtttgttatatagaacttccagaacagtaatcaaattaatgaaattagacctaataattatgttttttgatggtgttgaccaataaaatatctagtgataaggaaatttgtagcatcaactagaataatctacattgatagcatttattgtgataagtacattgtttccacttcttgatatgactgagatttatttctctcttttagatgaaattgttgatactttaggtgaaggagcttttggaaaagttgtggagtgcatcgatcataaagcgggaggtagacatgtagcagtaaaaatagttaaaaatgtggatagatactgtgaagctgctcgctcagaaatacaagttctggaacatctgaatacaacagaccccaacagtactttccgctgtgtccagatgttggaatggtttgagcatcatggtcacatttgcattgtttttgaactattgggacttagtacttacgacttcattaaagaaaatggttttctaccatttcgactggatcatatcagaaagatggcatatcagatatgcaagtctgtgaattttttgcacagtaataagttgactcacacagacttaaagcctgaaaacatcttatttgtgcagtctgactacacagaggcgtataatcccaaaataaaacgtgatgaacgcaccttaataaatccagatattaaagttgtagactttggtagtgcaacatatgatgacgaacatcacagtacattggtatctacaagacattatagagcacctgaagttattttagccctagggtggtcccaaccatgtgatgtctggagcataggatgcattcttattgaatactatcttgggtttaccgtatttccaacacacgatagtaaggagcatttagcaatgatggaaaggattcttggacctctaccaaaacatatgatacagaaaaccaggaaacgtaaatattttcaccacgatcgattagactgggatgaacacagttctgccggcagatatgtttcaagacgctgtaaacctctgaaggaatttatgctttctcaagatgttgaacatgagcgtctctttgacctcattcagaaaatgttggagtatgatccagccaaaagaattactctcagagaagccttaaagcatcctttctttgaccttctgaagaaaagtatatagatctgtaattggacagctctctcgaagagatcttacagactgtatcagtctaatttttaaattttaagttattttgtacagctttgtaaattcttaacatttttatattgccatgtttattttgtttgggtaatttggttcattaagtacatagctaaggtaatgaacatctttttcagtaattgtaaagtgatttattcagaataaattttttgtgcttatgaa

SEQ ID NO: 308924 - DNA, 3953 bp, Homo sapiens
atcgagtgttttcgagacgagtctcgacgcagcagctgtcagctccattttgttgttggtgcgcgacgcagtcagctgcgtgattcccgtgattgcgttacaagctttgtctccttcgacttggagtctttgtccaggacgatgagacactcaaagagaacttactgtcctgattgggatgacaaggattgggattatggaaaatggaggagcagcagcagtcataaaagaaggaagagatcacatagcagtgcccaggagaacaagcgctgcaaatacaatcactctaaaatgtgtgatagccattatttggaaagcaggtctataaatgagaaagattatcatagtcgacgctacattgatgagtacagaaatgactacactcaaggatgtgaacctggacatcgccaaagagaccatgaaagccggtatcagaaccatagtagcaagtcttctggtagaagtggaagaagtagttataaaagcaaacacaggattcaccacagtacttcacatcgtcgttcacatggggtatgaacgtttttaaaacattttggaaattttatatcccatgtggaacagggaaacttgaatttttgtgtttgattatttgagaaagttttaagatgaaatcatctcagttttaacctgcaggattttttctgtgtttgtgcattggataggaaattccggaaataaagtacacatttagttctataatttaattattggttggctcctaattgacattccagtgaaatgatgggagttaattgatttaatttagattagttgaaaattattacaaaatattctaaaagggttttttgtggtacttcaagaaacctgattagttttgatctattgaaatcacaaaagtagaacagggcattttatttttgtataatttaggattaggtatgcttctttgttctaacaagtcatgttttctaacccttctttcactaagcaaaccagaacagatttgaactgttatgggttatatattagtatggagatcagctcagatgacattaaaaatgccgtagtgttattcttgtatgccaaatctttttttccccaaaattagcactttaattttatttactgttataatatttgttttcttagattaggtaggaaatcttaatttggccaccgcctactttgacaagtaaatattacatcatacgattttgcaacattaaattagaacactagaaactaaaaaattatgtttcagtgaatgctacaactaagcattttttttttttaagaaaaacaattgtattatgttttgttgccttgccactttgagtatcttatctgaaaatctgttccttgccatgtttttctcctgttaacataaactatgtgccctgtgaatttctggggactgaatttgaaattgctcctgccaaccgtttgtggcctggcgtgtatctgaatgcctgaatatctccccgctgaatgaatttcgtattctgccctgaattcactcgggtatattgattggctggatgatcttggtgccgcccacttgacgtttccagaagagtcaccgaaggaaaagaaccaggagtgtagaggatgatgaggagggtcacctgatctgtcagagtggagacgtactaagtgcaagatgtatagaatatttttcaacacttattaacttttcagataacataatctatatatagattaagctttcagggatttggaaatctttttttctttctcttttttgtttttgttttatttttccatttcttttggtgggggggattgtatttttgctttctttagaaatgtaatgtttgttatatagaacttccagaacagtaatcaaattaatgaaattagacctaataattatgttttttgatggtgttgaccaataaaatatctagtgataaggaaatttgtagcatcaactagaataatctacattgatagcatttattgtgataagtacattgtttccacttcttgatatgactgagatttatttctctcttttagatgaaattgttgatactttaggtgaaggagcttttggaaaagttgtggagtgcatcgatcataaagcgggaggtagacatgtagcagtaaaaatagttaaaaatgtggatagatactgtgaagctgctcgctcagaaatacaagttctggaacatctgaatacaacagaccccaacagtactttccgctgtgtccagatgttggaatggtttgagcatcatggtcacatttgcattgtttttgaactattgggacttagtacttacgacttcattaaagaaaatggttttctaccatttcgactggatcatatcagaaagatggcatatcagatatgcaagtctgtgaattgtaagttcttggtatatcttcgttaatttgctggttttatccattccacatatcaaaatgtgcatcctaagtgtgtacaatttttatttgattaaaaataaagggggaggaagaataggtatgaagagatttgattacaggctgttgatccagcagtgtacatttcattcagcaagtaggatatccaccatataacaacgtactttgttgcagactatgatttagacttttctgatgcgcaaaaatagtaacttcgaatgctgggtaaaaattaaggcgtgatatatctcataaaagaaagcttcataagaggtagtaagttttagttactggtgattttctagcagactggaatgttgaccattctttgggaaaggaatcagaggttttttgttgggtttttttgttttttgaaatggagtctcgctttgttgttcaggctgaagtgcagtggcgcagtcttcactcactgcaaactctgcctccccagttcaagtgattctcctgcctcagcctcccgagtagctaggactacaggcacacgccaccacacccggccaatttttgtaattttggtagagacagggtttcaccatattggtcaggctggtctcgaactcctgacctcaggtgattacaggcgtgagccactgcacccggcctgttgtggggttttgtgatttggtttggtttggtgttttctgattacagcaactttctctttattctcagttttgcacagtaataagttgactcacacagacttaaagcctgaaaacatcttatttgtgcagtctgactacacagaggcgtataatcccaaaataaaacgtgatgaacgcaccttaataaatccagatattaaagttgtagactttggtagtgcaacatatgatgacgaacatcacagtacattggtatctacaagacattatagagcacctgaagttattttagccctagggtggtcccaaccatgtgatgtctggagcataggatgcattcttattgaatactatcttgggtttaccgtatttccaacacacgatagtaaggagcatttagcaatgatggaaaggattcttggacctctaccaaaacatatgatacagaaaaccaggaaacgtaaatattttcaccacgatcgattagactgggatgaacacagttctgccggcagatatgtttcaagacgctgtaaacctctgaaggaatttatgctttctcaagatgttgaacatgagcgtctctttgacctcattcagaaaatgttggagtatgatccagccaaaagaattactctcagagaagccttaaagcatcctttctttgaccttctgaagaaaagtatatagatctgtaattggacagctctctcgaagagatcttacagactgtatcagtctaatttttaaattttaagttattttgtacagctttgtaaattcttaacatttttatattgccatgtttattttgtttgggtaatttggttcattaagtacatagctaaggtaatgaacatctttttcagtaattgtaaagtgatttattcagaataaattttttgtgcttatgaa

SEQ ID NO: 308925 - DNA, 3183 bp, Homo sapiens
atcgagtgttttcgagacgagtctcgacgcagcagctgtcagctccattttgttgttggtgcgcgacgcagtcagctgcgtgattcccgtgattgcgttacaagctttgtctccttcgacttggagtctttgtccaggacgatgagacactcaaagagaacttactgtcctgattgggatgacaaggattgggattatggaaaatggaggagcagcagcagtcataaaagaaggaagagatcacatagcagtgcccaggagaacaagcgctgcaaatacaatcactctaaaatgtgtgatagatcatagtcgacgctacattgatgagtacagaaatgactacactcaaggatgtgaacctggacatcgccaaagagaccatgaaagccggtatcagaaccatagtagcaagtcttctggtagaagtggaagaagtagttataaaagcaaacacaggattcaccacagtacttcacatcgtcgttcacatggggtatgaacgtttttaaaacattttggaaattttatatcccatgtggaacagggaaacttgaatttttgtgtttgattatttgagaaagttttaagatgaaatcatctcagttttaacctgcaggattttttctgtgtttgtgcattggataggaaattccggaaataaagtacacatttagttctataatttaattattggttggctcctaattgacattccagtgaaatgatgggagttaattgatttaatttagattagttgaaaattattacaaaatattctaaaagggttttttgtggtacttcaagaaacctgattagttttgatctattgaaatcacaaaagtagaacagggcattttatttttgtataatttaggattaggtatgcttctttgttctaacaagtcatgttttctaacccttctttcactaagcaaaccagaacagatttgaactgttatgggttatatattagtatggagatcagctcagatgacattaaaaatgccgtagtgttattcttgtatgccaaatctttttttccccaaaattagcactttaattttatttactgttataatatttgttttcttagattaggtaggaaatcttaatttggccaccgcctactttgacaagtaaatattacatcatacgattttgcaacattaaattagaacactagaaactaaaaaattatgtttcagtgaatgctacaactaagcattttttttttttaagaaaaacaattgtattatgttttgttgccttgccactttgagtatcttatctgaaaatctgttccttgccatgtttttctcctgttaacataaactatgtgccctgtgaatttctggggactgaatttgaaattgctcctgccaaccgtttgtggcctggcgtgtatctgaatgcctgaatatctccccgctgaatgaatttcgtattctgccctgaattcactcgggtatattgattggctggatgatcttggtgccgcccacttgacgtttccagaagagtcaccgaaggaaaagaaccaggagtgtagaggatgatgaggagggtcacctgatctgtcagagtggagacgtactaagtgcaagatgtatagaatatttttcaacacttattaacttttcagataacataatctatatatagattaagctttcagggatttggaaatctttttttctttctcttttttgtttttgttttatttttccatttcttttggtgggggggattgtatttttgctttctttagaaatgtaatgtttgttatatagaacttccagaacagtaatcaaattaatgaaattagacctaataattatgttttttgatggtgttgaccaataaaatatctagtgataaggaaatttgtagcatcaactagaataatctacattgatagcatttattgtgataagtacattgtttccacttcttgatatgactgagatttatttctctcttttagatgaaattgttgatactttaggtgaaggagcttttggaaaagttgtggagtgcatcgatcataaagcgggaggtagacatgtagcagtaaaaatagttaaaaatgtggatagatactgtgaagctgctcgctcagaaatacaagttctggaacatctgaatacaacagaccccaacagtactttccgctgtgtccagatgttggaatggtttgagcatcatggtcacatttgcattgtttttgaactattgggacttagtacttacgacttcattaaagaaaatggttttctaccatttcgactggatcatatcagaaagatggcatatcagatatgcaagtctgtgaattttttgcacagtaataagttgactcacacagacttaaagcctgaaaacatcttatttgtgcagtctgactacacagaggcgtataatcccaaaataaaacgtgatgaacgcaccttaataaatccagatattaaagttgtagactttggtagtgcaacatatgatgacgaacatcacagtacattggtatctacaagacattatagagcacctgaagttattttagccctagggtggtcccaaccatgtgatgtctggagcataggatgcattcttattgaatactatcttgggtttaccgtatttccaacacacgatagtaaggagcatttagcaatgatggaaaggattcttggacctctaccaaaacatatgatacagaaaaccaggaaacgtaaatattttcaccacgatcgattagactgggatgaacacagttctgccggcagatatgtttcaagacgctgtaaacctctgaaggaatttatgctttctcaagatgttgaacatgagcgtctctttgacctcattcagaaaatgttggagtatgatccagccaaaagaattactctcagagaagccttaaagcatcctttctttgaccttctgaagaaaagtatatagatctgtaattggacagctctctcgaagagatcttacagactgtatcagtctaatttttaaattttaagttattttgtacagctttgtaaattcttaacatttttatattgccatgtttattttgtttgggtaatttggttcattaagtacatagctaaggtaatgaacatctttttcagtaattgtaaagtgatttattcagaataaattttttgtgcttatgaa

SEQ ID NO: 308926 - DNA, 3237 bp, Homo sapiens
atgttgtgaaccgcctcggcggagctgtaagatggcggctgggcggaggccggcttcggccctgtggccggaaaggcgaggctccccgttgaggggggatttgctggggttccagaatgtgcgtgagccaagcagctgtggggaaacgttgtctggaatgagacactcaaagagaacttactgtcctgattgggatgacaaggattgggattatggaaaatggaggagcagcagcagtcataaaagaaggaagagatcacatagcagtgcccaggagaacaagcgctgcaaatacaatcactctaaaatgtgtgatagccattatttggaaagcaggtctataaatgagaaagattatcatagtcgacgctacattgatgagtacagaaatgactacactcaaggatgtgaacctggacatcgccaaagagaccatgaaagccggtatcagaaccatagtagcaagtcttctggtagaagtggaagaagtagttataaaagcaaacacaggattcaccacagtacttcacatcgtcgttcacatggggtatgaacgtttttaaaacattttggaaattttatatcccatgtggaacagggaaacttgaatttttgtgtttgattatttgagaaagttttaagatgaaatcatctcagttttaacctgcaggattttttctgtgtttgtgcattggataggaaattccggaaataaagtacacatttagttctataatttaattattggttggctcctaattgacattccagtgaaatgatgggagttaattgatttaatttagattagttgaaaattattacaaaatattctaaaagggttttttgtggtacttcaagaaacctgattagttttgatctattgaaatcacaaaagtagaacagggcattttatttttgtataatttaggattaggtatgcttctttgttctaacaagtcatgttttctaacccttctttcactaagcaaaccagaacagatttgaactgttatgggttatatattagtatggagatcagctcagatgacattaaaaatgccgtagtgttattcttgtatgccaaatctttttttccccaaaattagcactttaattttatttactgttataatatttgttttcttagattaggtaggaaatcttaatttggccaccgcctactttgacaagtaaatattacatcatacgattttgcaacattaaattagaacactagaaactaaaaaattatgtttcagtgaatgctacaactaagcattttttttttttaagaaaaacaattgtattatgttttgttgccttgccactttgagtatcttatctgaaaatctgttccttgccatgtttttctcctgttaacataaactatgtgccctgtgaatttctggggactgaatttgaaattgctcctgccaaccgtttgtggcctggcgtgtatctgaatgcctgaatatctccccgctgaatgaatttcgtattctgccctgaattcactcgggtatattgattggctggatgatcttggtgccgcccacttgacgtttccagaagagtcaccgaaggaaaagaaccaggagtgtagaggatgatgaggagggtcacctgatctgtcagagtggagacgtactaagtgcaagatgtatagaatatttttcaacacttattaacttttcagataacataatctatatatagattaagctttcagggatttggaaatctttttttctttctcttttttgtttttgttttatttttccatttcttttggtgggggggattgtatttttgctttctttagaaatgtaatgtttgttatatagaacttccagaacagtaatcaaattaatgaaattagacctaataattatgttttttgatggtgttgaccaataaaatatctagtgataaggaaatttgtagcatcaactagaataatctacattgatagcatttattgtgataagtacattgtttccacttcttgatatgactgagatttatttctctcttttagatgaaattgttgatactttaggtgaaggagcttttggaaaagttgtggagtgcatcgatcataaagcgggaggtagacatgtagcagtaaaaatagttaaaaatgtggatagatactgtgaagctgctcgctcagaaatacaagttctggaacatctgaatacaacagaccccaacagtactttccgctgtgtccagatgttggaatggtttgagcatcatggtcacatttgcattgtttttgaactattgggacttagtacttacgacttcattaaagaaaatggttttctaccatttcgactggatcatatcagaaagatggcatatcagatatgcaagtctgtgaattttttgcacagtaataagttgactcacacagacttaaagcctgaaaacatcttatttgtgcagtctgactacacagaggcgtataatcccaaaataaaacgtgatgaacgcaccttaataaatccagatattaaagttgtagactttggtagtgcaacatatgatgacgaacatcacagtacattggtatctacaagacattatagagcacctgaagttattttagccctagggtggtcccaaccatgtgatgtctggagcataggatgcattcttattgaatactatcttgggtttaccgtatttccaacacacgatagtaaggagcatttagcaatgatggaaaggattcttggacctctaccaaaacatatgatacagaaaaccaggaaacgtaaatattttcaccacgatcgattagactgggatgaacacagttctgccggcagatatgtttcaagacgctgtaaacctctgaaggaatttatgctttctcaagatgttgaacatgagcgtctctttgacctcattcagaaaatgttggagtatgatccagccaaaagaattactctcagagaagccttaaagcatcctttctttgaccttctgaagaaaagtatatagatctgtaattggacagctctctcgaagagatcttacagactgtatcagtctaatttttaaattttaagttattttgtacagctttgtaaattcttaacatttttatattgccatgtttattttgtttgggtaatttggttcattaagtacatagctaaggtaatgaacatctttttcagtaattgtaaagtgatttattcagaataaattttttgtgcttatgaa

SEQ ID NO: 308927 - DNA, 3322 bp, Homo sapiens
tcgttgtttttccctgtgttcgctggtgcttattttcatgcgtgcgccaccgctccatgtccctttgaaatgaggacaggagctgccagtcacagcggctgcactaacactctcaggtctgtgcaaactccatttgtcccagcaggcactttgctgagactctcaactgtgattgtagtatataagtggagcggtggggtgtggggtacaatttaactaggaaaaacttgccttttatgtagatgagacactcaaagagaacttactgtcctgattgggatgacaaggattgggattatggaaaatggaggagcagcagcagtcataaaagaaggaagagatcacatagcagtgcccaggagaacaagcgctgcaaatacaatcactctaaaatgtgtgatagccattatttggaaagcaggtctataaatgagaaagattatcatagtcgacgctacattgatgagtacagaaatgactacactcaaggatgtgaacctggacatcgccaaagagaccatgaaagccggtatcagaaccatagtagcaagtcttctggtagaagtggaagaagtagttataaaagcaaacacaggattcaccacagtacttcacatcgtcgttcacatggggtatgaacgtttttaaaacattttggaaattttatatcccatgtggaacagggaaacttgaatttttgtgtttgattatttgagaaagttttaagatgaaatcatctcagttttaacctgcaggattttttctgtgtttgtgcattggataggaaattccggaaataaagtacacatttagttctataatttaattattggttggctcctaattgacattccagtgaaatgatgggagttaattgatttaatttagattagttgaaaattattacaaaatattctaaaagggttttttgtggtacttcaagaaacctgattagttttgatctattgaaatcacaaaagtagaacagggcattttatttttgtataatttaggattaggtatgcttctttgttctaacaagtcatgttttctaacccttctttcactaagcaaaccagaacagatttgaactgttatgggttatatattagtatggagatcagctcagatgacattaaaaatgccgtagtgttattcttgtatgccaaatctttttttccccaaaattagcactttaattttatttactgttataatatttgttttcttagattaggtaggaaatcttaatttggccaccgcctactttgacaagtaaatattacatcatacgattttgcaacattaaattagaacactagaaactaaaaaattatgtttcagtgaatgctacaactaagcattttttttttttaagaaaaacaattgtattatgttttgttgccttgccactttgagtatcttatctgaaaatctgttccttgccatgtttttctcctgttaacataaactatgtgccctgtgaatttctggggactgaatttgaaattgctcctgccaaccgtttgtggcctggcgtgtatctgaatgcctgaatatctccccgctgaatgaatttcgtattctgccctgaattcactcgggtatattgattggctggatgatcttggtgccgcccacttgacgtttccagaagagtcaccgaaggaaaagaaccaggagtgtagaggatgatgaggagggtcacctgatctgtcagagtggagacgtactaagtgcaagatgtatagaatatttttcaacacttattaacttttcagataacataatctatatatagattaagctttcagggatttggaaatctttttttctttctcttttttgtttttgttttatttttccatttcttttggtgggggggattgtatttttgctttctttagaaatgtaatgtttgttatatagaacttccagaacagtaatcaaattaatgaaattagacctaataattatgttttttgatggtgttgaccaataaaatatctagtgataaggaaatttgtagcatcaactagaataatctacattgatagcatttattgtgataagtacattgtttccacttcttgatatgactgagatttatttctctcttttagatgaaattgttgatactttaggtgaaggagcttttggaaaagttgtggagtgcatcgatcataaagcgggaggtagacatgtagcagtaaaaatagttaaaaatgtggatagatactgtgaagctgctcgctcagaaatacaagttctggaacatctgaatacaacagaccccaacagtactttccgctgtgtccagatgttggaatggtttgagcatcatggtcacatttgcattgtttttgaactattgggacttagtacttacgacttcattaaagaaaatggttttctaccatttcgactggatcatatcagaaagatggcatatcagatatgcaagtctgtgaattttttgcacagtaataagttgactcacacagacttaaagcctgaaaacatcttatttgtgcagtctgactacacagaggcgtataatcccaaaataaaacgtgatgaacgcaccttaataaatccagatattaaagttgtagactttggtagtgcaacatatgatgacgaacatcacagtacattggtatctacaagacattatagagcacctgaagttattttagccctagggtggtcccaaccatgtgatgtctggagcataggatgcattcttattgaatactatcttgggtttaccgtatttccaacacacgatagtaaggagcatttagcaatgatggaaaggattcttggacctctaccaaaacatatgatacagaaaaccaggaaacgtaaatattttcaccacgatcgattagactgggatgaacacagttctgccggcagatatgtttcaagacgctgtaaacctctgaaggaatttatgctttctcaagatgttgaacatgagcgtctctttgacctcattcagaaaatgttggagtatgatccagccaaaagaattactctcagagaagccttaaagcatcctttctttgaccttctgaagaaaagtatatagatctgtaattggacagctctctcgaagagatcttacagactgtatcagtctaatttttaaattttaagttattttgtacagctttgtaaattcttaacatttttatattgccatgtttattttgtttgggtaatttggttcattaagtacatagctaaggtaatgaacatctttttcagtaattgtaaagtgatttattcagaataaattttttgtgcttatgaa

SEQ ID NO: 308928 - DNA, 2199 bp, Homo sapiens
atcgagtgttttcgagacgagtctcgacgcagcagctgtcagctccattttgttgttggtgcgcgacgcagtcagctgcgtgattcccgtgattgcgttacaagctttgtctccttcgacttggagtctttgtccaggacgatgagacactcaaagagaacttactgtcctgattgggatgacaaggattgggattatggaaaatggaggagcagcagcagtcataaaagaaggaagagatcacatagcagtgcccaggagaacaagcgctgcaaatacaatcactctaaaatgtgtgatagccattatttggaaagcaggtctataaatgagaaagattatcatagtcgacgctacattgatgagtacagaaatgactacactcaaggatgtgaacctggacatcgccaaagagaccatgaaagccggtatcagaaccatagtagcaagtcttctggtagaagtggaagaagtagttataaaagcaaacacaggattcaccacagtacttcacatcgtcgttcacatgggaagagtcaccgaaggaaaagaaccaggagtgtagaggatgatgaggagggtcacctgatctgtcagagtggagacgtactaagtgcaagatgtatagaatatttttcaacacttattaacttttcagataacataatctatatatagattaagctttcagggatttggaaatctttttttctttctcttttttgtttttgttttatttttccatttcttttggtgggggggattgtatttttgctttctttagaaatgtaatgtttgttatatagaacttccagaacagtaatcaaattaatgaaattagacctaataattatgttttttgatggtgttgaccaataaaatatctagtgataaggaaatttgtagcatcaactagaataatctacattgatagcatttattgtgataagtacattgtttccacttcttgatatgactgagatttatttctctcttttagatgaaattgttgatactttaggtgaaggagcttttggaaaagttgtggagtgcatcgatcataaagcgggaggtagacatgtagcagtaaaaatagttaaaaatgtggatagatactgtgaagctgctcgctcagaaatacaagttctggaacatctgaatacaacagaccccaacagtactttccgctgtgtccagatgttggaatggtttgagcatcatggtcacatttgcattgtttttgaactattgggacttagtacttacgacttcattaaagaaaatggttttctaccatttcgactggatcatatcagaaagatggcatatcagatatgcaagtctgtgaattttttgcacagtaataagttgactcacacagacttaaagcctgaaaacatcttatttgtgcagtctgactacacagaggcgtataatcccaaaataaaacgtgatgaacgcaccttaataaatccagatattaaagttgtagactttggtagtgcaacatatgatgacgaacatcacagtacattggtatctacaagacattatagagcacctgaagttattttagccctagggtggtcccaaccatgtgatgtctggagcataggatgcattcttattgaatactatcttgggtttaccgtatttccaacacacgatagtaaggagcatttagcaatgatggaaaggattcttggacctctaccaaaacatatgatacagaaaaccaggaaacgtaaatattttcaccacgatcgattagactgggatgaacacagttctgccggcagatatgtttcaagacgctgtaaacctctgaaggaatttatgctttctcaagatgttgaacatgagcgtctctttgacctcattcagaaaatgttggagtatgatccagccaaaagaattactctcagagaagccttaaagcatcctttctttgaccttctgaagaaaagtatatagatctgtaattggacagctctctcgaagagatcttacagactgtatcagtctaatttttaaattttaagttattttgtacagctttgtaaattcttaacatttttatattgccatgtttattttgtttgggtaatttggttcattaagtacatagctaaggtaatgaacatctttttcagtaattgtaaagtgatttattcagaataaattttttgtgcttatgaa

SEQ ID NO: 308929 - DNA, 2843 bp, Homo sapiens
atcgagtgttttcgagacgagtctcgacgcagcagctgtcagctccattttgttgttggtgcgcgacgcagtcagctgcgtgattcccgtgattgcgttacaagctttgtctccttcgacttggagtctttgtccaggacgatgagacactcaaagagaacttactgtcctgattgggatgacaaggattgggattatggaaaatggaggagcagcagcagtcataaaagaaggaagagatcacatagcagtgcccaggagaacaagcgctgcaaatacaatcactctaaaatgtgtgatagccattatttggaaagcaggtctataaatgagaaagattatcatagtcgacgctacattgatgagtacagaaatgactacactcaaggatgtgaacctggacatcgccaaagagaccatgaaagccggtatcagaaccatagtagcaagtcttctggtagaagtggaagaagtagttataaaagcaaacacaggattcaccacagtacttcacatcgtcgttcacatggggtatgaacgtttttaaaacattttggaaattttatatcccatgtggaacagggaaacttgaatttttgtgtttgattatttgagaaagttttaagatgaaatcatctcagttttaacctgcaggattttttctgtgtttgtgcattggataggaaattccggaaataaagtacacatttagttctataatttaattattggttggctcctaattgacattccagtgaaatgatgggagttaattgatttaatttagattagttgaaaattattacaaaatattctaaaagggttttttgtggtacttcaagaaacctgattagttttgatctattgaaatcacaaaagtagaacagggcattttatttttgtataatttaggattaggtatgcttctttgttctaacaagtcatgttttctaacccttctttcactaagcaaaccagaacagatttgaactgttatgggttatatattagtatggagatcagctcagatgacattaaaaatgccgtagtgttattcttgtatgccaaatctttttttccccaaaattagcactttaattttatttactgttataatatttgttttcttagattaggtaggaaatcttaatttggccaccgcctactttgacaagtaaatattacatcatacgattttgcaacattaaattagaacactagaaactaaaaaattatgtttcagtgaatgctacaactaagcattttttttttttaagaaaaacaattgtattatgttttgttgccttgccactttgagtatcttatctgaaaatctgttccttgccatgtttttctcctgttaacataaactatgtgccctgtgaatttctggggactgaatttgaaattgctcctgccaaccgtttgtggcctggcgtgtatctgaatgcctgaatatctccccgctgaatgaatttcgtattctgccctgaattcactcgggtatattgattggctggatgatcttggtgccgcccacttgacgtttccagaagagtcaccgaaggaaaagaaccaggagtgtagaggatgatgaggagggtcacctgatctgtcagagtggagacgtactaagtgcaagatatgaaattgttgatactttaggtgaaggagcttttggaaaagttgtggagtgcatcgatcataaagcgggaggtagacatgtagcagtaaaaatagttaaaaatgtggatagatactgtgaagctgctcgctcagaaatacaagttctggaacatctgaatacaacagaccccaacagtactttccgctgtgtccagatgttggaatggtttgagcatcatggtcacatttgcattgtttttgaactattgggacttagtacttacgacttcattaaagaaaatggttttctaccatttcgactggatcatatcagaaagatggcatatcagatatgcaagtctgtgaattttttgcacagtaataagttgactcacacagacttaaagcctgaaaacatcttatttgtgcagtctgactacacagaggcgtataatcccaaaataaaacgtgatgaacgcaccttaataaatccagatattaaagttgtagactttggtagtgcaacatatgatgacgaacatcacagtacattggtatctacaagacattatagagcacctgaagttattttagccctagggtggtcccaaccatgtgatgtctggagcataggatgcattcttattgaatactatcttgggtttaccgtatttccaacacacgatagtaaggagcatttagcaatgatggaaaggattcttggacctctaccaaaacatatgatacagaaaaccaggaaacgtaaatattttcaccacgatcgattagactgggatgaacacagttctgccggcagatatgtttcaagacgctgtaaacctctgaaggaatttatgctttctcaagatgttgaacatgagcgtctctttgacctcattcagaaaatgttggagtatgatccagccaaaagaattactctcagagaagccttaaagcatcctttctttgaccttctgaagaaaagtatatagatctgtaattggacagctctctcgaagagatcttacagactgtatcagtctaatttttaaattttaagttattttgtacagctttgtaaattcttaacatttttatattgccatgtttattttgtttgggtaatttggttcattaagtacatagctaaggtaatgaacatctttttcagtaattgtaaagtgatttattcagaataaattttttgtgcttatgaa

SEQ ID NO: 308930 - DNA, 1821 bp, Homo sapiens
atcgagtgttttcgagacgagtctcgacgcagcagctgtcagctccattttgttgttggtgcgcgacgcagtcagctgcgtgattcccgtgattgcgttacaagctttgtctccttcgacttggagtctttgtccaggacgatgagacactcaaagagaacttactgtcctgattgggatgacaaggattgggattatggaaaatggaggagcagcagcagtcataaaagaaggaagagatcacatagcagtgcccaggagaacaagcgctgcaaatacaatcactctaaaatgtgtgatagccattatttggaaagcaggtctataaatgagaaagattatcatagtcgacgctacattgatgagtacagaaatgactacactcaaggatgtgaacctggacatcgccaaagagaccatgaaagccggtatcagaaccatagtagcaagtcttctggtagaagtggaagaagtagttataaaagcaaacacaggattcaccacagtacttcacatcgtcgttcacatgggaagagtcaccgaaggaaaagaaccaggagtgtagaggatgatgaggagggtcacctgatctgtcagagtggagacgtactaagtgcaagatatgaaattgttgatactttaggtgaaggagcttttggaaaagttgtggagtgcatcgatcataaagcgggaggtagacatgtagcagtaaaaatagttaaaaatgtggatagatactgtgaagctgctcgctcagaaatacaagttctggaacatctgaatacaacagaccccaacagtactttccgctgtgtccagatgttggaatggtttgagcatcatggtcacatttgcattgtttttgaactattgggacttagtacttacgacttcattaaagaaaatggttttctaccatttcgactggatcatatcagaaagatggcatatcagatatgcaagtctgtgaattttttgcacagtaataagttgactcacacagacttaaagcctgaaaacatcttatttgtgcagtctgactacacagaggcgtataatcccaaaataaaacgtgatgaacgcaccttaataaatccagatattaaagttgtagactttggtagtgcaacatatgatgacgaacatcacagtacattggtatctacaagacattatagagcacctgaagttattttagccctagggtggtcccaaccatgtgatgtctggagcataggatgcattcttattgaatactatcttgggtttaccgtatttccaacacacgatagtaaggagcatttagcaatgatggaaaggattcttggacctctaccaaaacatatgatacagaaaaccaggaaacgtaaatattttcaccacgatcgattagactgggatgaacacagttctgccggcagatatgtttcaagacgctgtaaacctctgaaggaatttatgctttctcaagatgttgaacatgagcgtctctttgacctcattcagaaaatgttggagtatgatccagccaaaagaattactctcagagaagccttaaagcatcctttctttgaccttctgaagaaaagtatatagatctgtaattggacagctctctcgaagagatcttacagactgtatcagtctaatttttaaattttaagttattttgtacagctttgtaaattcttaacatttttatattgccatgtttattttgtttgggtaatttggttcattaagtacatagctaaggtaatgaacatctttttcagtaattgtaaagtgatttattcagaataaattttttgtgcttatgaa

SEQ ID NO: 308931 - DNA, 1730 bp, Homo sapiens
atcgagtgttttcgagacgagtctcgacgcagcagctgtcagctccattttgttgttggtgcgcgacgcagtcagctgcgtgattcccgtgattgcgttacaagctttgtctccttcgacttggagtctttgtccaggacgatgagacactcaaagagaacttactgtcctgattgggatgacaaggattgggattatggaaaatggaggagcagcagcagtcataaaagaaggaagagatcacatagcagtgcccaggagaacaagcgctgcaaatacaatcactctaaaatgtgtgatagccattatttggaaagcaggtctataaatgagaaagattatcatagtcgacgctacattgatgagtacagaaatgactacactcaaggatgtgaacctggacatcgccaaagagaccatgaaagccggtatcagaaccatagtagcaagtcttctggtagaagtggaagaagtagttataaaagcaaacacaggattcaccacagtacttcacatcgtcgttcacatgggatgaaattgttgatactttaggtgaaggagcttttggaaaagttgtggagtgcatcgatcataaagcgggaggtagacatgtagcagtaaaaatagttaaaaatgtggatagatactgtgaagctgctcgctcagaaatacaagttctggaacatctgaatacaacagaccccaacagtactttccgctgtgtccagatgttggaatggtttgagcatcatggtcacatttgcattgtttttgaactattgggacttagtacttacgacttcattaaagaaaatggttttctaccatttcgactggatcatatcagaaagatggcatatcagatatgcaagtctgtgaattttttgcacagtaataagttgactcacacagacttaaagcctgaaaacatcttatttgtgcagtctgactacacagaggcgtataatcccaaaataaaacgtgatgaacgcaccttaataaatccagatattaaagttgtagactttggtagtgcaacatatgatgacgaacatcacagtacattggtatctacaagacattatagagcacctgaagttattttagccctagggtggtcccaaccatgtgatgtctggagcataggatgcattcttattgaatactatcttgggtttaccgtatttccaacacacgatagtaaggagcatttagcaatgatggaaaggattcttggacctctaccaaaacatatgatacagaaaaccaggaaacgtaaatattttcaccacgatcgattagactgggatgaacacagttctgccggcagatatgtttcaagacgctgtaaacctctgaaggaatttatgctttctcaagatgttgaacatgagcgtctctttgacctcattcagaaaatgttggagtatgatccagccaaaagaattactctcagagaagccttaaagcatcctttctttgaccttctgaagaaaagtatatagatctgtaattggacagctctctcgaagagatcttacagactgtatcagtctaatttttaaattttaagttattttgtacagctttgtaaattcttaacatttttatattgccatgtttattttgtttgggtaatttggttcattaagtacatagctaaggtaatgaacatctttttcagtaattgtaaagtgatttattcagaataaattttttgtgcttatgaa

SEQ ID NO: 308932 - DNA, 1627 bp, Homo sapiens
atcgagtgttttcgagacgagtctcgacgcagcagctgtcagctccattttgttgttggtgcgcgacgcagtcagctgcgtgattcccgtgattgcgttacaagctttgtctccttcgacttggagtctttgtccaggacgatgagacactcaaagagaacttactgtcctgattgggatgacaaggattgggattatggaaaatggaggagcagcagcagtcataaaagaaggaagagatcacatagcagtgcccaggagaacaagcgctgcaaatacaatcactctaaaatgtgtgatagccattatttggaaagcaggtctataaatgagaaagattatcatagtcgacgctacattgatgagtacagaaatgactacactcaaggatgtgaacctggacatcgccaaagagaccatgaaagccgatgaaattgttgatactttaggtgaaggagcttttggaaaagttgtggagtgcatcgatcataaagcgggaggtagacatgtagcagtaaaaatagttaaaaatgtggatagatactgtgaagctgctcgctcagaaatacaagttctggaacatctgaatacaacagaccccaacagtactttccgctgtgtccagatgttggaatggtttgagcatcatggtcacatttgcattgtttttgaactattgggacttagtacttacgacttcattaaagaaaatggttttctaccatttcgactggatcatatcagaaagatggcatatcagatatgcaagtctgtgaattttttgcacagtaataagttgactcacacagacttaaagcctgaaaacatcttatttgtgcagtctgactacacagaggcgtataatcccaaaataaaacgtgatgaacgcaccttaataaatccagatattaaagttgtagactttggtagtgcaacatatgatgacgaacatcacagtacattggtatctacaagacattatagagcacctgaagttattttagccctagggtggtcccaaccatgtgatgtctggagcataggatgcattcttattgaatactatcttgggtttaccgtatttccaacacacgatagtaaggagcatttagcaatgatggaaaggattcttggacctctaccaaaacatatgatacagaaaaccaggaaacgtaaatattttcaccacgatcgattagactgggatgaacacagttctgccggcagatatgtttcaagacgctgtaaacctctgaaggaatttatgctttctcaagatgttgaacatgagcgtctctttgacctcattcagaaaatgttggagtatgatccagccaaaagaattactctcagagaagccttaaagcatcctttctttgaccttctgaagaaaagtatatagatctgtaattggacagctctctcgaagagatcttacagactgtatcagtctaatttttaaattttaagttattttgtacagctttgtaaattcttaacatttttatattgccatgtttattttgtttgggtaatttggttcattaagtacatagctaaggtaatgaacatctttttcagtaattgtaaagtgatttattcagaataaattttttgtgcttatgaa

SEQ ID NO: 308933 - DNA, 4041 bp, Homo sapiens
atcgagtgttttcgagacgagtctcgacgcagcagctgtcagctccattttgttgttggtgcgcgacgcagtcagctgcgtgattcccgtgattgcgttacaagctttgtctccttcgacttggagtctttgtccaggacgatgagacactcaaagagaacttactgtcctgattgggatgacaaggattgggattatggaaaatggaggagcagcagcagtcataaaagaaggaagagatcacatagcagtgcccaggagaacaagcgctgcaaatacaatcactctaaaatgtgtgatagccattatttggaaagcaggtctataaatgagaaagattatcatagtcgacgctacattgatgagtacagaaatgactacactcaaggatgtgaacctggacatcgccaaagagaccatgaaagccggtatcagaaccatagtagcaagtcttctggtagaagtggaagaagtagttataaaagcaaacacaggattcaccacagtacttcacatcgtcgttcacatggggtatgaacgtttttaaaacattttggaaattttatatcccatgtggaacagggaaacttgaatttttgtgtttgattatttgagaaagttttaagatgaaatcatctcagttttaacctgcaggattttttctgtgtttgtgcattggataggaaattccggaaataaagtacacatttagttctataatttaattattggttggctcctaattgacattccagtgaaatgatgggagttaattgatttaatttagattagttgaaaattattacaaaatattctaaaagggttttttgtggtacttcaagaaacctgattagttttgatctattgaaatcacaaaagtagaacagggcattttatttttgtataatttaggattaggtatgcttctttgttctaacaagtcatgttttctaacccttctttcactaagcaaaccagaacagatttgaactgttatgggttatatattagtatggagatcagctcagatgacattaaaaatgccgtagtgttattcttgtatgccaaatctttttttccccaaaattagcactttaattttatttactgttataatatttgttttcttagattaggtaggaaatcttaatttggccaccgcctactttgacaagtaaatattacatcatacgattttgcaacattaaattagaacactagaaactaaaaaattatgtttcagtgaatgctacaactaagcattttttttttttaagaaaaacaattgtattatgttttgttgccttgccactttgagtatcttatctgaaaatctgttccttgccatgtttttctcctgttaacataaactatgtgccctgtgaatttctggggactgaatttgaaattgctcctgccaaccgtttgtggcctggcgtgtatctgaatgcctgaatatctccccgctgaatgaatttcgtattctgccctgaattcactcgggtatattgattggctggatgatcttggtgccgcccacttgacgtttccagaagagtcaccgaaggaaaagaaccaggagtgtagaggatgatgaggagggtcacctgatctgtcagagtggagacgtactaagtgcaagatgtatagaatatttttcaacacttattaacttttcagataacataatctatatatagattaagctttcagggatttggaaatctttttttctttctcttttttgtttttgttttatttttccatttcttttggtgggggggattgtatttttgctttctttagaaatgtaatgtttgttatatagaacttccagaacagtaatcaaattaatgaaattagacctaataattatgttttttgatggtgttgaccaataaaatatctagtgataaggaaatttgtagcatcaactagaataatctacattgatagcatttattgtgataagtacattgtttccacttcttgatatgactgagatttatttctctcttttagatgaaattgttgatactttaggtgaaggagcttttggaaaagttgtggagtgcatcgatcataaagcgggaggtagacatgtagcagtaaaaatagttaaaaatgtggatagatactgtgaagctgctcgctcagaaatacaagttctggaacatctgaatacaacagaccccaacagtactttgtaagtatcagattagaacttgggaagtggtatcaggtatatttaaattaggagcaactatacttagctatttttcatgtgtttgtagccgctgtgtccagatgttggaatggtttgagcatcatggtcacatttgcattgtttttgaactattgggacttagtacttacgacttcattaaagaaaatggttttctaccatttcgactggatcatatcagaaagatggcatatcagatatgcaagtctgtgaattgtaagttcttggtatatcttcgttaatttgctggttttatccattccacatatcaaaatgtgcatcctaagtgtgtacaatttttatttgattaaaaataaagggggaggaagaataggtatgaagagatttgattacaggctgttgatccagcagtgtacatttcattcagcaagtaggatatccaccatataacaacgtactttgttgcagactatgatttagacttttctgatgcgcaaaaatagtaacttcgaatgctgggtaaaaattaaggcgtgatatatctcataaaagaaagcttcataagaggtagtaagttttagttactggtgattttctagcagactggaatgttgaccattctttgggaaaggaatcagaggttttttgttgggtttttttgttttttgaaatggagtctcgctttgttgttcaggctgaagtgcagtggcgcagtcttcactcactgcaaactctgcctccccagttcaagtgattctcctgcctcagcctcccgagtagctaggactacaggcacacgccaccacacccggccaatttttgtaattttggtagagacagggtttcaccatattggtcaggctggtctcgaactcctgacctcaggtgattacaggcgtgagccactgcacccggcctgttgtggggttttgtgatttggtttggtttggtgttttctgattacagcaactttctctttattctcagttttgcacagtaataagttgactcacacagacttaaagcctgaaaacatcttatttgtgcagtctgactacacagaggcgtataatcccaaaataaaacgtgatgaacgcaccttaataaatccagatattaaagttgtagactttggtagtgcaacatatgatgacgaacatcacagtacattggtatctacaagacattatagagcacctgaagttattttagccctagggtggtcccaaccatgtgatgtctggagcataggatgcattcttattgaatactatcttgggtttaccgtatttccaacacacgatagtaaggagcatttagcaatgatggaaaggattcttggacctctaccaaaacatatgatacagaaaaccaggaaacgtaaatattttcaccacgatcgattagactgggatgaacacagttctgccggcagatatgtttcaagacgctgtaaacctctgaaggaatttatgctttctcaagatgttgaacatgagcgtctctttgacctcattcagaaaatgttggagtatgatccagccaaaagaattactctcagagaagccttaaagcatcctttctttgaccttctgaagaaaagtatatagatctgtaattggacagctctctcgaagagatcttacagactgtatcagtctaatttttaaattttaagttattttgtacagctttgtaaattcttaacatttttatattgccatgtttattttgtttgggtaatttggttcattaagtacatagctaaggtaatgaacatctttttcagtaattgtaaagtgatttattcagaataaattttttgtgcttatgaa

SEQ ID NO: 308934 - DNA, 3327 bp, Homo sapiens
atcgagtgttttcgagacgagtctcgacgcagcagctgtcagctccattttgttgttggtgcgcgacgcagtcagctgcgtgattcccgtgattgcgttacaagctttgtctccttcgacttggagtctttgtccaggacgatgagacactcaaagagaacttactgtcctgattgggatgacaaggattgggattatggaaaatggaggagcagcagcagtcataaaagaaggaagagatcacatagcagtgcccaggagaacaagcgctgcaaatacaatcactctaaaatgtgtgatagccattatttggaaagcaggtctataaatgagaaagattatcatagtcgacgctacattgatgagtacagaaatgactacactcaaggatgtgaacctggacatcgccaaagagaccatgaaagccggtatcagaaccatagtagcaagtcttctggtagaagtggaagaagtagttataaaagcaaacacaggattcaccacagtacttcacatcgtcgttcacatggggtatgaacgtttttaaaacattttggaaattttatatcccatgtggaacagggaaacttgaatttttgtgtttgattatttgagaaagttttaagatgaaatcatctcagttttaacctgcaggattttttctgtgtttgtgcattggataggaaattccggaaataaagtacacatttagttctataatttaattattggttggctcctaattgacattccagtgaaatgatgggagttaattgatttaatttagattagttgaaaattattacaaaatattctaaaagggttttttgtggtacttcaagaaacctgattagttttgatctattgaaatcacaaaagtagaacagggcattttatttttgtataatttaggattaggtatgcttctttgttctaacaagtcatgttttctaacccttctttcactaagcaaaccagaacagatttgaactgttatgggttatatattagtatggagatcagctcagatgacattaaaaatgccgtagtgttattcttgtatgccaaatctttttttccccaaaattagcactttaattttatttactgttataatatttgttttcttagattaggtaggaaatcttaatttggccaccgcctactttgacaagtaaatattacatcatacgattttgcaacattaaattagaacactagaaactaaaaaattatgtttcagtgaatgctacaactaagcattttttttttttaagaaaaacaattgtattatgttttgttgccttgccactttgagtatcttatctgaaaatctgttccttgccatgtttttctcctgttaacataaactatgtgccctgtgaatttctggggactgaatttgaaattgctcctgccaaccgtttgtggcctggcgtgtatctgaatgcctgaatatctccccgctgaatgaatttcgtattctgccctgaattcactcgggtatattgattggctggatgatcttggtgccgcccacttgacgtttccagaagagtcaccgaaggaaaagaaccaggagtgtagaggatgatgaggagggtcacctgatctgtcagagtggagacgtactaagtgcaagatgtatagaatatttttcaacacttattaacttttcagataacataatctatatatagattaagctttcagggatttggaaatctttttttctttctcttttttgtttttgttttatttttccatttcttttggtgggggggattgtatttttgctttctttagaaatgtaatgtttgttatatagaacttccagaacagtaatcaaattaatgaaattagacctaataattatgttttttgatggtgttgaccaataaaatatctagtgataaggaaatttgtagcatcaactagaataatctacattgatagcatttattgtgataagtacattgtttccacttcttgatatgactgagatttatttctctcttttagatgaaattgttgatactttaggtgaaggagcttttggaaaagttgtggagtgcatcgatcataaagcgggaggtagacatgtagcagtaaaaatagttaaaaatgtggatagatactgtgaagctgctcgctcagaaatacaagttctggaacatctgaatacaacagaccccaacagtactttccgctgtgtccagatgttggaatggtttgagcatcatggtcacatttgcattgtttttgaactattgggacttagtacttacgacttcattaaagaaaatggttttctaccatttcgactggatcatatcagaaagatggcatatcagatatgcaagtctgtgaattttttgcacagtaataagttgactcacacagacttaaagcctgaaaacatcttatttgtgcagtctgactacacagaggcgtataatcccaaaataaaacgtgatgaacgcaccttaataaatccagatattaaagttgtagactttggtagtgcaacatatgatgacgaacatcacagtacattggtatctacaagacattatagagcacctgaagttattttagccctagggtggtcccaaccatgtgatgtctggagcataggatgcattcttattgaatactatcttgggtttaccgtatttccaacacacgatagtaaggagcatttagcaatgatggaaaggattcttggacctctaccaaaacatatgatacagaaaaccaggaaacgtaaatattttcaccacgatcgattagactgggatgaacacagttctgccggcagatatgtttcaagacgctgtaaacctctgaaggaatttatgctttctcaagatgttgaacatgagcgtctctttgacctcattcagaaaatgttggagtatgatccagccaaaagaattactctcagagaagccttaaagcatcctttctttgaccttctgaagaaaagtatatagatctgtaattggacagctctctcgaagagatcttacagactgtatcagtctaatttttaaattttaagttattttgtacagctttgtaaattcttaacatttttatattgccatgtttattttgtttgggtaatttggttcattaagtacatagctaaggtaatgaacatctttttcagtaattgtaaagtgatttattcagaataaattttttgtgcttatgaaaaaaacagaacaacacacacaccacaaacagcacaaacacaaacaaaaaaagaacaaaacacccacacacaaccacccaaaaacggacaaacaccacaaacacacg

SEQ ID NO: 308935 - DNA, 1439 bp, Homo sapiens
tttccccactgtatcctaactcttttggcaacctggactaaaagaacatttgagataatgtttgacagtgacaggtaccatataggaagaagttgtttagctgaaataccaaaaaataactcatgtgagtggtggtttgatgaaagaaatttgtgtcattcagcatgtaatagaatcagaactgaacactaaaccataaattaaaaaaatacagtgggtcagagtagtagtacagtttgaagacagtaatacctggaattgagcatcatgtctgtcattcttaaatttgcatgcatctttctaacaggggaggtagacatgtagcagtaaaaatagttaaaaatgtggatagatactgtgaagctgctcgctcagaaatacaagttctggaacatctgaatacaacagaccccaacagtactttccgctgtgtccagatgttggaatggtttgagcatcatggtcacatttgcattgtttttgaactattgggacttagtacttacgacttcattaaagaaaatggttttctaccatttcgactggatcatatcagaaagatggcatatcagatatgcaagtctgtgaattttttgcacagtaataagttgactcacacagacttaaagcctgaaaacatcttatttgtgcagtctgactacacagaggcgtataatcccaaaataaaacgtgatgaacgcaccttaataaatccagatattaaagttgtagactttggtagtgcaacatatgatgacgaacatcacagtacattggtatctacaagacattatagagcacctgaagttattttagccctagggtggtcccaaccatgtgatgtctggagcataggatgcattcttattgaatactatcttgggtttaccgtatttccaacacacgatagtaaggagcatttagcaatgatggaaaggattcttggacctctaccaaaacatatgatacagaaaaccaggaaacgtaaatattttcaccacgatcgattagactgggatgaacacagttctgccggcagatatgtttcaagacgctgtaaacctctgaaggaatttatgctttctcaagatgttgaacatgagcgtctctttgacctcattcagaaaatgttggagtatgatccagccaaaagaattactctcagagaagccttaaagcatcctttctttgaccttctgaagaaaagtatatagatctgtaattggacagctctctcgaagagatcttacagactgtatcagtctaatttttaaattttaagttattttgtacagctttgtaaattcttaacatttttatattgccatgtttattttgtttgggtaatttggttcattaagtacatagctaaggtaatgaacatctttttcagtaattgtaaagtgatttattcagaataaattttttgtgcttatgaa

SEQ ID NO: 308936 - DNA, 1527 bp, Homo sapiens
tttccccactgtatcctaactcttttggcaacctggactaaaagaacatttgagataatgtttgacagtgacaggtaccatataggaagaagttgtttagctgaaataccaaaaaataactcatgtgagtggtggtttgatgaaagaaatttgtgtcattcagcatgtaatagaatcagaactgaacactaaaccataaattaaaaaaatacagtgggtcagagtagtagtacagtttgaagacagtaatacctggaattgagcatcatgtctgtcattcttaaatttgcatgcatctttctaacaggggaggtagacatgtagcagtaaaaatagttaaaaatgtggatagatactgtgaagctgctcgctcagaaatacaagttctggaacatctgaatacaacagaccccaacagtactttgtaagtatcagattagaacttgggaagtggtatcaggtatatttaaattaggagcaactatacttagctatttttcatgtgtttgtagccgctgtgtccagatgttggaatggtttgagcatcatggtcacatttgcattgtttttgaactattgggacttagtacttacgacttcattaaagaaaatggttttctaccatttcgactggatcatatcagaaagatggcatatcagatatgcaagtctgtgaattttttgcacagtaataagttgactcacacagacttaaagcctgaaaacatcttatttgtgcagtctgactacacagaggcgtataatcccaaaataaaacgtgatgaacgcaccttaataaatccagatattaaagttgtagactttggtagtgcaacatatgatgacgaacatcacagtacattggtatctacaagacattatagagcacctgaagttattttagccctagggtggtcccaaccatgtgatgtctggagcataggatgcattcttattgaatactatcttgggtttaccgtatttccaacacacgatagtaaggagcatttagcaatgatggaaaggattcttggacctctaccaaaacatatgatacagaaaaccaggaaacgtaaatattttcaccacgatcgattagactgggatgaacacagttctgccggcagatatgtttcaagacgctgtaaacctctgaaggaatttatgctttctcaagatgttgaacatgagcgtctctttgacctcattcagaaaatgttggagtatgatccagccaaaagaattactctcagagaagccttaaagcatcctttctttgaccttctgaagaaaagtatatagatctgtaattggacagctctctcgaagagatcttacagactgtatcagtctaatttttaaattttaagttattttgtacagctttgtaaattcttaacatttttatattgccatgtttattttgtttgggtaatttggttcattaagtacatagctaaggtaatgaacatctttttcagtaattgtaaagtgatttattcagaataaattttttgtgcttatgaa

SEQ ID NO: 308937 - DNA, 3529 bp, Homo sapiens
atcgagtgttttcgagacgagtctcgacgcagcagctgtcagctccattttgttgttggtgcgcgacgcagtcagctgcgtgattcccgtgattgcgttacaagctttgtctccttcgacttggagtctttgtccaggacgatgagacactcaaagagaacttactgtcctgattgggatgacaaggattgggattatggaaaatggaggagcagcagcagtcataaaagaaggaagagatcacatagcagtgcccaggagaacaagcgctgcaaatacaatcactctaaaatgtgtgatagccattatttggaaagcaggtctataaatgagaaagattatcatagtcgacgctacattgatgagtacagaaatgactacactcaaggatgtgaacctggacatcgccaaagagaccatgaaagccggtatcagaaccatagtagcaagtcttctggtagaagtggaagaagtagttataaaagcaaacacaggattcaccacagtacttcacatcgtcgttcacatggggtatgaacgtttttaaaacattttggaaattttatatcccatgtggaacagggaaacttgaatttttgtgtttgattatttgagaaagttttaagatgaaatcatctcagttttaacctgcaggattttttctgtgtttgtgcattggataggaaattccggaaataaagtacacatttagttctataatttaattattggttggctcctaattgacattccagtgaaatgatgggagttaattgatttaatttagattagttgaaaattattacaaaatattctaaaagggttttttgtggtacttcaagaaacctgattagttttgatctattgaaatcacaaaagtagaacagggcattttatttttgtataatttaggattaggtatgcttctttgttctaacaagtcatgttttctaacccttctttcactaagcaaaccagaacagatttgaactgttatgggttatatattagtatggagatcagctcagatgacattaaaaatgccgtagtgttattcttgtatgccaaatctttttttccccaaaattagcactttaattttatttactgttataatatttgttttcttagattaggtaggaaatcttaatttggccaccgcctactttgacaagtaaatattacatcatacgattttgcaacattaaattagaacactagaaactaaaaaattatgtttcagtgaatgctacaactaagcattttttttttttaagaaaaacaattgtattatgttttgttgccttgccactttgagtatcttatctgaaaatctgttccttgccatgtttttctcctgttaacataaactatgtgccctgtgaatttctggggactgaatttgaaattgctcctgccaaccgtttgtggcctggcgtgtatctgaatgcctgaatatctccccgctgaatgaatttcgtattctgccctgaattcactcgggtatattgattggctggatgatcttggtgccgcccacttgacgtttccagaagagtcaccgaaggaaaagaaccaggagtgtagaggatgatgaggagggtcacctgatctgtcagagtggagacgtactaagtgcaagatgtatagaatatttttcaacacttattaacttttcagataacataatctatatatagattaagctttcagggatttggaaatctttttttctttctcttttttgtttttgttttatttttccatttcttttggtgggggggattgtatttttgctttctttagaaatgtaatgtttgttatatagaacttccagaacagtaatcaaattaatgaaattagacctaataattatgttttttgatggtgttgaccaataaaatatctagtgataaggaaatttgtagcatcaactagaataatctacattgatagcatttattgtgataagtacattgtttccacttcttgatatgactgagatttatttctctcttttagatgaaattgttgatactttaggtgaaggagcttttggaaaagttgtggagtgcatcgatcataaagcgggaggtagacatgtagcagtaaaaatagttaaaaatgtggatagatactgtgaagctgctcgctcagaaatacaagttctggaacatctgaatacaacagaccccaacagtactttccgctgtgtccagatgttggaatggtttgagcatcatggtcacatttgcattgtttttgaactattgggacttagtacttacgacttcattaaagaaaatggttttctaccatttcgactggatcatatcagaaagatggcatatcagatatgcaagtctgtgaattttttgcacagtaataagttgactcacacagacttaaagcctgaaaacatcttatttgtgcagtctgactacacagaggcgtataatcccaaaataaaacgtgatgaacgcaccttaataaatccagatattaaagttgtagactttggtagtgcaacatatgatgacgaacatcacagtacattggtatctacaagacattatagagcacctgaagttattttagccctagggtggtcccaaccatgtgatgtctggagcataggatgcattcttattgaatactatcttgggtttaccgtatttccagtaagtgacaatgatctatttcaaccttgctttgcacaagaaaggtgcctgtttatatgaataaatacttttgcttcccccattatagactattaattgtagataagcataaataaactaattcatatttctttcataattgttttatttaaaacatctttcagtatataagcaattatccgtgtccatgtagggaatcattggcgagtttgttctgcaagccttaatgttagtttttttgctgtcagctttaactgtgtctgttttggtggtcatcttccccaagtctgtttttattttatttctagacacacgatagtaaggagcatttagcaatgatggaaaggattcttggacctctaccaaaacatatgatacagaaaaccaggaaacgtaaatattttcaccacgatcgattagactgggatgaacacagttctgccggcagatatgtttcaagacgctgtaaacctctgaaggaatttatgctttctcaagatgttgaacatgagcgtctctttgacctcattcagaaaatgttggagtatgatccagccaaaagaattactctcagagaagccttaaagcatcctttctttgaccttctgaagaaaagtatatagatctgtaattggacagctctctcgaagagatcttacagactgtatcagtctaatttttaaattttaagttattttgtacagctttgtaaattcttaacatttttatattgccatgtttattttgtttgggtaatttggttcattaagtacatagctaaggtaatgaacatctttttcagtaattgtaaagtgatttattcagaataaattttttgtgcttatgaa

SEQ ID NO: 308938 - DNA, 3294 bp, Homo sapiens
atcgagtgttttcgagacgagtctcgacgcagcagctgtcagctccattttgttgttggtgcgcgacgcagtcagctgcgtgattcccgtgattgcgttacaagctttgtctccttcgacttggagtctttgtccaggacgatgagacactcaaagagaacttactgtcctgattgggatgacaaggattgggattatggaaaatggaggagcagcagcagtcataaaagaaggaagagatcacatagcagtgcccaggagaacaagcgctgcaaatacaatcactctaaaatgtgtgatagccattatttggaaagcaggtctataaatgagaaagattatcatagtcgacgctacattgatgagtacagaaatgactacactcaaggatgtgaacctggacatcgccaaagagaccatgaaagccggtatcagaaccatagtagcaagtcttctggtagaagtggaagaagtagttataaaagcaaacacaggattcaccacagtacttcacatcgtcgttcacatggggtatgaacgtttttaaaacattttggaaattttatatcccatgtggaacagggaaacttgaatttttgtgtttgattatttgagaaagttttaagatgaaatcatctcagttttaacctgcaggattttttctgtgtttgtgcattggataggaaattccggaaataaagtacacatttagttctataatttaattattggttggctcctaattgacattccagtgaaatgatgggagttaattgatttaatttagattagttgaaaattattacaaaatattctaaaagggttttttgtggtacttcaagaaacctgattagttttgatctattgaaatcacaaaagtagaacagggcattttatttttgtataatttaggattaggtatgcttctttgttctaacaagtcatgttttctaacccttctttcactaagcaaaccagaacagatttgaactgttatgggttatatattagtatggagatcagctcagatgacattaaaaatgccgtagtgttattcttgtatgccaaatctttttttccccaaaattagcactttaattttatttactgttataatatttgttttcttagattaggtaggaaatcttaatttggccaccgcctactttgacaagtaaatattacatcatacgattttgcaacattaaattagaacactagaaactaaaaaattatgtttcagtgaatgctacaactaagcattttttttttttaagaaaaacaattgtattatgttttgttgccttgccactttgagtatcttatctgaaaatctgttccttgccatgtttttctcctgttaacataaactatgtgccctgtgaatttctggggactgaatttgaaattgctcctgccaaccgtttgtggcctggcgtgtatctgaatgcctgaatatctccccgctgaatgaatttcgtattctgccctgaattcactcgggtatattgattggctggatgatcttggtgccgcccacttgacgtttccagaagagtcaccgaaggaaaagaaccaggagtgtagaggatgatgaggagggtcacctgatctgtcagagtggagacgtactaagtgcaagatgtatagaatatttttcaacacttattaacttttcagataacataatctatatatagattaagctttcagggatttggaaatctttttttctttctcttttttgtttttgttttatttttccatttcttttggtgggggggattgtatttttgctttctttagaaatgtaatgtttgttatatagaacttccagaacagtaatcaaattaatgaaattagacctaataattatgttttttgatggtgttgaccaataaaatatctagtgataaggaaatttgtagcatcaactagaataatctacattgatagcatttattgtgataagtacattgtttccacttcttgatatgactgagatttatttctctcttttagatgaaattgttgatactttaggtgaaggagcttttggaaaagttgtggagtgcatcgatcataaagcgggaggtagacatgtagcagtaaaaatagttaaaaatgtggatagatactgtgaagctgctcgctcagaaatacaagttctggaacatctgaatacaacagaccccaacagtactttccgctgtgtccagatgttggaatggtttgagcatcatggtcacatttgcattgtttttgaactattgggacttagtacttacgacttcattaaagaaaatggttttctaccatttcgactggatcatatcagaaagatggcatatcagatatgcaagtctgtgaattttttgcacagtaataagttgactcacacagacttaaagcctgaaaacatcttatttgtgcagtctgactacacagaggcgtataatcccaaaataaaacgtgatgaacgcaccttaataaatccagatattaaagttgtagactttggtagtgcaacatatgatgacgaacatcacagtacattggtatctacaagacattatagagcacctgaagttattttagccctagggtggtcccaaccatgtgatgtctggagcataggatgcattcttattgaatactatcttgggtttaccgtatttccaacacacgatagtaaggagcatttagcaatgatggaaaggattcttggacctctaccaaaacatatgatacagaaaaccaggaaacgtaaatattttcaccacgatcgattagactgggatgaacacagttctgccggcagatatgtttcaagacgctgtaaacctctgaaggaatttatgctttctcaagatgttgaacatgagcgtctctttgacctcattcagaaaatgttggagtatgatccagccaaaagaattactctcagagaagccttaaagcatcctttctttgaccttctgaagaaaagtatatagatctgtaattggacagctctctcgaagagatcttacagactgtatcagtctaatttttaaattttaagttattttgtacagctttgtaaattcttaacatttttatattgccatgtttattttgtttgggtaatttggttcattaagtacatagctaaggtaatgaacatctttttcagtaattgtaaagtgatttattcagaataaattttttgtgcttatgaagttgatatgtatctgaacagtttgttctaagtaccatttttcttcctacttctattaaagaatggacatagat

SEQ ID NO: 308939 - DNA, 1314 bp, Homo sapiens
agcgcactagcctcatgcactaccctcatacatactgaaagccacttactttttaaatgtctggacactttggacttacaccacagagatgtaaaacaccacaaattgcttctcccaaatgtaatggtttttcttttttgttttttgaaatggagtctcgctttgttgttcaggctgaagtgcagtggcgcagtcttcactcactgcaaactctgcctccccagttcaagtgattctcctgcctcagcctcccgagtagctaggactacaggcacacgccaccacacccggccaatttttgtaattttggtagagacagggtttcaccatattggtcaggctggtctcgaactcctgacctcaggtgattacaggcgtgagccactgcacccggcctgttgtggggttttgtgatttggtttggtttggtgttttctgattacagcaactttctctttattctcagttttgcacagtaataagttgactcacacagacttaaagcctgaaaacatcttatttgtgcagtctgactacacagaggcgtataatcccaaaataaaacgtgatgaacgcaccttaataaatccagatattaaagttgtagactttggtagtgcaacatatgatgacgaacatcacagtacattggtatctacaagacattatagagcacctgaagttattttagccctagggtggtcccaaccatgtgatgtctggagcataggatgcattcttattgaatactatcttgggtttaccgtatttccaacacacgatagtaaggagcatttagcaatgatggaaaggattcttggacctctaccaaaacatatgatacagaaaaccaggaaacgtaaatattttcaccacgatcgattagactgggatgaacacagttctgccggcagatatgtttcaagacgctgtaaacctctgaaggaatttatgctttctcaagatgttgaacatgagcgtctctttgacctcattcagaaaatgttggagtatgatccagccaaaagaattactctcagagaagccttaaagcatcctttctttgaccttctgaagaaaagtatatagatctgtaattggacagctctctcgaagagatcttacagactgtatcagtctaatttttaaattttaagttattttgtacagctttgtaaattcttaacatttttatattgccatgtttattttgtttgggtaatttggttcattaagtacatagctaaggtaatgaacatctttttcagtaattgtaaagtgatttattcagaataaattttttgtgcttatgaa

SEQ ID NO: 308940 - DNA, 3168 bp, Homo sapiens
atcgagtgttttcgagacgagtctcgacgcagcagctgtcagctccattttgttgttggtgcgcgacgcagtcagctgcgtgattcccgtgattgcgttacaagctttgtctccttcgacttggagtctttgtccaggacgatgagacactcaaagagaacttactgtcctgattgggatgacaaggattgggattatggaaaatggaggagcagcagcagtcataaaagaaggaagagatcacatagcagtgcccaggagaacaagcgctgcaaatacaatcactctaaaatgtgtgatagccattatttggaaagcaggtctataaatgagaaagattatcatagtcgacgctacattgatgagtacagaaatgactacactcaaggatgtgaacctggacatcgccaaagagaccatgaaagccggtatcagaaccatagtagcaagtcttctggtagaagtggaagaagtagttataaaagcaaacacaggattcaccacagtacttcacatcgtcgttcacatggggtatgaacgtttttaaaacattttggaaattttatatcccatgtggaacagggaaacttgaatttttgtgtttgattatttgagaaagttttaagatgaaatcatctcagttttaacctgcaggattttttctgtgtttgtgcattggataggaaattccggaaataaagtacacatttagttctataatttaattattggttggctcctaattgacattccagtgaaatgatgggagttaattgatttaatttagattagttgaaaattattacaaaatattctaaaagggttttttgtggtacttcaagaaacctgattagttttgatctattgaaatcacaaaagtagaacagggcattttatttttgtataatttaggattaggtatgcttctttgttctaacaagtcatgttttctaacccttctttcactaagcaaaccagaacagatttgaactgttatgggttatatattagtatggagatcagctcagatgacattaaaaatgccgtagtgttattcttgtatgccaaatctttttttccccaaaattagcactttaattttatttactgttataatatttgttttcttagattaggtaggaaatcttaatttggccaccgcctactttgacaagtaaatattacatcatacgattttgcaacattaaattagaacactagaaactaaaaaattatgtttcagtgaatgctacaactaagcattttttttttttaagaaaaacaattgtattatgttttgttgccttgccactttgagtatcttatctgaaaatctgttccttgccatgtttttctcctgttaacataaactatgtgccctgtgaatttctggggactgaatttgaaattgctcctgccaaccgtttgtggcctggcgtgtatctgaatgcctgaatatctccccgctgaatgaatttcgtattctgccctgaattcactcgggtatattgattggctggatgatcttggtgccgcccacttgacgtttccagaagagtcaccgaaggaaaagaaccaggagtgtagaggatgatgaggagggtcacctgatctgtcagagtggagacgtactaagtgcaagatgtatagaatatttttcaacacttattaacttttcagataacataatctatatatagattaagctttcagggatttggaaatctttttttctttctcttttttgtttttgttttatttttccatttcttttggtgggggggattgtatttttgctttctttagaaatgtaatgtttgttatatagaacttccagaacagtaatcaaattaatgaaattagacctaataattatgttttttgatggtgttgaccaataaaatatctagtgataaggaaatttgtagcatcaactagaataatctacattgatagcatttattgtgataagtacattgtttccacttcttgatatgactgagatttatttctctcttttagatgaaattgttgatactttaggtgaaggagcttttggaaaagttgtggagtgcatcgatcataaagcgggaggtagacatgtagcagtaaaaatagttaaaaatgtggatagatactgtgaagctgctcgctcagaaatacaagttctggaacatctgaatacaacagaccccaacagtactttccgctgtgtccagatgttggaatggtttgagcatcatggtcacatttgcattgtttttgaactattgggacttagtacttacgacttcattaaagaaaatggttttctaccatttcgactggatcatatcagaaagatggcatatcagatatgcaagtctgtgaattttttgcacagtaataagttgactcacacagacttaaagcctgaaaacatcttatttgtgcagtctgactacacagaggcgtataatcccaaaataaaacgtgatgaacgcaccttaataaatccagatattaaagttgtagactttggtagtgcaacatatgatgacgaacatcacagtacattggtatctacaagacattatagagcacctgaagttattttagccctagggtggtcccaaccatgtgatgtctggagcataggatgcattcttattgaatactatcttgggtttaccgtatttccaacacacgatagtaaggagcatttagcaatgatggaaaggattcttggacctctaccaaaacatatgatacagaaaaccaggaaacgtaaatattttcaccacgatcgattagactgggatgaacacagttctgccggcagatatgtttcaagacgctgtaaacctctgaaggaatttatgctttctcaagatgttgaacatgagcgtctctttgacctcattcagaaaatgttggagtatgatccagccaaaagaattactctcagagaagccttaaagcatcctttctttgaccttctgaatgtatcagtctaatttttaaattttaagttattttgtacagctttgtaaattcttaacatttttatattgccatgtttattttgtttgggtaatttggttcattaagtacatagctaaggtaatgaacatctttttcagtaattgtaaagtgatttattcagaataaattttttgtgcttatgaa

SEQ ID NO: 308941 - DNA, 3134 bp, Homo sapiens
atcgagtgttttcgagacgagtctcgacgcagcagctgtcagctccattttgttgttggtgcgcgacgcagtcagctgcgtgattcccgtgattgcgttacaagctttgtctccttcgacttggagtctttgtccaggacgatgagacactcaaagagaacttactgtcctgattgggatgacaaggattgggattatggaaaatggaggagcagcagcagtcataaaagaaggaagagatcacatagcagtgcccaggagaacaagcgctgcaaatacaatcactctaaaatgtgtgatagccattatttggaaagcaggtctataaatgagaaagattatcatagtcgacgctacattgatgagtacagaaatgactacactcaaggatgtgaacctggacatcgccaaagagaccatgaaagccggtatcagaaccatagtagcaagtcttctggtagaagtggaagaagtagttataaaagcaaacacaggattcaccacagtacttcacatcgtcgttcacatggggtatgaacgtttttaaaacattttggaaattttatatcccatgtggaacagggaaacttgaatttttgtgtttgattatttgagaaagttttaagatgaaatcatctcagttttaacctgcaggattttttctgtgtttgtgcattggataggaaattccggaaataaagtacacatttagttctataatttaattattggttggctcctaattgacattccagtgaaatgatgggagttaattgatttaatttagattagttgaaaattattacaaaatattctaaaagggttttttgtggtacttcaagaaacctgattagttttgatctattgaaatcacaaaagtagaacagggcattttatttttgtataatttaggattaggtatgcttctttgttctaacaagtcatgttttctaacccttctttcactaagcaaaccagaacagatttgaactgttatgggttatatattagtatggagatcagctcagatgacattaaaaatgccgtagtgttattcttgtatgccaaatctttttttccccaaaattagcactttaattttatttactgttataatatttgttttcttagattaggtaggaaatcttaatttggccaccgcctactttgacaagtaaatattacatcatacgattttgcaacattaaattagaacactagaaactaaaaaattatgtttcagtgaatgctacaactaagcattttttttttttaagaaaaacaattgtattatgttttgttgccttgccactttgagtatcttatctgaaaatctgttccttgccatgtttttctcctgttaacataaactatgtgccctgtgaatttctggggactgaatttgaaattgctcctgccaaccgtttgtggcctggcgtgtatctgaatgcctgaatatctccccgctgaatgaatttcgtattctgccctgaattcactcgggtatattgattggctggatgatcttggtgccgcccacttgacgtttccagaagagtcaccgaaggaaaagaaccaggagtgtagaggatgatgaggagggtcacctgatctgtcagagtggagacgtactaagtgcaagatgtatagaatatttttcaacacttattaacttttcagataacataatctatatatagattaagctttcagggatttggaaatctttttttctttctcttttttgtttttgttttatttttccatttcttttggtgggggggattgtatttttgctttctttagaaatgtaatgtttgttatatagaacttccagaacagtaatcaaattaatgaaattagacctaataattatgttttttgatggtgttgaccaataaaatatctagtgataaggaaatttgtagcatcaactagaataatctacattgatagcatttattgtgataagtacattgtttccacttcttgatatgactgagatttatttctctcttttagatgaaattgttgatactttaggtgaaggagcttttggaaaagttgtggagtgcatcgatcataaagcgggaggtagacatgtagcagtaaaaatagttaaaaatgtggatagatactgtgaagctgctcgctcagaaatacaagttctggaacatctgaatacaacagaccccaacagtactttccgctgtgtccagatgttggaatggtttgagcatcatggtcacatttgcattgtttttgaactattgggacttagtacttacgacttcattaaagaaaatggttttctaccatttcgactggatcatatcagaaagatggcatatcagatatgcaagtctgtgaattttttgcacagtaataagttgactcacacagacttaaagcctgaaaacatcttatttgtgcagtctgactacacagaggcgtataatcccaaaataaaacgtgatgaacgcaccttaataaatccagatattaaagttgtagactttggtagtgcaacatatgatgacgaacatcacagtacattggtatctacaagacattatagagcacctgaagttattttagccctagggtggtcccaaccatgtgatgtctggagcataggatgcattcttattgaatactatcttgggtttaccgtatttccaacacacgatagtaaggagcatttagcaatgatggaaaggattcttggacctctaccaaaacatatgatacagaaaaccaggaaacgtaaatattttcaccacgatcgattagactgggatgaacacagttctgccggcagatatgtttcaagacgctgtaaacctctgaaggaatttatgctttctcaagatgttgaacatgagcgtctctttgacctcattcagaaaatgttggagatacgtatctctaacattagctcatactatgaaatgtatttgtaaaatcaatagtttggcatataatagttatctaataggataatgtaaccagcacgatataataatgaagaaatgaagcaactttacacagacgaagtaacttccaaggaatatacttaagaaacgttcagtgctaatatgaagcaaccgtaagaagatatggagagacctgtc

SEQ ID NO: 308942 - DNA, 675 bp, Homo sapiens
cgatctagaggatctcgtattctaacattatagagcacctgaagtattttagccctagggtggtcccaaccatgtgatgtctggagcataggatgcattcttattgaatactatcttgggtttaccgtatttccaacacacgatagtaaggagcatttagcaatgatggaaaggattcttggacctctaccaaaacatatgatacagaaaaccaggaaacgtaaatattttcaccacgatcgattagactgggatgaacacagttctgccggcagatatgtttcaagacgctgtaaacctctgaaggaatttatgctttctcaagatgttgaacatgagcgtctctttgacctcattcagaaaatgttggagtatgatccagccaaaagaattactctcagagaagccttaaagcatcctttctttgaccttctgaagaaaagtatatagatctgtaattggacagctctctcgaagagatcttacagactgtatcagtctaatttttaaattttaagttattttgtacagctttgtaaattcttaacatttttatattgccatgtttattttgtttgggtaatttggttcattaagtacatagctaaggtaatgaacatctttttcagtaattgtaaagtgatttattcagaataaattttttgtgcttatgaa

SEQ ID NO: 308943 - DNA, 3073 bp, Homo sapiens
atcgagtgttttcgagacgagtctcgacgcagcagctgtcagctccattttgttgttggtgcgcgacgcagtcagctgcgtgattcccgtgattgcgttacaagctttgtctccttcgacttggagtctttgtccaggacgatgagacactcaaagagaacttactgtcctgattgggatgacaaggattgggattatggaaaatggaggagcagcagcagtcataaaagaaggaagagatcacatagcagtgcccaggagaacaagcgctgcaaatacaatcactctaaaatgtgtgatagccattatttggaaagcaggtctataaatgagaaagattatcatagtcgacgctacattgatgagtacagaaatgactacactcaaggatgtgaacctggacatcgccaaagagaccatgaaagccggtatcagaaccatagtagcaagtcttctggtagaagtggaagaagtagttataaaagcaaacacaggattcaccacagtacttcacatcgtcgttcacatggggtatgaacgtttttaaaacattttggaaattttatatcccatgtggaacagggaaacttgaatttttgtgtttgattatttgagaaagttttaagatgaaatcatctcagttttaacctgcaggattttttctgtgtttgtgcattggataggaaattccggaaataaagtacacatttagttctataatttaattattggttggctcctaattgacattccagtgaaatgatgggagttaattgatttaatttagattagttgaaaattattacaaaatattctaaaagggttttttgtggtacttcaagaaacctgattagttttgatctattgaaatcacaaaagtagaacagggcattttatttttgtataatttaggattaggtatgcttctttgttctaacaagtcatgttttctaacccttctttcactaagcaaaccagaacagatttgaactgttatgggttatatattagtatggagatcagctcagatgacattaaaaatgccgtagtgttattcttgtatgccaaatctttttttccccaaaattagcactttaattttatttactgttataatatttgttttcttagattaggtaggaaatcttaatttggccaccgcctactttgacaagtaaatattacatcatacgattttgcaacattaaattagaacactagaaactaaaaaattatgtttcagtgaatgctacaactaagcattttttttttttaagaaaaacaattgtattatgttttgttgccttgccactttgagtatcttatctgaaaatctgttccttgccatgtttttctcctgttaacataaactatgtgccctgtgaatttctggggactgaatttgaaattgctcctgccaaccgtttgtggcctggcgtgtatctgaatgcctgaatatctccccgctgaatgaatttcgtattctgccctgaattcactcgggtatattgattggctggatgatcttggtgccgcccacttgacgtttccagaagagtcaccgaaggaaaagaaccaggagtgtagaggatgatgaggagggtcacctgatctgtcagagtggagacgtactaagtgcaagatgtatagaatatttttcaacacttattaacttttcagataacataatctatatatagattaagctttcagggatttggaaatctttttttctttctcttttttgtttttgttttatttttccatttcttttggtgggggggattgtatttttgctttctttagaaatgtaatgtttgttatatagaacttccagaacagtaatcaaattaatgaaattagacctaataattatgttttttgatggtgttgaccaataaaatatctagtgataaggaaatttgtagcatcaactagaataatctacattgatagcatttattgtgataagtacattgtttccacttcttgatatgactgagatttatttctctcttttagatgaaattgttgatactttaggtgaaggagcttttggaaaagttgtggagtgcatcgatcataaagcgggaggtagacatgtagcagtaaaaatagttaaaaatgtggatagatactgtgaagctgctcgctcagaaatacaagttctggaacatctgaatacaacagaccccaacagtactttccgctgtgtccagatgttggaatggtttgagcatcatggtcacatttgcattgtttttgaactattgggacttagtacttacgacttcattaaagaaaatggttttctaccatttcgactggatcatatcagaaagatggcatatcagatatgcaagtctgtgaattttttgcacagtaataagttgactcacacagacttaaagcctgaaaacatcttatttgtgcagtctgactacacagaggcgtataatcccaaaataaaacgtgatgaacgcaccttaataaatccagatattaaagttgtagactttggtagtgcaacatatgatgacgaacatcacagtacattggtatctacaagacattatagagcacctgaagttattttagccctagggtggtcccaaccatgtgatgtctggagcataggatgcattcttattgaatactatcttgggtttaccgtatttccaacacacgatagtaaggagcatttagcaatgatggaaaggattcttggacctctaccaaaacatatgatacagaaaaccaggaaacgtaaatattttcaccacgatcgattagactgggatgaacacagttctgccggcagatatgtttcaagacgctgtaaacctctgaaggtaagcctttgagacattgctcaaatagtcaaaactgagtttcttctgtttgtcttttgagaccgagccttgcttcgttgtccaggctggagtagagtggcacgatgttggcccagctcactgcaacctctgcatcctaggctcaagcaggtctcagcctcccaagtagctgggattacagatggatgccaccacgctttttttttttttttttttttttt

SEQ ID NO: 308944 - DNA, 486 bp, Homo sapiens
  misc_feature (13)..(13): n is a, c, g, or t
agccggacctccngttacacagctaggaaacgtaaatattttcaccacgatcgattagactgggatgaacacagttctgccggcagatatgtttcaagacgctgtaaacctctgaaggaatttatgctttctcaagatgttgaacatgagcgtctctttgacctcattcagaaaatgttggagtatgatccagccaaaagaattactctcagagaagccttaaagcatcctttctttgaccttctgaagaaaagtatatagatctgtaattggacagctctctcgaagagatcttacagactgtatcagtctaatttttaaattttaagttattttgtacagctttgtaaattcttaacatttttatattgccatgtttattttgtttgggtaatttggttcattaagtacatagctaaggtaatgaacatctttttcagtaattgtaaagtgatttattcagaataaattttttgtgcttatgaa

SEQ ID NO: 308945 - DNA, 2493 bp, Homo sapiens
atcgagtgttttcgagacgagtctcgacgcagcagctgtcagctccattttgttgttggtgcgcgacgcagtcagctgcgtgattcccgtgattgcgttacaagctttgtctccttcgacttggagtctttgtccaggacgatgagacactcaaagagaacttactgtcctgattgggatgacaaggattgggattatggaaaatggaggagcagcagcagtcataaaagaaggaagagatcacatagcagtgcccaggagaacaagcgctgcaaatacaatcactctaaaatgtgtgatagccattatttggaaagcaggtctataaatgagaaagattatcatagtcgacgctacattgatgagtacagaaatgactacactcaaggatgtgaacctggacatcgccaaagagaccatgaaagccggtatcagaaccatagtagcaagtcttctggtagaagtggaagaagtagttataaaagcaaacacaggattcaccacagtacttcacatcgtcgttcacatggggtatgaacgtttttaaaacattttggaaattttatatcccatgtggaacagggaaacttgaatttttgtgtttgattatttgagaaagttttaagatgaaatcatctcagttttaacctgcaggattttttctgtgtttgtgcattggataggaaattccggaaataaagtacacatttagttctataatttaattattggttggctcctaattgacattccagtgaaatgatgggagttaattgatttaatttagattagttgaaaattattacaaaatattctaaaagggttttttgtggtacttcaagaaacctgattagttttgatctattgaaatcacaaaagtagaacagggcattttatttttgtataatttaggattaggtatgcttctttgttctaacaagtcatgttttctaacccttctttcactaagcaaaccagaacagatttgaactgttatgggttatatattagtatggagatcagctcagatgacattaaaaatgccgtagtgttattcttgtatgccaaatctttttttccccaaaattagcactttaattttatttactgttataatatttgttttcttagattaggtaggaaatcttaatttggccaccgcctactttgacaagtaaatattacatcatacgattttgcaacattaaattagaacactagaaactaaaaaattatgtttcagtgaatgctacaactaagcattttttttttttaagaaaaacaattgtattatgttttgttgccttgccactttgagtatcttatctgaaaatctgttccttgccatgtttttctcctgttaacataaactatgtgccctgtgaatttctggggactgaatttgaaattgctcctgccaaccgtttgtggcctggcgtgtatctgaatgcctgaatatctccccgctgaatgaatttcgtattctgccctgaattcactcgggtatattgattggctggatgatcttggtgccgcccacttgacgtttccagaagagtcaccgaaggaaaagaaccaggagtgtagaggatgatgaggagggtcacctgatctgtcagagtggagacgtactaagtgcaagatgtatagaatatttttcaacacttattaacttttcagataacataatctatatatagattaagctttcagggatttggaaatctttttttctttctcttttttgtttttgttttatttttccatttcttttggtgggggggattgtatttttgctttctttagaaatgtaatgtttgttatatagaacttccagaacagtaatcaaattaatgaaattagacctaataattatgttttttgatggtgttgaccaataaaatatctagtgataaggaaatttgtagcatcaactagaataatctacattgatagcatttattgtgataagtacattgtttccacttcttgatatgactgagatttatttctctcttttagatgaaattgttgatactttaggtgaaggagcttttggaaaagttgtggagtgcatcgatcataaagcgtaagtttcccatgttgggattacttttagggaagttggcaatacaggtaattgatttagctttagaaagtggtctgaccatgagttagatacatatctttatacccttttttacttggatgtaagacacttccagttaagaggtacttgccccttcatattttttaaacagctactaatagtatgtataatttctaattttaggctgagaacacactttatattgttttgaaagtattgttttgttgttcaactggacactgttgttaggccatatttttttcccccaccatattagtggttctcagccttggttttatgttaagatcctcctcgagaggtttgcctaccccagaccttttcagggtagttacctaggaatctatatttttaggaagtgctgt

SEQ ID NO: 308946 - DNA, 600 bp, Homo sapiens
tcaagtaaagacaagttttactatgttggcctggctggtcttgaactcctggcctcaagtgatccacctgccttggcctcccagagtgctgggattataggcgtgagcgaccatgcctggcctcttttctgtttttatggtggttatatatatatggtttactatactgttacatagtgtagtcaatggtagtggaaaaggctgttgaatgaatttctttttttcttccaggaatttatgctttctcaagatgttgaacatgagcgtctctttgacctcattcagaaaatgttggagtatgatccagccaaaagaattactctcagagaagccttaaagcatcctttctttgaccttctgaagaaaagtatatagatctgtaattggacagctctctcgaagagatcttacagactgtatcagtctaatttttaaattttaagttattttgtacagctttgtaaattcttaacatttttatattgccatgtttattttgtttgggtaatttggttcattaagtacatagctaaggtaatgaacatctttttcagtaattgtaaagtgatttattcagaataaattttttgtgcttatgaa

SEQ ID NO: 308947 - DNA, 453 bp, Homo sapiens
gcctccccagttcaagtgattctcctgcctcagcctcccgagtagctaggactacaggcacacgccaccacacccggccaatttttgtaattttggtagagacagggtttcaccatattggtcaggctggtctcgaactcctgacctcaggtgattacaggcgtgagccactgcacccggcctgttgtggggttttgtgatttggtttggtttggtgttttctgattacagcaactttctctttattctcagttttgcacagtaataagttgactcacacagacttaaagcctgaaaacatcttatttgtgcagtctgactacacagaggcgtataatcccaaaatagtaagtcttccaaaatattcataaagtatcttatgccttaatagcttatgccttcttaaccatcatttatgattttcagaaacgtgatgaacgcaccttaataaat

SEQ ID NO: 308948 - DNA, 2396 bp, Homo sapiens
ggcacgagcaggaagatggcggcggtagcggaggtgtgagtggacgcgggactcagcggccggattttctcttcccttcttttcccttttccttccctatttgaaattggcatcgagggggctaagttcgggtggcagcgccgggcgcaacgcaggggtcacggcgacggcggcggcggctgacggctggaagggtaggcttcattcaccgctcgtcctccttcctcgctccgctcggtgtcaggcgcggcggcggcgcggcgggcggacttcgtccctcctcctgctcccccccacaccggagcgggcactcttcgcttcgccatcccccgacccttcaccccgaggactgggcgcctcctccggcgcagctgagggagcgggggccggtctcctgctcggttgtcgagcctccatgtcggataatcagagctggaactcgtcgggctcggaggaggatccagagacggagtctgggccgcctgtggagcgctgcggggtcctcagtaagtggacaaactacattcatgggtggcaggatcgttgggtagttttgaaaaataatgctctgagttactacaaatctgaagatgaaacagagtatggctgcagaggatccatctgtcttagcaaggctgtcatcacacctcacgattttgatgaatgtcgatttgatattagtgtaaatgatagtgtttggtatcttcgtgctcaggatccagatcatagacagcaatggatagatgccattgaacagcacaagactgaatctggatatggatctgaatccagcttgcgtcgacatggctcaatggtgtccctggtgtctggagcaagtggctactctgcaacatccacctcttcattcaagaaaggccacagtttacgtgagaagttggctgaaatggaaacatttagagacatcttatgtagacaagttgacacgctacagaagtactttgatgcctgtgctgatgctgtctctaaggatgaacttcaaagggataaagtggtagaagatgatgaagatgactttcctacaacgcgttctgatggtgacttcttgcatagtaccaacggcaataaagaaaagttatttccacatgtgacaccaaaaggaattaatggtatagactttaaaggggaagcgataacttttaaagcaactactgctggaatccttgcaacactttctcattgtattgaactaatggttaaacgtgaggacagctggcagaagagactggataaggaaactgagaagaaaagaagaacagaggaagcatataaaaatgcaatgacagaacttaagaaaaaatcccactttggaggaccagattatgaagaaggccctaacagtctgattaatgaagaagagttctttgatgctgttgaagctgctcttgacagacaagataaaatagaagaacagtcacagagtgaaaaggtgagattacattggcctacatccttgccctctggagatgccttttcttctgtggggacacatagatttgtccaaaagccctatagtcgctcttcctccatgtcttccattgatctagtcagtgcctctgatgatgttcacagattcagctcccaggttgaagagatggtgcagaaccacatgacttactcattacaggatgtaggcggagatgccaattggcagttggttgtagaagaaggagaaatgaaggtatacagaagagaagtagaagaaaatgggattgttctggatcctttaaaagctacccatgcagttaaaggcgtcacaggacatgaagtctgcaattatttctggaatgttgacgttcgcaatgactgggaaacaactatagaaaactttcatgtggtggaaacattagctgataatgcaatcatcatttatcaaacacacaagagggtgtggcctgcttctcagcgagacgtattatatctttctgtcattcgaaagataccagccttgactgaaaatgaccctgaaacttggatagtttgtaatttttctgtggatcatgacagtgctcctctaaacaaccgatgtgtccgtgccaaaataaatgttgctatgatttgtcaaaccttggtaagcccaccagagggaaaccaggaaattagcagggacaacattctatgcaagattacatatgtagctaatgtgaaccctggaggatgggcaccagcctcagtgttaagggcagtggcaaagcgagagtatcctaaatttctaaaacgttttacttcttacgtccaagaaaaaactgcaggaaagcctattttgttctagtattaacaggtactagaagatatgttttatctttttttaactttatttgactaatatgactgtcaatactaaaatttagttgttgaaagtatttactatgtttttt

SEQ ID NO: 308949 - DNA, 2318 bp, Homo sapiens
ggcacgagcaggaagatggcggcggtagcggaggtgtgagtggacgcgggactcagcggccggattttctcttcccttcttttcccttttccttccctatttgaaattggcatcgagggggctaagttcgggtggcagcgccgggcgcaacgcaggggtcacggcgacggcggcggcggctgacggctggaagggtaggcttcattcaccgctcgtcctccttcctcgctccgctcggtgtcaggcgcggcggcggcgcggcgggcggacttcgtccctcctcctgctcccccccacaccggagcgggcactcttcgcttcgccatcccccgacccttcaccccgaggactgggcgcctcctccggcgcagctgagggagcgggggccggtctcctgctcggttgtcgagcctccatgtcggataatcagagctggaactcgtcgggctcggaggaggatccagagacggagtctgggccgcctgtggagcgctgcggggtcctcagtaagtggacaaactacattcatgggtggcaggatcgttgggtagttttgaaaaataatgctctgagttactacaaatctgaagatgaaacagagtatggctgcagaggatccatctgtcttagcaaggctgtcatcacacctcacgattttgatgaatgtcgatttgatattagtgtaaatgatagtgtttggtatcttcgtgctcaggatccagatcatagacagcaatggatagatgccattgaacagcacaagactgaatctggatatggatctgaatccagcttgcgtcgacatggctcaatggtgtccctggtgtctggagcaagtggctactctgcaacatccacctcttcattcaagaaaggccacagtttacgtgagaagttggctgaaatggaaacatttagagacatcttatgtagacaagttgacacgctacagaagtactttgatgcctgtgctgatgctgtctctaaggatgaacttcaaagggataaagtggtagaagatgatgaagatgactttcctacaacgcgttctgatggtgacttcttgcatagtaccaacggcaataaagaaaagttatttccacatgtgacaccaaaaggaattaatggtatagactttaaaggggaagcgataacttttaaagcaactactgctggaatccttgcaacactttctcattgtattgaactaatggttaaacgtgaggacagctggcagaagagactggataaggaaactgagaagaaaagaagaacagaggaagcatataaaaatgcaatgacagaacttaagaaaaaatcccactttggaggaccagattatgaagaaggccctaacagtctgattaatgaagaagagttctttgatgctgttgaagctgctcttgacagacaagataaaatagaagaacagtcacagagtgaaaaggtgagattacattggcctacatccttgccctctggagatgccttttcttctgtggggacacatagatttgtccaaaaggttgaagagatggtgcagaaccacatgacttactcattacaggatgtaggcggagatgccaattggcagttggttgtagaagaaggagaaatgaaggtatacagaagagaagtagaagaaaatgggattgttctggatcctttaaaagctacccatgcagttaaaggcgtcacaggacatgaagtctgcaattatttctggaatgttgacgttcgcaatgactgggaaacaactatagaaaactttcatgtggtggaaacattagctgataatgcaatcatcatttatcaaacacacaagagggtgtggcctgcttctcagcgagacgtattatatctttctgtcattcgaaagataccagccttgactgaaaatgaccctgaaacttggatagtttgtaatttttctgtggatcatgacagtgctcctctaaacaaccgatgtgtccgtgccaaaataaatgttgctatgatttgtcaaaccttggtaagcccaccagagggaaaccaggaaattagcagggacaacattctatgcaagattacatatgtagctaatgtgaaccctggaggatgggcaccagcctcagtgttaagggcagtggcaaagcgagagtatcctaaatttctaaaacgttttacttcttacgtccaagaaaaaactgcaggaaagcctattttgttctagtattaacaggtactagaagatatgttttatctttttttaactttatttgactaatatgactgtcaatactaaaatttagttgttgaaagtatttactatgtttttt

SEQ ID NO: 308950 - DNA, 1655 bp, Homo sapiens
ggcacgagcaggaagatggcggcggtagcggaggtgtgagtggacgcgggactcagcggccggattttctcttcccttcttttcccttttccttccctatttgaaattggcatcgagggggctaagttcgggtggcagcgccgggcgcaacgcaggggtcacggcgacggcggcggcggctgacggctggaagggtaggcttcattcaccgctcgtcctccttcctcgctccgctcggtgtcaggcgcggcggcggcgcggcgggcggacttcgtccctcctcctgctcccccccacaccggagcgggcactcttcgcttcgccatcccccgacccttcaccccgaggactgggcgcctcctccggcgcagctgagggagcgggggccggtctcctgctcggttgtcgagcctccatgtcggataatcagagctggaactcgtcgggctcggaggaggatccagagacggagtctgggccgcctgtggagcgctgcggggtcctcagtaagtggacaaactacattcatgggtggcaggatcgttgggtagttttgaaaaataatgctctgagttactacaaatctgaagatgaaacagagtatggctgcagaggatccatctgtcttagcaaggctgtcatcacacctcacgattttgatgaatgtcgatttgatattagtgtaaatgatagtgtttggtatcttcgtgctcaggatccagatcatagacagcaatggatagatgccattgaacagcacaagactgaatctggatatggatctgaatccagcttgcgtcgacatggctcaatggtgtccctggtgtctggagcaagtggctactctgcaacatccacctcttcattcaagaaaggccacagtttacgtgagaagttggctgaaatggaaacatttagagacatcttatgtagacaagttgacacgctacagaagtactttgatgcctgtgctgatgctgtctctaaggatgaacttcaaagggataaagtggtagaagatgatgaagatgactttcctacaacgcgttctgatggtgacttcttgcatagtaccaacggcaataaagaaaagttatttccacatgtgacaccaaaaggaattaatggtatagactttaaaggggaagcgataacttttaaagcaactactgctggaatccttgcaacactttctcattgtattgaactaatggttaaacgtgaggacagctggcagaagagactggataaggaaactgagaagaaaagaagaacagaggaagcatataaaaatgcaatgacagaacttaagaaaaaatcccactttggaggaccagattatgaagaaggccctaacagtctgattaatgaagaagagttctttgatgctgttgaagctgctcttgacagacaagataaaatagaagaacagtcacagagtgaaaaggtgagattacattggcctacatccttgccctctggagatgccttttcttctgtggggacacatagatttgtccaaaagtgaagagatggtgtgagagaggagtaaaggatgataccagggatttcttgtagctggtgggcgttgccatgtataaggaacagggaagacttgggacgaacgcgtgtggaagtaagatccaggagttggg

SEQ ID NO: 308951 - DNA, 364 bp, Homo sapiens
ggaccttccttggtgtgttgaaaatcaaggattttatcccagattttcaacccaaggatgagctgcaatataactatcactgttttgttggctgcctgccacagaatgaccactgaggaaataaagcgagctttggattcactgcagcttggtttactgtggttcttttctgtattaccgttgttaggattgggaggtttaagtggtaactgggtccagcagcagggaatctgcgtgcagcagctaaatcaaggtttagtcaatgtccaaaacactttagcaaattggatatcagtaattccccagcaccctaaaacagttcccagagcaagtatttattgagctcctactacatgccatgaag

SEQ ID NO: 308952 - DNA, 5318 bp, Homo sapiens
ggcacgagcaggaagatggcggcggtagcggaggtgtgagtggacgcgggactcagcggccggattttctcttcccttcttttcccttttccttccctatttgaaattggcatcgagggggctaagttcgggtggcagcgccgggcgcaacgcaggggtcacggcgacggcggcggcggctgacggctggaagggtaggcttcattcaccgctcgtcctccttcctcgctccgctcggtgtcaggcgcggcggcggcgcggcgggcggacttcgtccctcctcctgctcccccccacaccggagcgggcactcttcgcttcgccatcccccgacccttcaccccgaggactgggcgcctcctccggcgcagctgagggagcgggggccggtctcctgctcggttgtcgagcctccatgtcggataatcagagctggaactcgtcgggctcggaggaggatccagagacggagtctgggccgcctgtggagcgctgcggggtcctcagtaagtggacaaactacattcatgggtggcaggatcgttgggtagttttgaaaaataatgctctgagttactacaaatctgaagatgaaacagagtatggctgcagaggatccatctgtcttagcaaggctgtcatcacacctcacgattttgatgaatgtcgatttgatattagtgtaaatgatagtgtttggtatcttcgtgctcaggatccagatcatagacagcaatggatagatgccattgaacagcacaagactgaatctggatatggatctgaatccagcttgcgtcgacatggctcaatggtgtccctggtgtctggagcaagtggctactctgcaacatccacctcttcattcaagaaaggccacagtttacgtgagaagttggctgaaatggaaacatttagagacatcttatgtagacaagttgacacgctacagaagtactttgatgcctgtgctgatgctgtctctaaggatgaacttcaaagggataaagtggtagaagatgatgaagatgactttcctacaacgcgttctgatggtgacttcttgcatagtaccaacggcaataaagaaaagttatttccacatgtgacaccaaaaggaattaatggtatagactttaaaggggaagcgataacttttaaagcaactactgctggaatccttgcaacactttctcattgtattgaactaatggttaaacgtgaggacagctggcagaagagactggataaggaaactgagaagaaaagaagaacagaggaagcatataaaaatgcaatgacagaacttaagaaaaaatcccactttggaggaccagattatgaagaaggccctaacagtctgattaatgaagaagagttctttgatgctgttgaagctgctcttgacagacaagataaaatagaagaacagtcacagagtgaaaaggtgagattacattggcctacatccttgccctctggagatgccttttcttctgtggggacacatagatttgtccaaaaggttgaagagatggtgcagaaccacatgacttactcattacaggatgtaggcggagatgccaattggcagttggttgtagaagaaggagaaatgaaggtatacagaagagaagtagaagaaaatgggattgttctggatcctttaaaagctacccatgcagttaaaggcgtcacaggacatgaagtctgcaattatttctggaatgttgacgttcgcaatgactgggaaacaactatagaaaactttcatgtggtggaaacattagctgataatgcaatcatcatttatcaaacacacaagagggtgtggcctgcttctcagcgagacgtattatatctttctgtcattcgaaagataccagccttgactgaaaatgaccctgaaacttggatagtttgtaatttttctgtggatcatgacagtgctcctctaaacaaccgatgtgtccgtgccaaaataaatgttgctatgatttgtcaaaccttggtaagcccaccagagggaaaccaggaaattagcagggacaacattctatgcaagattacatatgtagctaatgtgaaccctggaggatgggcaccagcctcagtgttaagggcagtggcaaagcgagagtatcctaaatttctaaaacgttttacttcttacgtccaagaaaaaactgcaggaaagcctattttgttctagtattaacagtgactgaagcaaggctgtgtgacattccatgttggagaaaaaaagaaaaaaaaaagctgaatgctctaagctggaacgtaggatctatagccttgtctgtggcccaagaccttggccttgtgtacaaaaatgacaaaatattgcaatagcaaagctgaacatctaacactagctatctcttgctagatctccttgctcagcatataactataaatacatgtaaaattacatgtatatggctatatttttatttgcttgctcctagaagagaaaaaaaaatcaactttgaatcacaactaggaattgatgctttaatttttggatactttttcagaatttttaatttactatggtccggcctaagatcctctgttgtatcaggttttgtgcacaaaagaaaagcacaaaagttgaatgcacatggggcatgtgctttctgtgcaccaaatatctggatgaggttcttttttcaggcctacagtcaaatctgtgtccagaattttttgacttttttgctttgtataatcatagaattcattgctgctgatttctataatgattcatgttgtcatgtgtctcttaataactgagggctgtcagtaacctgtgattttgccttttctatagtcttactcccatgaagaaccttggttctgatggagaaagtgaaaagctttatttcttcccctagatatctttatatttctattatattttttagttgtgtactgtgtactagagatttttttcagtttgttatgaacacaatttggtaagccctaaattggttctgcctgtctccaaacagaaacatctgtacaaatcttgttggtatagactactttctggaaaatggtcaagataagttcatgttttcttgaaatttctaagatagtatatggtatcacttgtttaaagcaaatcagactgagtttgacatttaattcaatatttctggtattcagtaacgggtatatatgtttgttcttccagtttgggtcagtttaaaagatatgttgcaaagtatacatagaaaatgtgagcaatgcctctctttgccttttgatcagaaacttcagcagagcggtaaggattccacatgatttaaactgaaatgcttttctttgttgctgtaagaacttaaaatgtaaaatacctttttcagtttaagtcctgtaaacaacattgaagcatggagatgaggcaaggaatagtactcactgaagttgaaatgactgcccacttcaaaatcttcattgtgtttacacaccagtgtatttatacaaatcagaggcattttgtagatgctttgctgacttgttcagctctgtaaaaacacagaaatcagacccattttgtaaagcggaaaatcatgttacatggaacatgtcctgtatatatcacatacatggtaatggagtcttaatgataagtgcaagataataatttaatgatgggattagtctgatcgcttaatatgcacaatcctggaagtgaattacttgcatcagatatagtgatatttattattctgtacagagagaaaaatacatataaaacatatgcttacattacatgcacgcggatttcatgctccataatcttttctattttttaatttacctttctgtaaatgatgtgcatggaatatgccttatagaaaaatgctgttcataatttgactacgtggaaaagtgcctatatggtggtaatgctagtaaggcaaataagacaaattatcatgttggtttactacatcaccagttaacattttatattgtgatgtttaaaaaagaaaaatttatacctcaaatgtgtattttattttacaatcagctgtggggtatggggttgggatgggagaatgggggggttggggagggcaggtttattcaccatagccgctgataagaatcttcaaaaaaattctatatgcgcactataaatgtttctctgtttgccatttctggtaactatcatgaacacagacagttaactctttcataactgaattggatagctttattttacagaagtatggcaagtttacaaagcaatatctaaatctaattatcattagttgcatttggactaaatgtgatgatatacttttgcaattgattctgtaaataaaaggattacactaaaatatttgtattaaaagaagaaaagataacattttacctttagataactgcacttgtacctcactagagttaatcccacccaatcagattgagaaataaattggggaatgtggaaagagtccaaaagaggtcagaatttggagaggtactggccttctggacaacatttagaccctctacaattattttcattaagctgattcctacatcctgaatattcatgttttctcatctacagatatttgtcttcccccaaactaaaagaaaaaaaactaccctttactctcttttctactcagttactcttttgtgctatgttagaaacttgaaatatattggtgatgtggggattttgtccctgactgcccactgtacaggacaagagagtacagtgtttcagttggaattcaggactcctggttttgaggtagaggatgatcactgcagtacttggtttggaattgccacaggggtagctaaaccaaaggagggttatatctgcaagggaggtgtaagaaggcaaaataaggaaaaggaggaatgggttttctatttgttcagtttcatcaactaatttatacacttaatacaacttcagtgtcaattgctattaagaaatttttagttgggctgagctggttctcttgtgaaattgtgctggttatctttaagcttatcagttatttgtccaattaaacacttttcaccagtatttagtccgagttgtacagacgatgtatttggattttgtcatggttcatctacagactcaaaacataatcattttaaagtaccttgggagtgtgtagagtaacttctataatagctttatgatcctgatgatgttttttaaacacaataaagttggatcttccatgttacaatcacagaattaaaaccagtatttaaagtggaaaagtattaaaatattatggacaaaaaaaaaactg

SEQ ID NO: 308953 - DNA, 5260 bp, Homo sapiens
ggcacgagcaggaagatggcggcggtagcggaggtgtgagtggacgcgggactcagcggccggattttctcttcccttcttttcccttttccttccctatttgaaattggcatcgagggggctaagttcgggtggcagcgccgggcgcaacgcaggggtcacggcgacggcggcggcggctgacggctggaagggtaggcttcattcaccgctcgtcctccttcctcgctccgctcggtgtcaggcgcggcggcggcgcggcgggcggacttcgtccctcctcctgctcccccccacaccggagcgggcactcttcgcttcgccatcccccgacccttcaccccgaggactgggcgcctcctccggcgcagctgagggagcgggggccggtctcctgctcggttgtcgagcctccatgtcggataatcagagctggaactcgtcgggctcggaggaggatccagagacggagtctgggccgcctgtggagcgctgcggggtcctcagtaagtggacaaactacattcatgggtggcaggatcgttgggtagttttgaaaaataatgctctgagttactacaaatctgaagatgaaacagagtatggctgcagaggatccatctgtcttagcaaggctgtcatcacacctcacgattttgatgaatgtcgatttgatattagtgtaaatgatagtgtttggtatcttcgtgctcaggatccagatcatagacagcaatggatagatgccattgaacagcacaagactgaatctggatatggatctgaatccagcttgcgtcgacatggctcaatggtgtccctggtgtctggagcaagtggctactctgcaacatccacctcttcattcaagaaaggccacagtttacgtgagaagttggctgaaatggaaacatttagagacatcttatgtagacaagttgacacgctacagaagtactttgatgcctgtgctgatgctgtctctaaggatgaacttcaaagggataaagtggtagaagatgatgaagatgactttcctacaacgcgttctgatggtgacttcttgcatagtaccaacggcaataaagaaaagttatttccacatgtgacaccaaaaggaattaatggtatagactttaaaggggaagcgataacttttaaagcaactactgctggaatccttgcaacactttctcattgtattgaactaatggttaaacgtgaggacagctggcagaagagactggataaggaaactgagaagaaaagaagaacagaggaagcatataaaaatgcaatgacagaacttaagaaaaaatcccactttggaggaccagattatgaagaaggccctaacagtctgattaatgaagaagagttctttgatgctgttgaagctgctcttgacagacaagataaaatagaagaacagtcacagagtgaaaaggtgagattacattggcctacatccttgccctctggagatgccttttcttctgtggggacacatagatttgtccaaaaggttgaagagatggtgcagaaccacatgacttactcattacaggatgtaggcggagatgccaattggcagttggttgtagaagaaggagaaatgaaggtatacagaagagaagtagaagaaaatgggattgttctggatcctttaaaagctacccatgcagttaaaggcgtcacaggacatgaagtctgcaattatttctggaatgttgacgttcgcaatgactgggaaacaactatagaaaactttcatgtggtggaaacattagctgataatgcaatcatcatttatcaaacacacaagagggtgtggcctgcttctcagcgagacgtattatatctttctgtcattcgaaagataccagccttgactgaaaatgaccctgaaacttggatagtttgtaatttttctgtggatcatgacagtgctcctctaaacaaccgatgtgtccgtgccaaaataaatgttgctatgatttgtcaaaccttggtaagcccaccagagggaaaccaggaaattagcagggacaacattctatgcaagattacatatgtagctaatgtgaaccctggaggatgggcaccagcctcagtgttaagggcagtggcaaagcgagagtatcctaaatttctaaaacgttttacttcttacgtccaagaaaaaactgcaggaaagcctattttgttctagtattaacagtgactgaagcaaggctgtgtgacattccatgttggagaaaaaaagaaaaaaaaaagctgaatgctctaagctggaacgtaggatctatagccttgtctgtggcccaagaccttggccttgtgtacaaaaatgacaaaatattgcaatagcaaagctgaacatctaacactagctatctcttgctagatctccttgctcagcatataactataaatacatgtaaaattacatgtatatggctatatttttatttgcttgctcctagaagagaaaaaaaaatcaactttgaatcacaactaggaattgatgctttaatttttggatactttttcagaatttttaatttactatggtccggcctaagatcctctgttgtatcaggttttgtgcacaaaagaaaagcacaaaagttgaatgcacatggggcatgtgctttctgtgcaccaaatatctggatgaggttcttttttcaggcctacagtcaaatctgtgtccagaattttttgacttttttgctttgtataatcatagaattcattgctgctgatttctataatgattcatgttgtcatgtgtctcttaataactgagggctgtcagtaacctgtgattttgccttttctatagtcttactcccatgaagaaccttggttctgatggagaaagtgaaaagctttatttcttcccctagatatctttatatttctattatattttttagttgtgtactgtgtactagagatttttttcagtttgttatgaacacaatttggtaagccctaaattggttctgcctgtctccaaacagaaacatctgtacaaatcttgttggtatagactactttctggaaaatggtcaagataagttcatgttttcttgaaatttctaagatagtatatggtatcacttgtttaaagcaaatcagactgagtttgacatttaattcaatatttctggtattcagtaacgggtatatatgtttgttcttccagtttgggtcagtttaaaagatatgttgcaaagtatacatagaaaatgtgagcaatgcctctctttgccttttgatcagaaacttcagcagagcggtaaggattccacatgatttaaactgaaatgcttttctttgttgctgtaagaacttaaaatgtaaaatacctttttcagtttaagtcctgtaaacaacattgaagcatggagatgaggcaaggaatagtactcactgaagttgaaatgactgcccacttcaaaatcttcattgtgtttacacaccagtgtatttatacaaatcagaggcattttgtagatgctttgctgacttgttcagctctgtaaaaacacagaaatcagacccattttgtaaagcggaaaatcatgttacatggaacatgtcctgtatatatcacatacatggtaatggagtcttaatgataagtgcaagataataatttaatgatgggattagtctgatcgcttaatatgcacaatcctggaagtgaattacttgcatcagatatagtgatatttattattctgtacagagagaaaaatacatataaaacatatgcttacattacatgcacgcggatttcatgctccataatcttttctattttttaatttacctttctgtaaatgatgtgcatggaatatgccttatagaaaaatgctgttcataatttgactacgtggaaaagtgcctatatggtggtaatgctagtaaggcaaataagacaaattatcatgttggtttactacatcaccagttaacattttatattgtgatgtttaaaaaagaaaaatttatacctcaaatgtgtattttattttacaatcagctgtggggtatggggttgggatgggagaatgggggggttggggagggcaggtttattcaccatagccgctgataagaatcttcaaaaaaattctatatgcgcactataaatgtttctctgtttgccatttctggtaactatcatgaacacagacagttaactctttcataactgaattggatagctttattttacagaagtatggcaagtttacaaagcaatatctaaatctaattatcattagttgcatttggactaaatgtgatgatatacttttgcaattgattctgtaaataaaaggattacactaaaatatttgtattaaaagaagaaaagataacattttacctttagataactgcacttgtacctcactagagttaatcccacccaatcagattgagaaataaattggggaatgtggaaagagtccaaaagaggtcagaatttggagaggtactggccttctggacaacatttagaccctctacaattattttcattaagctgattcctacatcctgaatattcatgttttctcatctacagatatttgtcttcccccaaactaaaagaacttgaaatatattggtgatgtggggattttgtccctgactgcccactgtacaggacaagagagtacagtgtttcagttggaattcaggactcctggttttgaggtagaggatgatcactgcagtacttggtttggaattgccacaggggtagctaaaccaaaggagggttatatctgcaagggaggtgtaagaaggcaaaataaggaaaaggaggaatgggttttctatttgttcagtttcatcaactaatttatacacttaatacaacttcagtgtcaattgctattaagaaatttttagttgggctgagctggttctcttgtgaaattgtgctggttatctttaagcttatcagttatttgtccaattaaacacttttcaccagtatttagtccgagttgtacagacgatgtatttggattttgtcatggttcatctacagactcaaaacataatcattttaaagtaccttgggagtgtgtagagtaacttctataatagctttatgatcctgatgatgttttttaaacacaataaagttggatcttccatgttacaatcacagaattaaaaccagtatttaaagtggaaaagtattaaaatattatggacaaaaaaaaaactg

SEQ ID NO: 308954 - DNA, 5396 bp, Homo sapiens
ggcacgagcaggaagatggcggcggtagcggaggtgtgagtggacgcgggactcagcggccggattttctcttcccttcttttcccttttccttccctatttgaaattggcatcgagggggctaagttcgggtggcagcgccgggcgcaacgcaggggtcacggcgacggcggcggcggctgacggctggaagggtaggcttcattcaccgctcgtcctccttcctcgctccgctcggtgtcaggcgcggcggcggcgcggcgggcggacttcgtccctcctcctgctcccccccacaccggagcgggcactcttcgcttcgccatcccccgacccttcaccccgaggactgggcgcctcctccggcgcagctgagggagcgggggccggtctcctgctcggttgtcgagcctccatgtcggataatcagagctggaactcgtcgggctcggaggaggatccagagacggagtctgggccgcctgtggagcgctgcggggtcctcagtaagtggacaaactacattcatgggtggcaggatcgttgggtagttttgaaaaataatgctctgagttactacaaatctgaagatgaaacagagtatggctgcagaggatccatctgtcttagcaaggctgtcatcacacctcacgattttgatgaatgtcgatttgatattagtgtaaatgatagtgtttggtatcttcgtgctcaggatccagatcatagacagcaatggatagatgccattgaacagcacaagactgaatctggatatggatctgaatccagcttgcgtcgacatggctcaatggtgtccctggtgtctggagcaagtggctactctgcaacatccacctcttcattcaagaaaggccacagtttacgtgagaagttggctgaaatggaaacatttagagacatcttatgtagacaagttgacacgctacagaagtactttgatgcctgtgctgatgctgtctctaaggatgaacttcaaagggataaagtggtagaagatgatgaagatgactttcctacaacgcgttctgatggtgacttcttgcatagtaccaacggcaataaagaaaagttatttccacatgtgacaccaaaaggaattaatggtatagactttaaaggggaagcgataacttttaaagcaactactgctggaatccttgcaacactttctcattgtattgaactaatggttaaacgtgaggacagctggcagaagagactggataaggaaactgagaagaaaagaagaacagaggaagcatataaaaatgcaatgacagaacttaagaaaaaatcccactttggaggaccagattatgaagaaggccctaacagtctgattaatgaagaagagttctttgatgctgttgaagctgctcttgacagacaagataaaatagaagaacagtcacagagtgaaaaggtgagattacattggcctacatccttgccctctggagatgccttttcttctgtggggacacatagatttgtccaaaagccctatagtcgctcttcctccatgtcttccattgatctagtcagtgcctctgatgatgttcacagattcagctcccaggttgaagagatggtgcagaaccacatgacttactcattacaggatgtaggcggagatgccaattggcagttggttgtagaagaaggagaaatgaaggtatacagaagagaagtagaagaaaatgggattgttctggatcctttaaaagctacccatgcagttaaaggcgtcacaggacatgaagtctgcaattatttctggaatgttgacgttcgcaatgactgggaaacaactatagaaaactttcatgtggtggaaacattagctgataatgcaatcatcatttatcaaacacacaagagggtgtggcctgcttctcagcgagacgtattatatctttctgtcattcgaaagataccagccttgactgaaaatgaccctgaaacttggatagtttgtaatttttctgtggatcatgacagtgctcctctaaacaaccgatgtgtccgtgccaaaataaatgttgctatgatttgtcaaaccttggtaagcccaccagagggaaaccaggaaattagcagggacaacattctatgcaagattacatatgtagctaatgtgaaccctggaggatgggcaccagcctcagtgttaagggcagtggcaaagcgagagtatcctaaatttctaaaacgttttacttcttacgtccaagaaaaaactgcaggaaagcctattttgttctagtattaacagtgactgaagcaaggctgtgtgacattccatgttggagaaaaaaagaaaaaaaaaagctgaatgctctaagctggaacgtaggatctatagccttgtctgtggcccaagaccttggccttgtgtacaaaaatgacaaaatattgcaatagcaaagctgaacatctaacactagctatctcttgctagatctccttgctcagcatataactataaatacatgtaaaattacatgtatatggctatatttttatttgcttgctcctagaagagaaaaaaaaatcaactttgaatcacaactaggaattgatgctttaatttttggatactttttcagaatttttaatttactatggtccggcctaagatcctctgttgtatcaggttttgtgcacaaaagaaaagcacaaaagttgaatgcacatggggcatgtgctttctgtgcaccaaatatctggatgaggttcttttttcaggcctacagtcaaatctgtgtccagaattttttgacttttttgctttgtataatcatagaattcattgctgctgatttctataatgattcatgttgtcatgtgtctcttaataactgagggctgtcagtaacctgtgattttgccttttctatagtcttactcccatgaagaaccttggttctgatggagaaagtgaaaagctttatttcttcccctagatatctttatatttctattatattttttagttgtgtactgtgtactagagatttttttcagtttgttatgaacacaatttggtaagccctaaattggttctgcctgtctccaaacagaaacatctgtacaaatcttgttggtatagactactttctggaaaatggtcaagataagttcatgttttcttgaaatttctaagatagtatatggtatcacttgtttaaagcaaatcagactgagtttgacatttaattcaatatttctggtattcagtaacgggtatatatgtttgttcttccagtttgggtcagtttaaaagatatgttgcaaagtatacatagaaaatgtgagcaatgcctctctttgccttttgatcagaaacttcagcagagcggtaaggattccacatgatttaaactgaaatgcttttctttgttgctgtaagaacttaaaatgtaaaatacctttttcagtttaagtcctgtaaacaacattgaagcatggagatgaggcaaggaatagtactcactgaagttgaaatgactgcccacttcaaaatcttcattgtgtttacacaccagtgtatttatacaaatcagaggcattttgtagatgctttgctgacttgttcagctctgtaaaaacacagaaatcagacccattttgtaaagcggaaaatcatgttacatggaacatgtcctgtatatatcacatacatggtaatggagtcttaatgataagtgcaagataataatttaatgatgggattagtctgatcgcttaatatgcacaatcctggaagtgaattacttgcatcagatatagtgatatttattattctgtacagagagaaaaatacatataaaacatatgcttacattacatgcacgcggatttcatgctccataatcttttctattttttaatttacctttctgtaaatgatgtgcatggaatatgccttatagaaaaatgctgttcataatttgactacgtggaaaagtgcctatatggtggtaatgctagtaaggcaaataagacaaattatcatgttggtttactacatcaccagttaacattttatattgtgatgtttaaaaaagaaaaatttatacctcaaatgtgtattttattttacaatcagctgtggggtatggggttgggatgggagaatgggggggttggggagggcaggtttattcaccatagccgctgataagaatcttcaaaaaaattctatatgcgcactataaatgtttctctgtttgccatttctggtaactatcatgaacacagacagttaactctttcataactgaattggatagctttattttacagaagtatggcaagtttacaaagcaatatctaaatctaattatcattagttgcatttggactaaatgtgatgatatacttttgcaattgattctgtaaataaaaggattacactaaaatatttgtattaaaagaagaaaagataacattttacctttagataactgcacttgtacctcactagagttaatcccacccaatcagattgagaaataaattggggaatgtggaaagagtccaaaagaggtcagaatttggagaggtactggccttctggacaacatttagaccctctacaattattttcattaagctgattcctacatcctgaatattcatgttttctcatctacagatatttgtcttcccccaaactaaaagaaaaaaaactaccctttactctcttttctactcagttactcttttgtgctatgttagaaacttgaaatatattggtgatgtggggattttgtccctgactgcccactgtacaggacaagagagtacagtgtttcagttggaattcaggactcctggttttgaggtagaggatgatcactgcagtacttggtttggaattgccacaggggtagctaaaccaaaggagggttatatctgcaagggaggtgtaagaaggcaaaataaggaaaaggaggaatgggttttctatttgttcagtttcatcaactaatttatacacttaatacaacttcagtgtcaattgctattaagaaatttttagttgggctgagctggttctcttgtgaaattgtgctggttatctttaagcttatcagttatttgtccaattaaacacttttcaccagtatttagtccgagttgtacagacgatgtatttggattttgtcatggttcatctacagactcaaaacataatcattttaaagtaccttgggagtgtgtagagtaacttctataatagctttatgatcctgatgatgttttttaaacacaataaagttggatcttccatgttacaatcacagaattaaaaccagtatttaaagtggaaaagtattaaaatattatggacaaaaaaaaaactg

SEQ ID NO: 308955 - DNA, 5186 bp, Homo sapiens
ggcacgagcaggaagatggcggcggtagcggaggtgtgagtggacgcgggactcagcggccggattttctcttcccttcttttcccttttccttccctatttgaaattggcatcgagggggctaagttcgggtggcagcgccgggcgcaacgcaggggtcacggcgacggcggcggcggctgacggctggaagggtaggcttcattcaccgctcgtcctccttcctcgctccgctcggtgtcaggcgcggcggcggcgcggcgggcggacttcgtccctcctcctgctcccccccacaccggagcgggcactcttcgcttcgccatcccccgacccttcaccccgaggactgggcgcctcctccggcgcagctgagggagcgggggccggtctcctgctcggttgtcgagcctccatgtcggataatcagagctggaactcgtcgggctcggaggaggatccagagacggagtctgggccgcctgtggagcgctgcggggtcctcagtaagtggacaaactacattcatgggtggcaggatcgttgggtagttttgaaaaataatgctctgagttactacaaatctgaagatgaaacagagtatggctgcagaggatccatctgtcttagcaaggctgtcatcacacctcacgattttgatgaatgtcgatttgatattagtgtaaatgatagtgtttggtatcttcgtgctcaggatccagatcatagacagcaatggatagatgccattgaacagcacaagactgaatctggatatggatctgaatccagcttgcgtcgacatggctcaatggtgtccctggtgtctggagcaagtggctactctgcaacatccacctcttcattcaagaaaggccacagtttacgtgagaagttggctgaaatggaaacatttagagacatcttatgtagacaagttgacacgctacagaagtactttgatgcctgtgctgatgctgtctctaaggatgaacttcaaagggataaagtggtagaagatgatgaagatgactttcctacaacgcgttctgatggtgacttcttgcatagtaccaacggcaataaagaaaagttatttccacatgtgacaccaaaaggaattaatggtatagactttaaaggggaagcgataacttttaaagcaactactgctggaatccttgcaacactttctcattgtattgaactaatggttaaacgtgaggacagctggcagaagagactggataaggaaactgagaagaaaagaagaacagaggaagcatataaaaatgcaatgacagaacttaagaaaaaatcccactttggaggaccagattatgaagaaggccctaacagtctgattaatgaagaagagttctttgatgctgttgaagctgctcttgacagacaagataaaatagaagaacagtcacagagtgaaaaggtgagattacattggcctacatccttgccctctggagatgccttttcttctgtggggacacatagatttgtccaaaagccctatagtcgctcttcctccatgtcttccattgatctagtcagtgcctctgatgatgttcacagattcagctcccaggttgaagagatggtgcagaaccacatgacttactcattacaggatgtaggcggagatgccaattggcagttggttgtagaagaaggagaaatgaaggtatacagaagagaagtagaagaaaatgggattgttctggatcctttaaaagctacccatgcagttaaaggcgtcacaggacatgaagtctgcaattatttctggaatgttgacgttcgcaatgactgggaaacaactatagaaaactttcatgtggtggaaacattagctgataatgcaatcatcatttatcaaacacacaagagggtgtggcctgcttctcagcgagacgtattatatctttctgtcattcgaaagataccagccttgactgaaaatgaccctgaaacttggatagtttgtaatttttctgtggatcatgacagtgctcctctaaacaaccgatgtgtccgtgccaaaataaatgttgctatgatttgtcaaaccttgtgactgaagcaaggctgtgtgacattccatgttggagaaaaaaagaaaaaaaaaagctgaatgctctaagctggaacgtaggatctatagccttgtctgtggcccaagaccttggccttgtgtacaaaaatgacaaaatattgcaatagcaaagctgaacatctaacactagctatctcttgctagatctccttgctcagcatataactataaatacatgtaaaattacatgtatatggctatatttttatttgcttgctcctagaagagaaaaaaaaatcaactttgaatcacaactaggaattgatgctttaatttttggatactttttcagaatttttaatttactatggtccggcctaagatcctctgttgtatcaggttttgtgcacaaaagaaaagcacaaaagttgaatgcacatggggcatgtgctttctgtgcaccaaatatctggatgaggttcttttttcaggcctacagtcaaatctgtgtccagaattttttgacttttttgctttgtataatcatagaattcattgctgctgatttctataatgattcatgttgtcatgtgtctcttaataactgagggctgtcagtaacctgtgattttgccttttctatagtcttactcccatgaagaaccttggttctgatggagaaagtgaaaagctttatttcttcccctagatatctttatatttctattatattttttagttgtgtactgtgtactagagatttttttcagtttgttatgaacacaatttggtaagccctaaattggttctgcctgtctccaaacagaaacatctgtacaaatcttgttggtatagactactttctggaaaatggtcaagataagttcatgttttcttgaaatttctaagatagtatatggtatcacttgtttaaagcaaatcagactgagtttgacatttaattcaatatttctggtattcagtaacgggtatatatgtttgttcttccagtttgggtcagtttaaaagatatgttgcaaagtatacatagaaaatgtgagcaatgcctctctttgccttttgatcagaaacttcagcagagcggtaaggattccacatgatttaaactgaaatgcttttctttgttgctgtaagaacttaaaatgtaaaatacctttttcagtttaagtcctgtaaacaacattgaagcatggagatgaggcaaggaatagtactcactgaagttgaaatgactgcccacttcaaaatcttcattgtgtttacacaccagtgtatttatacaaatcagaggcattttgtagatgctttgctgacttgttcagctctgtaaaaacacagaaatcagacccattttgtaaagcggaaaatcatgttacatggaacatgtcctgtatatatcacatacatggtaatggagtcttaatgataagtgcaagataataatttaatgatgggattagtctgatcgcttaatatgcacaatcctggaagtgaattacttgcatcagatatagtgatatttattattctgtacagagagaaaaatacatataaaacatatgcttacattacatgcacgcggatttcatgctccataatcttttctattttttaatttacctttctgtaaatgatgtgcatggaatatgccttatagaaaaatgctgttcataatttgactacgtggaaaagtgcctatatggtggtaatgctagtaaggcaaataagacaaattatcatgttggtttactacatcaccagttaacattttatattgtgatgtttaaaaaagaaaaatttatacctcaaatgtgtattttattttacaatcagctgtggggtatggggttgggatgggagaatgggggggttggggagggcaggtttattcaccatagccgctgataagaatcttcaaaaaaattctatatgcgcactataaatgtttctctgtttgccatttctggtaactatcatgaacacagacagttaactctttcataactgaattggatagctttattttacagaagtatggcaagtttacaaagcaatatctaaatctaattatcattagttgcatttggactaaatgtgatgatatacttttgcaattgattctgtaaataaaaggattacactaaaatatttgtattaaaagaagaaaagataacattttacctttagataactgcacttgtacctcactagagttaatcccacccaatcagattgagaaataaattggggaatgtggaaagagtccaaaagaggtcagaatttggagaggtactggccttctggacaacatttagaccctctacaattattttcattaagctgattcctacatcctgaatattcatgttttctcatctacagatatttgtcttcccccaaactaaaagaaaaaaaactaccctttactctcttttctactcagttactcttttgtgctatgttagaaacttgaaatatattggtgatgtggggattttgtccctgactgcccactgtacaggacaagagagtacagtgtttcagttggaattcaggactcctggttttgaggtagaggatgatcactgcagtacttggtttggaattgccacaggggtagctaaaccaaaggagggttatatctgcaagggaggtgtaagaaggcaaaataaggaaaaggaggaatgggttttctatttgttcagtttcatcaactaatttatacacttaatacaacttcagtgtcaattgctattaagaaatttttagttgggctgagctggttctcttgtgaaattgtgctggttatctttaagcttatcagttatttgtccaattaaacacttttcaccagtatttagtccgagttgtacagacgatgtatttggattttgtcatggttcatctacagactcaaaacataatcattttaaagtaccttgggagtgtgtagagtaacttctataatagctttatgatcctgatgatgttttttaaacacaataaagttggatcttccatgttacaatcacagaattaaaaccagtatttaaagtggaaaagtattaaaatattatggacaaaaaaaaaactg

SEQ ID NO: 308956 - DNA, 3686 bp, Homo sapiens
ggcacgagcaggaagatggcggcggtagcggaggtgtgagtggacgcgggactcagcggccggattttctcttcccttcttttcccttttccttccctatttgaaattggcatcgagggggctaagttcgggtggcagcgccgggcgcaacgcaggggtcacggcgacggcggcggcggctgacggctggaagggtaggcttcattcaccgctcgtcctccttcctcgctccgctcggtgtcaggcgcggcggcggcgcggcgggcggacttcgtccctcctcctgctcccccccacaccggagcgggcactcttcgcttcgccatcccccgacccttcaccccgaggactgggcgcctcctccggcgcagctgagggagcgggggccggtctcctgctcggttgtcgagcctccatgtcggataatcagagctggaactcgtcgggctcggaggaggatccagagacggagtctgggccgcctgtggagcgctgcggggtcctcagtaagtggacaaactacattcatgggtggcaggatcgttgggtagttttgaaaaataatgctctgagttactacaaatctgaagatgaaacagagtatggctgcagaggatccatctgtcttagcaaggctgtcatcacacctcacgattttgatgaatgtcgatttgatattagtgtaaatgatagtgtttggtatcttcgtgctcaggatccagatcatagacagcaatggatagatgccattgaacagcacaagactgaatctggatatggatctgaatccagcttgcgtcgacatggctcaatggtgtccctggtgtctggagcaagtggctactctgcaacatccacctcttcattcaagaaaggccacagtttacgtgagaagttggctgaaatggaaacatttagagacatcttatgtagacaagttgacacgctacagaagtactttgatgcctgtgctgatgctgtctctaaggatgaacttcaaagggataaagtggtagaagatgatgaagatgactttcctacaacgcgttctgatggtgacttcttgcatagtaccaacggcaataaagaaaagttatttccacatgtgacaccaaaaggaattaatggtatagactttaaaggggaagcgataacttttaaagcaactactgctggaatccttgcaacactttctcattgtattgaactaatggttaaacgtgaggacagctggcagaagagactggataaggaaactgagaagaaaagaagaacagaggaagcatataaaaatgcaatgacagaacttaagaaaaaatcccactttggaggaccagattatgaagaaggccctaacagtctgattaatgaagaagagttctttgatgctgttgaagctgctcttgacagacaagataaaatagaagaacagtcacagagtgaaaaggtgagattacattggcctacatccttgccctctggagatgccttttcttctgtggggacacatagatttgtccaaaaggttgaagagatggtgcagaaccacatgacttactcattacaggatgtaggcggagatgccaattggcagttggttgtagaagaaggagaaatgaaggtatacagaagagaagtagaagaaaatgggattgttctggatcctttaaaagctacccatgcagttaaaggcgtcacaggacatgaagtctgcaattatttctggaatgttgacgttcgcaatgactgggaaacaactatagaaaactttcatgtggtggaaacattagctgataatgcaatcatcatttatcaaacacacaagagggtgtggcctgcttctcagcgagacgtattatatctttctgtcattcgaaagataccagccttgactgaaaatgaccctgaaacttggatagtttgtaatttttctgtggatcatgacagtgctcctctaaacaaccgatgtgtccgtgccaaaataaatgttgctatgatttgtcaaaccttggtaagcccaccagagggaaaccaggaaattagcagggacaacattctatgcaagattacatatgtagctaatgtgaaccctggaggatgggcaccagcctcagtgttaagggcagtggcaaagcgagagtatcctaaatttctaaaacgttttacttcttacgtccaagaaaaaactgcaggaaagcctattttgttctagtattaacagtgactgaagcaaggctgtgtgacattccatgttggagaaaaaaagaaaaaaaaaagctgaatgctctaagctggaacgtaggatctatagccttgtctgtggcccaagaccttggccttgtgtacaaaaatgacaaaatattgcaatagcaaagctgaacatctaacactagctatctcttgctagatctccttgctcagcatataactataaatacatgtaaaattacatgtatatggctatatttttatttgcttgctcctagaagagaaaaaaaaatcaactttgaatcacaactaggaattgatgctttaatttttggatactttttcagaatttttaatttactatggtccggcctaagatcctctgttgtatcaggttttgtgcacaaaagaaaagcacaaaagttgaatgcacatggggcatgtgctttctgtgcaccaaatatctggatgaggttcttttttcaggcctacagtcaaatctgtgtccagaattttttgacttttttgctttgtataatcatagaattcattgctgctgatttctataatgattcatgttgtcatgtgtctcttaataactgagggctgtcagtaacctgtgattttgccttttctatagtcttactcccatgaagaaccttggttctgatggagaaagtgaaaagctttatttcttcccctagatatctttatatttctattatattttttagttgtgtactgtgtactagagatttttttcagtttgttatgaacacaatttggtaagccctaaattggttctgctctgtctccaaaaaaaaaaaagttttcaacttacgttattttcaacttgcagtgggcttatcagcacatagccacatcataaatggaggtgcttctgtcaaaagtacattattgttttattttcaacttacagtggggcttatcagtatgtagccccatcataagtcaaggggcttttataacgatgtgtcttacaaaatcccaccagatacagaaaggagggcagtaaagatgaaatttgatcacaattaggtgcttaaactttcttcctgtcctccagctcagaggatgaaacaggaaactgagtcataaaacactactacaaacaagcccaaggattttatcccagattttcaacccaaggatgagctgcaatataactatcactgttttgttggctgcctgccacagaatgaccactgaggaaataaagcgagctttggattcactgcagcttggtttactgtggttcttttctgtattaccgttgttaggattgggaggtttaagtggtaactgggtccagcagcagggaatctgcgtgcagcagctaaatcaaggtttagtcaatgtccaaaacactttagcaaattggatatcagtaattccccagcaccctaaaacagttcccagagcaagtatttattgagctcctactacatgccatgaag

SEQ ID NO: 308957 - DNA, 2612 bp, Homo sapiens
ggcacgagcaggaagatggcggcggtagcggaggtgtgagtggacgcgggactcagcggccggattttctcttcccttcttttcccttttccttccctatttgaaattggcatcgagggggctaagttcgggtggcagcgccgggcgcaacgcaggggtcacggcgacggcggcggcggctgacggctggaagggtaggcttcattcaccgctcgtcctccttcctcgctccgctcggtgtcaggcgcggcggcggcgcggcgggcggacttcgtccctcctcctgctcccccccacaccggagcgggcactcttcgcttcgccatcccccgacccttcaccccgaggactgggcgcctcctccggcgcagctgagggagcgggggccggtctcctgctcggttgtcgagcctccatgtcggataatcagagctggaactcgtcgggctcggaggaggatccagagacggagtctgggccgcctgtggagcgctgcggggtcctcagtaagtggacaaactacattcatgggtggcaggatcgttgggtagttttgaaaaataatgctctgagttactacaaatctgaagatgaaacagagtatggctgcagaggatccatctgtcttagcaaggctgtcatcacacctcacgattttgatgaatgtcgatttgatattagtgtaaatgatagtgtttggtatcttcgtgctcaggatccagatcatagacagcaatggatagatgccattgaacagcacaagactgaatctggatatggatctgaatccagcttgcgtcgacatggctcaatggtgtccctggtgtctggagcaagtggctactctgcaacatccacctcttcattcaagaaaggccacagtttacgtgagaagttggctgaaatggaaacatttagagacatcttatgtagacaagttgacacgctacagaagtactttgatgcctgtgctgatgctgtctctaaggatgaacttcaaagggataaagtggtagaagatgatgaagatgactttcctacaacgcgttctgatggtgacttcttgcatagtaccaacggcaataaagaaaagttatttccacatgtgacaccaaaaggaattaatggtatagactttaaaggggaagcgataacttttaaagcaactactgctggaatccttgcaacactttctcattgtattgaactaatggttaaacgtgaggacagctggcagaagagactggataaggaaactgagaagaaaagaagaacagaggaagcatataaaaatgcaatgacagaacttaagaaaaaatcccactttggaggaccagattatgaagaaggccctaacagtctgattaatgaagaagagttctttgatgctgttgaagctgctcttgacagacaagataaaatagaagaacagtcacagagtgaaaaggtgagattacattggcctacatccttgccctctggagatgccttttcttctgtggggacacatagatttgtccaaaaggttgaagagatggtgcagaaccacatgacttactcattacaggatgtaggcggagatgccaattggcagttggttgtagaagaaggagaaatgaaggtatacagaagagaagtagaagaaaatgggattgttctggatcctttaaaagctacccatgcagttaaaggcgtcacaggacatgaagtctgcaattatttctggaatgttgacgttcgcaatgactgggaaacaactatagaaaactttcatgtggtggaaacattagctgataatgcaatcatcatttatcaaacacacaagagggtgtggcctgcttctcagcgagacgtattatatctttctgtcattcgaaagataccagccttgactgaaaatgaccctgaaacttggatagtttgtaatttttctgtggatcatgacagtgctcctctaaacaaccgatgtgtccgtgccaaaataaatgttgctatgatttgtcaaaccttggtaagcccaccagagggaaaccaggaaattagcagggacaacattctatgcaagattacatatgtagctaatgtgaaccctggaggatgggcaccagcctcagtgttaagggcagtggcaaagcgagagtatcctaaatttctaaaacgttttacttcttacgtccaagaaaaaactgcaggaaagcctattttgttctagtattaacagctcagaggatgaaacaggaaactgagtcataaaacactactacaaacaagcccaaggattttatcccagattttcaacccaaggatgagctgcaatataactatcactgttttgttggctgcctgccacagaatgaccactgaggaaataaagcgagctttggattcactgcagcttggtttactgtggttcttttctgtattaccgttgttaggattgggaggtttaagtggtaactgggtccagcagcagggaatctgcgtgcagcagctaaatcaaggtttagtcaatgtccaaaacactttagcaaattggatatcagtaattccccagcaccctaaaacagttcccagagcaagtatttattgagctcctactacatgccatgaag

SEQ ID NO: 308958 - DNA, 2709 bp, Homo sapiens
ggcacgagcaggaagatggcggcggtagcggaggtgtgagtggacgcgggactcagcggccggattttctcttcccttcttttcccttttccttccctatttgaaattggcatcgagggggctaagttcgggtggcagcgccgggcgcaacgcaggggtcacggcgacggcggcggcggctgacggctggaagggtaggcttcattcaccgctcgtcctccttcctcgctccgctcggtgtcaggcgcggcggcggcgcggcgggcggacttcgtccctcctcctgctcccccccacaccggagcgggcactcttcgcttcgccatcccccgacccttcaccccgaggactgggcgcctcctccggcgcagctgagggagcgggggccggtctcctgctcggttgtcgagcctccatgtcggataatcagagctggaactcgtcgggctcggaggaggatccagagacggagtctgggccgcctgtggagcgctgcggggtcctcagtaagtggacaaactacattcatgggtggcaggatcgttgggtagttttgaaaaataatgctctgagttactacaaatctgaagatgaaacagagtatggctgcagaggatccatctgtcttagcaaggctgtcatcacacctcacgattttgatgaatgtcgatttgatattagtgtaaatgatagtgtttggtatcttcgtgctcaggatccagatcatagacagcaatggatagatgccattgaacagcacaagactgaatctggatatggatctgaatccagcttgcgtcgacatggctcaatggtgtccctggtgtctggagcaagtggctactctgcaacatccacctcttcattcaagaaaggccacagtttacgtgagaagttggctgaaatggaaacatttagagacatcttatgtagacaagttgacacgctacagaagtactttgatgcctgtgctgatgctgtctctaaggatgaacttcaaagggataaagtggtagaagatgatgaagatgactttcctacaacgcgttctgatggtgacttcttgcatagtaccaacggcaataaagaaaagttatttccacatgtgacaccaaaaggaattaatggtatagactttaaaggggaagcgataacttttaaagcaactactgctggaatccttgcaacactttctcattgtattgaactaatggttaaacgtgaggacagctggcagaagagactggataaggaaactgagaagaaaagaagaacagaggaagcatataaaaatgcaatgacagaacttaagaaaaaatcccactttggaggaccagattatgaagaaggccctaacagtctgattaatgaagaagagttctttgatgctgttgaagctgctcttgacagacaagataaaatagaagaacagtcacagagtgaaaaggtgagattacattggcctacatccttgccctctggagatgccttttcttctgtggggacacatagatttgtccaaaagccctatagtcgctcttcctccatgtcttccattgatctagtcagtgcctctgatgatgttcacagattcagctcccaggttgaagagatggtgcagaaccacatgacttactcattacaggatgtaggcggagatgccaattggcagttggttgtagaagaaggagaaatgaaggtatacagaagagaagtagaagaaaatgggattgttctggatcctttaaaagctacccatgcagttaaaggcgtcacaggacatgaagtctgcaattatttctggaatgttgacgttcgcaatgactgggaaacaactatagaaaactttcatgtggtggaaacattagctgataatgcaatcatcatttatcaaacacacaagagggtgtggcctgcttctcagcgagacgtattatatctttctgtcattcgaaagataccagccttgactgaaaatgaccctgaaacttggatagtttgtaatttttctgtggatcatgacagtgctcctctaaacaaccgatgtgtccgtgccaaaataaatgttgctatgatttgtcaaaccttggtaagcccaccagagggaaaccaggaaattagcagggacaacattctatgcaagattacatatgtagctaatgtgaaccctggaggatgggcaccagcctcagtgttaagggcagtggcaaagcgagaatttatgattgttcgactttatgcaaagcactacaaatacagtacactccaacttaccatggggctgcgttccgataaaccagtcatatatggaaaataccctcagaggatgaaacaggaaactgagtcataaaacactactacaaacaagcccaaggattttatcccagattttcaacccaaggatgagctgcaatataactatcactgttttgttggctgcctgccacagaatgaccactgaggaaataaagcgagctttggattcactgcagcttggtttactgtggttcttttctgtattaccgttgttaggattgggaggtttaagtggtaactgggtccagcagcagggaatctgcgtgcagcagctaaatcaaggtttagtcaatgtccaaaacactttagcaaattggatatcagtaattccccagcaccctaaaacagttcccagagcaagtatttattgagctcctactacatgccatgaag

SEQ ID NO: 308959 - DNA, 1990 bp, Homo sapiens
  misc_feature (1983)..(1983): n is a, c, g, or t
ggcacgagcaggaagatggcggcggtagcggaggtgtgagtggacgcgggactcagcggccggattttctcttcccttcttttcccttttccttccctatttgaaattggcatcgagggggctaagttcgggtggcagcgccgggcgcaacgcaggggtcacggcgacggcggcggcggctgacggctggaagggtaggcttcattcaccgctcgtcctccttcctcgctccgctcggtgtcaggcgcggcggcggcgcggcgggcggacttcgtccctcctcctgctcccccccacaccggagcgggcactcttcgcttcgccatcccccgacccttcaccccgaggactgggcgcctcctccggcgcagctgagggagcgggggccggtctcctgctcggttgtcgagcctccatgtcggataatcagagctggaactcgtcgggctcggaggaggatccagagacggagtctgggccgcctgtggagcgctgcggggtcctcagtaagtggacaaactacattcatgggtggcaggatcgttgggtagttttgaaaaataatgctctgagttactacaaatctgaagatgaaacagagtatggctgcagaggatccatctgtcttagcaaggctgtcatcacacctcacgattttgatgaatgtcgatttgatattagtgtaaatgatagtgtttggtatcttcgtgctcaggatccagatcatagacagcaatggatagatgccattgaacagcacaagactgaatctggatatggatctgaatccagcttgcgtcgacatggctcaatggtgtccctggtgtctggagcaagtggctactctgcaacatccacctcttcattcaagaaaggccacagtttacgtgagaagttggctgaaatggaaacatttagagacatcttatgtagacaagttgacacgctacagaagtactttgatgcctgtgctgatgctgtctctaaggatgaacttcaaagggataaagtggtagaagatgatgaagatgactttcctacaacgcgttctgatggtgacttcttgcatagtaccaacggcaataaagaaaagttatttccacatgtgacaccaaaaggaattaatggtatagactttaaaggggaagcgataacttttaaagcaactactgctggaatccttgcaacactttctcattgtattgaactaatggttaaacgtgaggacagctggcagaagagactggataaggaaactgagaagaaaagaagaacagaggaagcatataaaaatgcaatgacagaacttaagaaaaaatcccactttggaggaccagattatgaagaaggccctaacagtctgattaatgaagaagagttctttgatgctgttgaagctgctcttgacagacaagataaaatagaagaacagtcacagagtgaaaaggtgagattacattggcctacatccttgccctctggagatgccttttcttctgtggggacacatagatttgtccaaaagccctatagtcgctcttcctccatgtcttccattgatctagtcagtgcctctgatgatgttcacagattcagctcccaggttgaagagatggtgcagaaccacatgacttactcattacaggatgtaggcggagatgccaattggcagttggttgtagaagaaggagaaatgaaggtatacagaagagaagtagaagaaaatgggattgttctggatcctttaaaagctacccatgcagttaaaggcgtcacaggacatgaagtctgcaattatttctggaatgttgacgttcgcaatgactgggaaacaactatagaaaactttcatgtggtggactcattagctgggtgtgagcctgcgtctcggatagtttgtaattttcctgtgggtcatgacagtgctcctctaatcacacgatgtgtcgtgcaaaataaatgtgcagtgtgcttcgggggatntctagag

SEQ ID NO: 308960 - DNA, 342 bp, Homo sapiens
taacactcgtgattttacacagagcatgcatatgatctagtatactgactgctttgtaaatatgtgttcaataaatgtttattaggtcaattttcaaactcaagttaataccagagttatcagagttttctgtttctttaaataaactgcttttttctccactgtgtgttggaataggaaggccctaacagtctgattaatgaagaagagttctttgatgctgttgaagctgctcttgacagacaagataaaatagaagaacaggtatatctattattgaaaattctaagctgaaatttattttaacactataggcattccttggtgtatattatttcatgt

SEQ ID NO: 308961 - DNA, 755 bp, Homo sapiens
  misc_feature (717)..(717): n is a, c, g, or t
  misc_feature (739)..(739): n is a, c, g, or t
agttaaaacaaaagctgatggctcattccgccttgagaacataaccacagggacatacaccatccatgctcagaaagagcacctctactttgaaacggtcaccatcaaaattgcaccgaacacacctcagctggctgacattattgcaacagggttcagtgtctgtggtcagatatcaatcattcgcttccccgacaccgtcaagcagatgaataaatacaaagttgtcctgtcatctcaagacaaggacaagtctttggtcaccgtggagacagatgctcatggatcattttgttttaaagcaaaaccagggacttacaaagtgcaggtgatggttcctgaggcagaaaccagagcagggctgacgttgaaaccccagacatttcctcttactgtgaccaacaggcccatgatggatgtggcctttgtacagttcttggcatcagtttctgggaaagtctcttgtttggacacctgtggtgacttgctggtgactctacagtccctgagccgccagggtgagaagcggagcctccagctctccggcaaggtcaacgccatgactttcacctttgacaacgtgctccctggaaaatacaaaataaagcatcattgcattgaaggattggtggctgggaagaaacaaagaaaccctgggaaagttgggaaaattgctggggaaggatgacattgttcttggccagtttgaaatttcanggccagaacggggcttacattngcttgaaaaatttttc

SEQ ID NO: 308962 - DNA, 4358 bp, Homo sapiens
ctcttctggggctgtgaacgtggggtcgaagcgcgcgtgcgcggcggctctggcggcggcggtggggcggggcctgggctgtcagccggcctaggaggaggaaggagcctgcggcgtgcagtgtgaggggcgggacccggctgccggcggtgggtctagctgggggaggtcgggccatgctggtgggccagggcgcggggccgctggggcccgcggtggtcaccgccgcggtggtgctgctgctgagcggcgtggggccggcgcacggctcggaggacatcgtggtgggctgcggtggcttcgtcaagtcggacgtggagatcaactactctctcatcgagataaagctgtacaccaagcatgggactttgaaataccagacagactgtgcccctaataatggttactttatgatccctttgtatgataagggggatttcattctgaagattgagcctcccctagggtggagttttgagccgacgaccgtggagctccatgtggatggagtcagtgacatctgcacaaagggtggggacatcaactttgtcttcactgggttctctgtgaatggcaaggtcctcagcaaagggcagcccctgggtcctgcgggagttcaggtgtctctgagaaacactgggaccgaagcaaagatccagtccacagttacacagcctggcggaaagtttgcattttttaaagttctgcctggagattatgaaatcctcgcaactcatccaacctgggcgttgaaagaggcaagcaccacagtgcgtgtaaccaactccaatgccaatgcggccagtcccctcatagttgctggctacaatgtgtctggctctgtccgaagtgatggggagcccatgaaaggcgtgaagtttcttctcttttcttctttagtaactaaagaggatgtcctgggctgcaatgtctcaccagtgcctgggttccagccccaagacgagagtctggtgtatttgtgctacacggtctccagagaagatggctcgttctctttctattccttgccaagtgggggctacactgtgattccgttctatcgaggggagaggattacctttgatgtggcgccttccagacttgacttcacagtggagcatgacagcttgaaaatcgagcccgtgttccacgtcatgggattctccgtcaccgggagggtcttgaacggacccgaaggagatggtgttccagaagcagtagtcaccctgaataaccaaatcaaagttaaaacaaaagctgatggctcattccgccttgagaacataaccacagggacatacaccatccatgctcagaaagagcacctctactttgaaacggtcaccatcaaaattgcaccgaacacacctcagctggctgacattattgcaacagggttcagtgtctgtggtcagatatcaatcattcgcttccccgacaccgtcaagcagatgaataaatacaaagttgtcctgtcatctcaagacaaggacaagtctttggtcaccgtggagacagatgctcatggatcattttgttttaaagcaaaaccagggacttacaaagtgcaggtgatggttcctgaggcagaaaccagagcagggctgacgttgaaaccccagacatttcctcttactgtgaccaacaggcccatgatggatgtggcctttgtacagttcttggcatcagtttctgggaaagtctcttgtttggacacctgtggtgacttgctggtgactctacagtccctgagccgccagggtgagaagcggagcctccagctctccggcaaggtcaacgccatgactttcacctttgacaacgtgctccctggaaaatacaaaataagcatcatgcatgaggattggtgctggaagaacaagagcctggaggtggaagtgctggaggatgacatgtctgcagttgagttcaggcagacgggctacatgctgagatgttccctgtctcacgccatcactctggaattttatcaggatggaaatgggcgtgagaatgtggggatttataacctctccaaaggagtcaaccgattctgcctgtccaagcctggtgtgtacaaagtgacccctcgctcctgccaccggtttgagcaagcgttctacacctatgacacgtcttcacctagtatcttgacattgacagccattcgccaccatgtccttggaactatcaccaccgacaaaatgatggatgtcactgtgactatcaagtcttccatcgacagtgaacccgccttggtcttaggccctctgaagtctgtgcaggagctgcggagggagcagcagctggctgagatcgaggcccgcaggcaggagagggagaaaaacggcaatgaggaaggcgaagaaagaatgaccaagcctcccgtgcaggagatggtagatgagttacaaggccccttctcgtatgatttctcttactgggcgcggtctggagagaaaatcactgttacaccgtcatctaaagagctgctcttttatcccccttcaatggaagccgttgtcagtggagaaagctgcccagggaagctgatcgagatccatgggaaggcaggcctgtttttagaaggccagatccaccccgagttggaaggagtcgagattgtcatcagtgaaaagggggcaagttcaccgctgatcacagtctttactgatgacaaaggtgcctacagtgttggccccctgcacagtgacctggagtacacggtgacctcacagaaggagggctatgttctgactgcggtggaaggaaccatcggagacttcaaggcctatgccctggcaggcgtaagctttgagataaaagctgaggatgaccagcccctcccgggagtcctcttatccctgagcggtggcctgtttcgttccaacctcttgacccaggacaacggcattctgacattctcaaacctgagccctggccagtattacttcaaacccatgatgaaggagttccggtttgagccatcctcacagatgatcgaggtgcaggaaggccagaacctgaagatcaccatcacggggtaccgaaccgcttacagttgctatggcacagtgtcttccttaaacggagagcccgaacaaggggttgccatggaagcggtgggccagaacgactgcagcatttacggagaagacaccgtgacagacgaagagggcaagttcagattacgtggattgctgccgggatgtgtgtaccacgttcagctcaaggcagaaggcaacgaccacattgagcgggcgctcccccaccatagggtgattgaggttgggaataatgacatcgatgatgtaaacatcatagttttccggcagattaatcaatttgatttaagtggaaatgtgatcacttcctctgaataccttcctacattatgggtcaagctttacaaaagcgaaaacctcgacaatccaatccagacagtttcccttggccagtccctgttcttccatttccccccactgctcagagacggcgagaactatgttgtgcttctggactccacactccccagatcccagtatgactacatcttgcctcaagtttctttcaccgcagtgggctaccataaacacaccaccttgatttttaatcccacgaggaagctgcctgaacaggacatcgcacaaggatcctacattgccctgccattgacgctgctggttctgctggccggttacaaccatgacaagctcattcctttgctgctgcagttgacaagccggctacagggagtccgcgcgctcggccaggcagcctctgacaatagcggcccagaagatgcaaagagacaagccaagaaacagaagacaaggcggacttgaggaggaaggggacagttgcagtctcacttgggacaggccacagccaggggtccggccactacccgcccgtgggataaaagccaaaagcatgcgtcagctaacttcagcctgtgctgctgggcccgcaccccatgtcccttgtcactgtgacatcctgcacccatcctcacccctccgtagagcccctcgtgcaatgcaatgaatggaccctcctgtcactctgctgaacagaatttattttctgagtcaaatataatttattattattttcgtcaaagaagtatttaagctgtgctgtggtgtgagaatgtcattcttgatcttcagccttcgtttgcaaggagagttccagttgacgtggtgtttggttccatggcggggtaccctggggattcatctgttttcttcacttccctttgcatctgagatcctgttggaaaccacagcaacctgtattcattattaggaaataaaaatcgaaaaaaaggttcattcttttgtgttgtagttttg

SEQ ID NO: 308963 - DNA, 2782 bp, Homo sapiens
ctcttctggggctgtgaacgtggggtcgaagcgcgcgtgcgcggcggctctggcggcggcggtggggcggggcctgggctgtcagccggcctaggaggaggaaggagcctgcggcgtgcagtgtgaggggcgggacccggctgccggcggtgggtctagctgggggaggtcgggccatgctggtgggccagggcgcggggccgctggggcccgcggtggtcaccgccgcggtggtgctgctgctgagcggcgtggggccggcgcacggctcggaggacatcgtggtgggctgcggtggcttcgtcaagtcggacgtggagatcaactactctctcatcgagataaagctgtacaccaagcatgggactttgaaataccagacagactgtgcccctaataatggttactttatgatccctttgtatgataagggggatttcattctgaagattgagcctcccctagggtggagttttgagccgacgaccgtggagctccatgtggatggagtcagtgacatctgcacaaagggtggggacatcaactttgtcttcactgggttctctgtgaatggcaaggtcctcagcaaagggcagcccctgggtcctgcgggagttcaggtgtctctgagaaacactgggaccgaagcaaagatccagtccacagttacacagcctggcggaaagtttgcattttttaaagttctgcctggagattatgaaatcctcgcaactcatccaacctgggcgttgaaagaggcaagcaccacagtgcgtgtaaccaactccaatgccaatgcggccagtcccctcatagttgctggctacaatgtgtctggctctgtccgaagtgatggggagcccatgaaaggcgtgaagtttcttctcttttcttctttagtaactaaagaggatgtcctgggctgcaatgtctcaccagtgcctgggttccagccccaagacgagagtctggtgtatttgtgctacacggtctccagagaagatggctcgttctctttctattccttgccaagtgggggctacactgtgattccgttctatcgaggggagaggattacctttgatgtggcgccttccagacttgacttcacagtggagcatgacagcttgaaaatcgagcccgtgttccacgtcatgggattctccgtcaccgggagggtcttgaacggacccgaaggagatggtgttccagaagcagtagtcaccctgaataaccaaatcaaagttaaaacaaaagctgatggctcattccgccttgagaacataaccacagggacatacaccatccatgctcagaaagagcacctctactttgaaacggtcaccatcaaaattgcaccgaacacacctcagctggctgacattattgcaacagggttcagtgtctgtggtcagatatcaatcattcgcttccccgacaccgtcaagcagatgaataaatacaaagttgtcctgtcatctcaagacaaggacaagtctttggtcaccgtggagacagatgctcatggatcattttgttttaaagcaaaaccagggacttacaaagtgcaggtgatggttcctgaggcagaaaccagagcagggctgacgttgaaaccccagacatttcctcttactgtgaccaacaggcccatgatggatgtggcctttgtacagttcttggcatcagtttctgggaaagtctcttgtttggacacctgtggtgacttgctggtgactctacagtccctgagccgccagggtgagaagcggagcctccagctctccggcaaggtcaacgccatgactttcacctttgacaacgtgctccctggaaaatacaaaataagcatcatgcatgaggattggtgctggaagaacaagagcctggaggtggaagtgctggaggatgacatgtctgcagttgagttcaggcagacgggctacatgctgagatgttccctgtctcacgccatcactctggaattttatcaggatggaaatgggcgtgagaatgtggggatttataacctctccaaaggagtcaaccgattctgcctgtccaagcctgaggctgtgtcatttgatattcccaccagcaatgcacgagggttccggtttcttcacctccttcgccaacatttgttattgtctgttttattatagtcatcttggtagatgtgaagtcgtgtctcatggtggttttgttttgcattttcctaatgaataattcagtggctcctctgtttggttcccaagataaaatacaaactccttaacctgatcttagctcctgtgtaacccagccctgtctgccactgtctctactccagccactctgtccttctgggtgtcagttcagctgcctttggctacatgtaacaaaatccatacagcagtgccattggcaagtggtagtttatttggctcaataaagaagtgtggcagtgcgtggctgccagcatgggttcagcagctggtagatgttaggggtggtgtctttgtgattctttaggcctttcccttctattttttgccttgtattttcaagatggctgttgttagaaaacttatgtttaaaggagaaagtcaaggagagggcaggcaaacatttccttgcgccctctcctccagtaagctacttgtctgtattattggccagaaccgtgccacatggttacttctagctgcaagggaggctgggacagttggatgtgctacccgaggctgagcacgttgccaccctcaacataaccagggtttgttctcaaggcaggaaggat

SEQ ID NO: 308964 - DNA, 2217 bp, Homo sapiens
ctcttctggggctgtgaacgtggggtcgaagcgcgcgtgcgcggcggctctggcggcggcggtggggcggggcctgggctgtcagccggcctaggaggaggaaggagcctgcggcgtgcagtgtgaggggcgggacccggctgccggcggtgggtctagctgggggaggtcgggccatgctggtgggccagggcgcggggccgctggggcccgcggtggtcaccgccgcggtggtgctgctgctgagcggcgtggggccggcgcacggctcggaggacatcgtggtgggctgcggtggcttcgtcaagtcggacgtggagatcaactactctctcatcgagataaagctgtacaccaagcatgggactttgaaataccagacagactgtgcccctaataatggttactttatgatccctttgtatgataagggggatttcattctgaagattgagcctcccctagggtggagttttgagccgacgaccgtggagctccatgtggatggagtcagtgacatctgcacaaagggtggggacatcaactttgtcttcactgggttctctgtgaatggcaaggtcctcagcaaagggcagcccctgggtcctgcgggagttcaggtgtctctgagaaacactgggaccgaagcaaagatccagtccacagttacacagcctggcggaaagtttgcattttttaaagttctgcctggagattatgaaatcctcgcaactcatccaacctgggcgttgaaagaggcaagcaccacagtgcgtgtaaccaactccaatgccaatgcggccagtcccctcatagttgctggctacaatgtgtctggctctgtccgaagtgatggggagcccatgaaaggcgtgaagtttcttctcttttcttctttagtaactaaagaggatgtcctgggctgcaatgtctcaccagtgcctgggttccagccccaagacgagagtctggtgtatttgtgctacacggtctccagagaagatggctcgttctctttctattccttgccaagtgggggctacactgtgattccgttctatcgaggggagaggattacctttgatgtggcgccttccagacttgacttcacagtggagcatgacagcttgaaaatcgagcccgtgttccacgtcatgggattctccgtcaccgggagggtcttgaacggacccgaaggagatggtgttccagaagcagtagtcaccctgaataaccaaatcaaagttaaaacaaaagctgatggctcattccgccttgagaacataaccacagggacatacaccatccatgctcagaaagagcacctctactttgaaacggtcaccatcaaaattgcaccgaacacacctcagctggctgacattattgcaacagggttcagtgtctgtggtcagatatcaatcattcgcttccccgacaccgtcaagcagatgaataaatacaaagttgtcctgtcatctcaagacaaggacaagtctttggtcaccgtggagacagatgctcatggatcattttgttttaaagcaaaaccagggacttacaaagtgcaggtgatggttcctgaggcagaaaccagagcagggctgacgttgaaaccccagacatttcctcttactgtgaccaacaggcccatgatggatgtggcctttgtacagttcttggcatcagtttctgggaaagtctcttgtttggacacctgtggtgacttgctggtgactctacagtccctgagccgccagggtgagaagcggagcctccagctctccggcaaggtcaacgccatgactttcacctttgacaacgtgctccctggaaaatacaaaaaaaaaaaaaaaaacactttgtcgggccggggctccgggggccgtagaaagaagggttttctaaaaaccaattcccggttggggggggcggtggggcgcccccatggtaggtttacgcggagacccgtggggcaaaatacgcggttgtcccctagagagagaactcggggcggcaagagacatacgcgcgttgggggagtctccctacccaaaataaaaaaaaaaccgggcgcggtcggggacacccggagcggggtttcgtggaacagaaccacccaagaagaggaggtccgaggaggggcaacatttacgcgggaacttctactacaagcaggggaggtcccagaggagaggcacgataattaaaattacc

SEQ ID NO: 308965 - DNA, 4536 bp, Homo sapiens
ctcttctggggctgtgaacgtggggtcgaagcgcgcgtgcgcggcggctctggcggcggcggtggggcggggcctgggctgtcagccggcctaggaggaggaaggagcctgcggcgtgcagtgtgaggggcgggacccggctgccggcggtgggtctagctgggggaggtcgggccatgctggtgggccagggcgcggggccgctggggcccgcggtggtcaccgccgcggtggtgctgctgctgagcggcgtggggccggcgcacggctcggaggacatcgtggtgggctgcggtggcttcgtcaagtcggacgtggagatcaactactctctcatcgagcaggtgcttaatatgcattgatgtgaatctgtacaaccacatgaaaaggagtggctctgtgtctacatctgaagaaaccgaacacgagcttgcccaaggccacgcaacacgtggaagactcagatggcatttgggcatcttactgggttaacacttcgtgtctggtaatgctcagaatataaagctgtacaccaagcatgggactttgaaataccagacagactgtgcccctaataatggttactttatgatccctttgtatgataagggggatttcattctgaagattgagcctcccctagggtggagttttgagccgacgaccgtggagctccatgtggatggagtcagtgacatctgcacaaagggtggggacatcaactttgtcttcactgggttctctgtgaatggcaaggtcctcagcaaagggcagcccctgggtcctgcgggagttcaggtgtctctgagaaacactgggaccgaagcaaagatccagtccacagttacacagcctggcggaaagtttgcattttttaaagttctgcctggagattatgaaatcctcgcaactcatccaacctgggcgttgaaagaggcaagcaccacagtgcgtgtaaccaactccaatgccaatgcggccagtcccctcatagttgctggctacaatgtgtctggctctgtccgaagtgatggggagcccatgaaaggcgtgaagtttcttctcttttcttctttagtaactaaagaggatgtcctgggctgcaatgtctcaccagtgcctgggttccagccccaagacgagagtctggtgtatttgtgctacacggtctccagagaagatggctcgttctctttctattccttgccaagtgggggctacactgtgattccgttctatcgaggggagaggattacctttgatgtggcgccttccagacttgacttcacagtggagcatgacagcttgaaaatcgagcccgtgttccacgtcatgggattctccgtcaccgggagggtcttgaacggacccgaaggagatggtgttccagaagcagtagtcaccctgaataaccaaatcaaagttaaaacaaaagctgatggctcattccgccttgagaacataaccacagggacatacaccatccatgctcagaaagagcacctctactttgaaacggtcaccatcaaaattgcaccgaacacacctcagctggctgacattattgcaacagggttcagtgtctgtggtcagatatcaatcattcgcttccccgacaccgtcaagcagatgaataaatacaaagttgtcctgtcatctcaagacaaggacaagtctttggtcaccgtggagacagatgctcatggatcattttgttttaaagcaaaaccagggacttacaaagtgcaggtgatggttcctgaggcagaaaccagagcagggctgacgttgaaaccccagacatttcctcttactgtgaccaacaggcccatgatggatgtggcctttgtacagttcttggcatcagtttctgggaaagtctcttgtttggacacctgtggtgacttgctggtgactctacagtccctgagccgccagggtgagaagcggagcctccagctctccggcaaggtcaacgccatgactttcacctttgacaacgtgctccctggaaaatacaaaataagcatcatgcatgaggattggtgctggaagaacaagagcctggaggtggaagtgctggaggatgacatgtctgcagttgagttcaggcagacgggctacatgctgagatgttccctgtctcacgccatcactctggaattttatcaggatggaaatgggcgtgagaatgtggggatttataacctctccaaaggagtcaaccgattctgcctgtccaagcctggtgtgtacaaagtgacccctcgctcctgccaccggtttgagcaagcgttctacacctatgacacgtcttcacctagtatcttgacattgacagccattcgccaccatgtccttggaactatcaccaccgacaaaatgatggatgtcactgtgactatcaagtcttccatcgacagtgaacccgccttggtcttaggccctctgaagtctgtgcaggagctgcggagggagcagcagctggctgagatcgaggcccgcaggcaggagagggagaaaaacggcaatgaggaaggcgaagaaagaatgaccaagcctcccgtgcaggagatggtagatgagttacaaggccccttctcgtatgatttctcttactgggcgcggtctggagagaaaatcactgttacaccgtcatctaaagagctgctcttttatcccccttcaatggaagccgttgtcagtggagaaagctgcccagggaagctgatcgagatccatgggaaggcaggcctgtttttagaaggccagatccaccccgagttggaaggagtcgagattgtcatcagtgaaaagggggcaagttcaccgctgatcacagtctttactgatgacaaaggtgcctacagtgttggccccctgcacagtgacctggagtacacggtgacctcacagaaggagggctatgttctgactgcggtggaaggaaccatcggagacttcaaggcctatgccctggcaggcgtaagctttgagataaaagctgaggatgaccagcccctcccgggagtcctcttatccctgagcggtggcctgtttcgttccaacctcttgacccaggacaacggcattctgacattctcaaacctgagccctggccagtattacttcaaacccatgatgaaggagttccggtttgagccatcctcacagatgatcgaggtgcaggaaggccagaacctgaagatcaccatcacggggtaccgaaccgcttacagttgctatggcacagtgtcttccttaaacggagagcccgaacaaggggttgccatggaagcggtgggccagaacgactgcagcatttacggagaagacaccgtgacagacgaagagggcaagttcagattacgtggattgctgccgggatgtgtgtaccacgttcagctcaaggcagaaggcaacgaccacattgagcgggcgctcccccaccatagggtgattgaggttgggaataatgacatcgatgatgtaaacatcatagttttccggcagattaatcaatttgatttaagtggaaatgtgatcacttcctctgaataccttcctacattatgggtcaagctttacaaaagcgaaaacctcgacaatccaatccagacagtttcccttggccagtccctgttcttccatttccccccactgctcagagacggcgagaactatgttgtgcttctggactccacactccccagatcccagtatgactacatcttgcctcaagtttctttcaccgcagtgggctaccataaacacaccaccttgatttttaatcccacgaggaagctgcctgaacaggacatcgcacaaggatcctacattgccctgccattgacgctgctggttctgctggccggttacaaccatgacaagctcattcctttgctgctgcagttgacaagccggctacagggagtccgcgcgctcggccaggcagcctctgacaatagcggcccagaagatgcaaagagacaagccaagaaacagaagacaaggcggacttgaggaggaaggggacagttgcagtctcacttgggacaggccacagccaggggtccggccactacccgcccgtgggataaaagccaaaagcatgcgtcagctaacttcagcctgtgctgctgggcccgcaccccatgtcccttgtcactgtgacatcctgcacccatcctcacccctccgtagagcccctcgtgcaatgcaatgaatggaccctcctgtcactctgctgaacagaatttattttctgagtcaaatataatttattattattttcgtcaaagaagtatttaagctgtgctgtggtgtgagaatgtcattcttgatcttcagccttcgtttgcaaggagagttccagttgacgtggtgtttggttccatggcggggtaccctggggattcatctgttttcttcacttccctttgcatctgagatcctgttggaaaccacagcaacctgtattcattattaggaaataaaaatcgaaaaaaaggttcattcttttgtgttgtagttttg

SEQ ID NO: 308966 - DNA, 390 bp, Homo sapiens
gcagaaggagtctttgtggctctggcacaggagcaccttcgagcaccttcttcttgttctttgttttctagcccgtgttccacgtcatgggattctccgtcaccgggagggtcttgaacggacccgaaggagatggtgttccagaagcagtagtcaccctgaataaccaaatcaaaggtgggctgacacagcagccccaggctgatggccagcgctctttttggatcacagagagaaatggagaggaactgatgactatatgagaacatggcagcttttggtccaagtattctggtgtacatgtaaggatacactgttgtttttggcttatcttctgtttgtgtgtttttgttttacagttaaaacaaaagctgatggctcattccgcct

SEQ ID NO: 308967 - DNA, 1532 bp, Homo sapiens
gcccagagctcagcagtgtaggagaggagggtgcgggcctgagagaggcagcaggcttggctggagaggcagaaggaaaaccaaggcaggagagtgtcctggaagctgggagaaggcagagggagatcgaggcttactttctggctgaggggcctagggtgagtcactttgggaggcttgatttcctcctctgtgaaatgggcaacacacctacccttgcccacctcacccccctcaccccgtcgacgtcgagtgaggagcagctgtgaggaggaggaagctttgcacagacgtgaggacggccccgggcgcctctaccccggggacaccccccccccaggagatggaaccccgagggcacggcgtggcggcccatgcgggcagctcgcgttaggacccagcggctccggggctggagggcgggcgccagccccgtcgggggcccggagggggactcggagcgggccaaggggcggctccggcgggcggactcggagcgggcggcggagtgacccggacagctgtcctctctgacaccaccccggcctgcctctttgttgccatgagagctgcctacctcttcctgctattcctgcctgcaggcttgctggctcagggccagtatgacctggacccgctgccgccgttccctgaccacgtccagtacacccactatagcgaccagatcgacaacccagactactatgattatcaagaggtgactcctcggccctccgaggaacagttccagttccagtcccagcagcaagtccaacaggaagtcatcccagccccaaccccagaaccaggaaatgcagagctggagcccacagagcctgggcctcttgactgccgtgaggaacagtacccgtgcacccgcctctactccatacacaggccttgcaaacagtgtctcaacgaggtctgcttctacagcctccgccgtgtgtacgtcattaacaaggagatctgtgttcgtacagtgtgtgcccatgaggagctcctccgagctgacctctgtcgggacaagttctccaaatgtggcgtgatggccagcagcggcctgtgccaatccgtggcggcctcctgtgccaggagctgtgggagctgctagggtggtgctggcatcctgagtcctggccctcctgggatctggggccctcgggccctgcctgacctggtgcttttttccccatccccatgttccttttattctgtaaaaagttagtggactgcagccctgggggttgcaggctgcggtgcctcaggcccctccttcagcctgtggccacctctggggcacgatgggggctccccactgcccagtctgcccctcgggttgggggagtatcccaggcctctctgtgggacctgggcccctgacgggccttctcagcccgttttgaggacagacagtcccccgaggtaggctacatccccccaccccagctggtctgcttggatttcctacagcccccgtgggcatggaccacctttattttatacaaaattaaaaacaagtttttacaaaa

SEQ ID NO: 308968 - DNA, 1084 bp, Homo sapiens
attgcaacttggtcttgcatatggcaaggccaaggtgggagcagtgaacggagtcacaaaagaaatttttcagctgtcctctctgacaccaccccggcctgcctctttgttgccatgagagctgcctacctcttcctgctattcctgcctgcaggcttgctggctcagggccagtatgacctggacccgctgccgccgttccctgaccacgtccagtacacccactatagcgaccagatcgacaacccagactactatgattatcaagaggtgactcctcggccctccgaggaacagttccagttccagtcccagcagcaagtccaacaggaagtcatcccagccccaaccccagaaccaggaaatgcagagctggagcccacagagcctgggcctcttgactgccgtgaggaacagtacccgtgcacccgcctctactccatacacaggccttgcaaacagtgtctcaacgaggtctgcttctacagcctccgccgtgtgtacgtcattaacaaggagatctgtgttcgtacagtgtgtgcccatgaggagctcctccgagctgacctctgtcgggacaagttctccaaatgtggcgtgatggccagcagcggcctgtgccaatccgtggcggcctcctgtgccaggagctgtgggagctgctagggtggtgctggcatcctgagtcctggccctcctgggatctggggccctcgggccctgcctgacctggtgcttttttccccatccccatgttccttttattctgtaaaaagttagtggactgcagccctgggggttgcaggctgcggtgcctcaggcccctccttcagcctgtggccacctctggggcacgatgggggctccccactgcccagtctgcccctcgggttgggggagtatcccaggcctctctgtgggacctgggcccctgacgggccttctcagcccgttttgaggacagacagtcccccgaggtaggctacatccccccaccccagctggtctgcttggatttcctacagcccccgtgggcatggaccacctttattttatacaaaattaaaaacaagtttttacaaaa

SEQ ID NO: 308969 - DNA, 2109 bp, Homo sapiens
gcccagagctcagcagtgtaggagaggagggtgcgggcctgagagaggcagcaggcttggctggagaggcagaaggaaaaccaaggcaggagagtgtcctggaagctgggagaaggcagagggagatcgaggcttactttctggctgaggggcctagggtgagtcactttgggaggcttgatttcctcctctgtgaaatgggcaacacacctacccttgcccacctcacccccctcaccccgtcgacgtcgagtgaggagcagctgtgaggaggaggaagctttgcacagacgtgaggacggccccgggcgcctctaccccggggacaccccccccccaggagatggaaccccgagggcacggcgtggcggcccatgcgggcagctcgcgttaggacccagcggctccggggctggagggcgggcgccagccccgtcgggggcccggagggggactcggagcgggccaaggggcggctccggcgggcggactcggagcgggcggcggagtgacccggacagctgtcctctctgacaccaccccggcctgcctctttgttgccatgagagctgcctacctcttcctgctattcctgcctgcaggcttgctggctcagggccagtatgacctggacccgctgccgccgttccctgaccacgtccagtacacccactatagcgaccagatcgacaacccagactactatgattatcaagaggtgactcctcggccctccgaggaacagttccagttccagtcccagcagcaagtccaacaggaagtcatcccagccccaaccccagaaccaggaaatgcagagctggagcccacagagcctgggcctcttgactgccgtgaggaacagtacccgtgcacccgcctctactccatacacaggccttgcaaacagtgtctcaacgaggtctgcttctacagcctccgccgtgtgtacgtcattaacaaggagatctgtgttcgtacagtgtgtgcccatgaggagctcctccgagctgacctctgtcgggacaagttctccaaatgtggcgtgatggccagcagcggcctgtgccaatccgtggcggcctcctgtgccaggagctgtgggagctgctagggtggtgctggcatcctgagtcctggccctcctgggatctggggccctcgggccctgcctgacctggtgcttttttccccatccccatgttccttttattctgtaaaaagttagtggactgcagccctgggggttgcaggctgcggtgcctcaggcccctccttcagcctgtggccacctctggggcacgatgggggctccccactgcccagtctgcccctcgggttgggggagtatcccaggcctctctgtgggacctgggcccctgacgggccttctcagcccgttttgaggacagacagtcccccgaggtaggctacatccccccaccccagctggtctgcttggatttcctacagcccccgtgggcatggaccacctttattttatacaaaattaaaaacaagtttttacaaaaaaaaaaaaaaaaaaaaaaaaaaaaaaaaaaaaaaaaaaaaaaaaaaaaaaaaaaaaaaaaaaaaaaaaaaaaaaaagaagcgacgaacacgcaaaaaaataagccgcagcaaaaggaggccaacaacaacgaacgcggagccaacagcgtagaatagcacggcggcggctcctcaacagaacgacggacacatcttagagagcacaggcacacagctgcggcatctcatagcgacgcgtcgcaacctaggtgagaacgcagaccggcgcggccaggagcgcgcgctagtcccacagacaaccaccaccagacgacaaaacccacgcctggcgcggcccaagccccgagggcagcagcaccaccccaccaccacgcacggacgccaccggacccgaagcagaggagacgacaacctcacgcactaatgaaccgaagatgcagtgagtacgggggcggcagcagcaagcgacgctcagtactatcacgcggacgcgaatgggccgaaacgcgagccgttgtacggacagggctgcaagccgcgcgagaccacagcgcagggcctatacagccaccgcaa

SEQ ID NO: 308970 - DNA, 732 bp, Homo sapiens
attgcaacttggtcttgcatatggcaaggccaaggtgggagcagtgaacggagtcacaaaagaaatttttcagctgtcctctctgacaccaccccggcctgcctctttgttgccatgagagctgcctacctcttcctgctattcctgcctgcaggcttgctggctcagggccagtatgacctggacccgctgccgccgttccctgaccacgtccagtacacccactatagcgaccagatcgacaacccagactactatgattatcaagaggtgactcctcggccctccgaggaacagttccagttccagtcccagcagcaagtccaacaggaagtcatcccagccccaaccccagaaccaggaaatgcagagctggagcccacagagcctgggcctcttggtaagggctttcttgacagctggaaaaatggaggcacgccctgaagttggggtggagtagggggtggtgctggtgggctggaggtctttggcccttgcccatgtgggctcttggcagtgtgggcagtatgactgccgtaggctggcatcaccaggccccccaggcagctccaggaggtcccacctgtccccagtgtgcctggctggaggctaaattggcagcctaggaaggcccctgacctcacagatactgggaggggcagggagtgtgctgggggcttcctgccagccagagagactgagtggtgcacatgtggaggcgaggaagggcca

SEQ ID NO: 308971 - DNA, 989 bp, Homo sapiens
gcccagagctcagcagtgtaggagaggagggtgcgggcctgagagaggcagcaggcttggctggagaggcagaaggaaaaccaaggcaggagagtgtcctggaagctgggagaaggcagagggagatcgaggcttactttctggctgaggggcctagggtgagtcactttgggaggcttgatttcctcctctgtgaaatgggcaacacacctacccttgcccacctcacccccctcaccccgtcgacgtcgagtgaggagcagctgtgaggaggaggaagctttgcacagacgtgaggacggccccgggcgcctctaccccggggacaccccccccccaggagatggaaccccgagggcacggcgtggcggcccatgcgggcagctcgcgttaggacccagcggctccggggctggagggcgggcgccagccccgtcgggggcccggagggggactcggagcgggccaaggggcggctccggcgggcggactcggagcgggcggcggagtgacccggacagctgtcctctctgacaccaccccggcctgcctctttgttgccatgagagctgcctacctcttcctgctattcctgcctgggtaagtggctcctggggcagggggtagctcctcttatgtggggctgaggagtagggttagtagggggaattcatagtgagcctttgtcacgacttatgaccagaactcagctccccagctcccagggccttctgcctgcttggaccacagactggaccagccaaccctggcagcatctggaggcagctcctggcccttcccccagccttccacagcagcaggcaggcagggttctggagggcacgtcccaggcacaaggactccgtgggcacaaggcacaaggcctctctgggagccgatgtgcaggtgcaggggcacccaaggcagggagtccggatgcttgagttctagatccattcagggcccttctgctctatacagtcctgacc

SEQ ID NO: 308972 - DNA, 324 bp, Homo sapiens
cctgggagtgggggtctgccagggctgggagaggtgactccccttgccctgaggagacccctcccagtgatgtctgcctacctctgtctccacaccagaaccaggaaatgcagagctggagcccacagagcctgggcctcttggtaagggctttcttgacagctggaaaaatggaggcacgccctgaagttggggtggagtagggggtggtgctggtgggctggaggtctttggcccttgcccatgtgggctcttggcagtgtggatgcacacgccgaggctccaaacccttggtgacacagatcacaatggacgaagttgttg

SEQ ID NO: 308973 - DNA, 291 bp, Homo sapiens
attgcaacttggtcttgcatatggcaaggccaaggtgggagcagtgaacggagtcacaaaagaaatttttcagctgtcctctctgacaccaccccggcctgcctctttgttgccatgagagctgcctacctcttcctgctattcctgcctgcttgctggctcagggccagtatgacctggacttttgacccacgttacagatacagagctcacgatacacgaaatgtgggagcagacttgacaaatcaaatactatgatatccagagagactcatcgacatatcgaggaca

SEQ ID NO: 308974 - DNA, 1041 bp, Homo sapiens
  misc_feature (20)..(20): n is a, c, g, or t
agtttaagcggggcggagtnacccggacagctgtcctctctgacaccaccccggcctgcctctttgttgccatgagagctgcctacctcttcctgctattcctgcctgcaggcttgctggctcagggccagtatgacctggacccgctgccgccgttccctgaccacgtccagtacacccactatagcgaccagatcgacaacccagactactatgattatcaagaggtgactcctcggccctccgaggaacagttccagttccagtcccagcagcaagtccaacaggaagtcatcccagccccaaccccagaaccaggaaatgcagagctggagcccacagagcctgggcctcttgactgccgtgaggaacagtacccgtgcacccgcctctactccatacacaggccttgcaaacagtgtctcaacgaggtctgcttctacagcctccgccgtgtgtacgtcattaacaaggagatctgtgttcgtacagtgtgtgcccatgaggagctcctccgagctgacctctgtcgggacaagttctccaaatgtggcgtgatggccagcagcggcctgtgccaatccgtggcggcctcctgtgccaggagctgtgggagctgctagggtggtgctggcatcctgagtcctggccctcctgggatctggggccctcgggccctgcctgacctggtgcttttttccccatccccatgttccttttattctgtaaaaagttagtggactgcagccctgggggttgcaggctgcggtgcctcaggcccctccttcagcctgtggccacctctggggcacgatgggggctccccactgcccagtctgcccctcgggttgggggagtatcccaggcctctctgtgggacctgggcccctgacgggccttctcagcccgttttgaggacagacagtcccccgaggtaggctacatccccccaccccagctggtctgcttggatttcctacagcccccgtgggcatggaccacctttattttatacaaaattaaaaacaagtttttacaaaa

SEQ ID NO: 308975 - DNA, 1634 bp, Homo sapiens
gcccagagctcagcagtgtaggagaggagggtgcgggcctgagagaggcagcaggcttggctggagaggcagaaggaaaaccaaggcaggagagtgtcctggaagctgggagaaggcagagggagatcgaggcttactttctggctgaggggcctagggtgagtcactttgggaggcttgatttcctcctctgtgaaatgggcaacacacctacccttgcccacctcacccccctcaccccgtcgacgtcgagtgaggagcagctgtgaggaggaggaagctttgcacagacgtgaggacggccccgggcgcctctaccccggggacaccccccccccaggagatggaaccccgagggcacggcgtggcggcccatgcgggcagctcgcgttaggacccagcggctccggggctggagggcgggcgccagccccgtcgggggcccggagggggactcggagcgggccaaggggcggctccggcgggcggactcggagcgggcggcggagtgacccggacagctgtcctctctgacaccaccccggcctgcctctttgttgccatgagagctgcctacctcttcctgctattcctgcctgcaggcttgctggctcagggccagtatgacctggacccgctgccgccgttccctgaccacgtccagtacacccactatagcgaccagatcgacaacccagactactatgattatcaaggtaacgggctaggggtaggataggacgggccggcagctggggtggggagaccccctgggaggggtagagggagcagacccccttatcctcccctggctgcagaggtgactcctcggccctccgaggaacagttccagttccagtcccagcagcaagtccaacaggaagtcatcccagccccaaccccagaaccaggaaatgcagagctggagcccacagagcctgggcctcttgactgccgtgaggaacagtacccgtgcacccgcctctactccatacacaggccttgcaaacagtgtctcaacgaggtctgcttctacagcctccgccgtgtgtacgtcattaacaaggagatctgtgttcgtacagtgtgtgcccatgaggagctcctccgagctgacctctgtcgggacaagttctccaaatgtggcgtgatggccagcagcggcctgtgccaatccgtggcggcctcctgtgccaggagctgtgggagctgctagggtggtgctggcatcctgagtcctggccctcctgggatctggggccctcgggccctgcctgacctggtgcttttttccccatccccatgttccttttattctgtaaaaagttagtggactgcagccctgggggttgcaggctgcggtgcctcaggcccctccttcagcctgtggccacctctggggcacgatgggggctccccactgcccagtctgcccctcgggttgggggagtatcccaggcctctctgtgggacctgggcccctgacgggccttctcagcccgttttgaggacagacagtcccccgaggtaggctacatccccccaccccagctggtctgcttggatttcctacagcccccgtgggcatggaccacctttattttatacaaaattaaaaacaagtttttacaaaa

SEQ ID NO: 308976 - DNA, 1442 bp, Homo sapiens
gcccagagctcagcagtgtaggagaggagggtgcgggcctgagagaggcagcaggcttggctggagaggcagaaggaaaaccaaggcaggagagtgtcctggaagctgggagaaggcagagggagatcgaggcttactttctggctgaggggcctagggtgagtcactttgggaggcttgatttcctcctctgtgaaatgggcaacacacctacccttgcccacctcacccccctcaccccgtcgacgtcgagtgaggagcagctgtgaggaggaggaagctttgcacagacgtgaggacggccccgggcgcctctaccccggggacaccccccccccaggagatggaaccccgagggcacggcgtggcggcccatgcgggcagctcgcgttaggacccagcggctccggggctggagggcgggcgccagccccgtcgggggcccggagggggactcggagcgggccaaggggcggctccggcgggcggactcggagcgggcggcggagtgacccggacagctgtcctctctgacaccaccccggcctgcctctttgttgccatgagagctgcctacctcttcctgctattcctgcctgacaacccagactactatgattatcaagaggtgactcctcggccctccgaggaacagttccagttccagtcccagcagcaagtccaacaggaagtcatcccagccccaaccccagaaccaggaaatgcagagctggagcccacagagcctgggcctcttgactgccgtgaggaacagtacccgtgcacccgcctctactccatacacaggccttgcaaacagtgtctcaacgaggtctgcttctacagcctccgccgtgtgtacgtcattaacaaggagatctgtgttcgtacagtgtgtgcccatgaggagctcctccgagctgacctctgtcgggacaagttctccaaatgtggcgtgatggccagcagcggcctgtgccaatccgtggcggcctcctgtgccaggagctgtgggagctgctagggtggtgctggcatcctgagtcctggccctcctgggatctggggccctcgggccctgcctgacctggtgcttttttccccatccccatgttccttttattctgtaaaaagttagtggactgcagccctgggggttgcaggctgcggtgcctcaggcccctccttcagcctgtggccacctctggggcacgatgggggctccccactgcccagtctgcccctcgggttgggggagtatcccaggcctctctgtgggacctgggcccctgacgggccttctcagcccgttttgaggacagacagtcccccgaggtaggctacatccccccaccccagctggtctgcttggatttcctacagcccccgtgggcatggaccacctttattttatacaaaattaaaaacaagtttttacaaaa

SEQ ID NO: 308977 - DNA, 1001 bp, Homo sapiens
gcccagagctcagcagtgtaggagaggagggtgcgggcctgagagaggcagcaggcttggctggagaggcagaaggaaaaccaaggcaggagagtgtcctggaagctgggagaaggcagagggagatcgaggcttactttctggctgaggggcctagggtgagtcactttgggaggcttgatttcctcctctgtgaaatgggcaacacacctacccttgcccacctcacccccctcaccccgtcgacgtcgagtgaggagcagctgtgaggaggaggaagctttgcacagacgtgaggacggccccgggcgcctctaccccggggacaccccccccccaggagatggaaccccgagggcacggcgtggcggcccatgcgggcagctcgcgttaggacccagcggctccggggctggagggcgggcgccagccccgtcgggggcccggagggggactcggagcgggccaaggggcggctccggcgggcggactcggagcgggcggcggagtgacccggacagctgtcctctctgacaccaccccggcctgcctctttgttgccatgagagctgcctacctcttcctgctattcctgcctgtgagtcctggccctcctgggatctggggccctcgggccctgcctgacctggtgcttttttccccatccccatgttccttttattctgtaaaaagttagtggactgcagccctgggggttgcaggctgcggtgcctcaggcccctccttcagcctgtggccacctctggggcacgatgggggctccccactgcccagtctgcccctcgggttgggggagtatcccaggcctctctgtgggacctgggcccctgacgggccttctcagcccgttttgaggacagacagtcccccgaggtaggctacatccccccaccccagctggtctgcttggatttcctacagcccccgtgggcatggaccacctttattttatacaaaattaaaaacaagtttttacaaaa

SEQ ID NO: 308978 - DNA, 1613 bp, Homo sapiens
gcccagagctcagcagtgtaggagaggagggtgcgggcctgagagaggcagcaggcttggctggagaggcagaaggaaaaccaaggcaggagagtgtcctggaagctgggagaaggcagagggagatcgaggcttactttctggctgaggggcctagggtgagtcactttgggaggcttgatttcctcctctgtgaaatgggcaacacacctacccttgcccacctcacccccctcaccccgtcgacgtcgagtgaggagcagctgtgaggaggaggaagctttgcacagacgtgaggacggccccgggcgcctctaccccggggacaccccccccccaggagatggaaccccgagggcacggcgtggcggcccatgcgggcagctcgcgttaggacccagcggctccggggctggagggcgggcgccagccccgtcgggggcccggagggggactcggagcgggccaaggggcggctccggcgggcggactcggagcgggcggcggagtgacccggacagctgtcctctctgacaccaccccggcctgcctctttgttgccatgagagctgcctacctcttcctgctattcctgcctgcaggcttgctggctcagggccagtatgacctggacccgctgccgccgttccctgaccacgtccagtacacccactatagcgaccagatcgacaacccagactactatgattatcaagaggtgactcctcggccctccgaggaacagttccagttccagtcccagcagcaagtccaacaggaagtcatcccagccccaaccccagaaccaggaaatgcagagctggagcccacagagcctgggcctcttgactgccgtgaggaacagtacccgtgcacccgcctctactccatacacaggccttgcaaacagtgtctcaacgaggtctgcttctacagcctccgccgtgtgtacgtcattaacaaggagatctgtgttcgtacagtgtgtgcccatgaggagctcctccgagctgacctctgtcgggacaagttctccaaatgtggcgtgatggccagcagcggcctgtgccaatccgtggcggcctcctgtgccaggagctgtgggagctgctagggtggtgctggcatcctgagtcctggccctcctgggatctggggccctcgggccctgcctgacctggtgcttttttccccatccccatgttccttttattctgtaaaaagttagtggactgcagccctgggggttgcaggctgcggtgcctcaggcccctccttcagcctgtggccacctctggggcacgatgggggctccccactgcccagtctgcccctcgggttgggggagtatcccaggcctctctgtgggacctgggcccctgacgggccttctcagcccgttttgaggacagacagtcccccgaggtaggctacatccccccaccccagctggtctgcttggatttcctacagcccccgtgggcatggaccacctttattttatacaaaattaaaaacaagtttttacaaaataattaactaaccatagacactctcgagggggggctcggtatccacttcgccctatagtgggtccttattacaattccacg

SEQ ID NO: 308979 - DNA, 1229 bp, Homo sapiens
  misc_feature (1202)..(1202): n is a, c, g, or t
gcccagagctcagcagtgtaggagaggagggtgcgggcctgagagaggcagcaggcttggctggagaggcagaaggaaaaccaaggcaggagagtgtcctggaagctgggagaaggcagagggagatcgaggcttactttctggctgaggggcctagggtgagtcactttgggaggcttgatttcctcctctgtgaaatgggcaacacacctacccttgcccacctcacccccctcaccccgtcgacgtcgagtgaggagcagctgtgaggaggaggaagctttgcacagacgtgaggacggccccgggcgcctctaccccggggacaccccccccccaggagatggaaccccgagggcacggcgtggcggcccatgcgggcagctcgcgttaggacccagcggctccggggctggagggcgggcgccagccccgtcgggggcccggagggggactcggagcgggccaaggggcggctccggcgggcggactcggagcgggcggcggagtgacccggacagctgtcctctctgacaccaccccggcctgcctctttgttgccatgagagctgcctacctcttcctgctattcctgcctgcaggcttgctggctcagggccagtatgacctggacccgctgccgccgttccctgaccacgtccagtacacccactatagcgaccagatcgacaacccagactactatgattatcaagaggtgactcctcggccctccgaggaacagttccagttccagtcccagcagcaagtccaacaggaagtcatcccagccccaaccccagaaccaggaaatgcagagctggagcccacagagcctgggcctcttgactgccgtgaggaacagtacccgtgcacccgcctctactccatacacaggccttgcaaacagtgtctcaacgaggtctgcttctacagcctccgccgtgtgtacgtcattaacaaggagatctgtgttcgtacagtgtgtgcccatgaggagctcctccgagctgacctctgtcgggacaagttctccaaatgtggcgtgatggccagcagcggcctgtgccaatccgtggcggcctcctgtgccaggagctgtgggagctgctagggtggtgctggcatcctgagtcctggccctcctgggatctggggccctcgggccctgcctgacctggtgcttttttccccatcccccnaagggcccagagtggtgggagtgagag

SEQ ID NO: 308980 - DNA, 1065 bp, Homo sapiens
  misc_feature (20)..(20): n is a, c, g, or t
agtttaagcggggcggagtnacccggacagctgtcctctctgacaccaccccggcctgcctctttgttgccatgagagctgcctacctcttcctgctattcctgcctgcaggcttgctggctcagggccagtatgacctggacccgctgccgccgttccctgaccacgtccagtacacccactatagcgaccagatcgacaacccagactactatgattatcaagaggtgactcctcggccctccgaggaacagttccagttccagtcccagcagcaagtccaacaggaagtcatcccagccccaaccccagaaccaggaaatgcagagctggagcccacagagcctgggcctcttgactgccgtgaggaacagtacccgtgcacccgcctctactccatacacaggccttgcaaacagtgtctcaacgaggtctgcttctacagcctccgccgtgtgtacgtcattaacaaggagatctgtgttcgtacagtgtgtgcccatgaggagctcctccgagctgacctctgtcgggacaagttctccaaatgtggcgtgatggccagcagcggcctgtgccaatccgtggcggcctcctgtgccaggagctgtgggagctgctagggtggtgctggcatcctgagtcctggccctcctgggatctggggccctcgggccctgcctgacctggtgcttttttccccatccccatgttccttttattctgtaaaaagttagtggactgcagccctgggggttgcaggctgcggtgcctcaggcccctccttcagcctgtggccacctctggggcacgatgggggctccccactgcccagtctgcccctcgggttgggggagtatcccaggcctctctgtgggacctgggcccctgacgggccttctcagcccgttttgaggacagacagtcccccgaggtaggctacatccccccaccccagctggtctgcttggatttcctacagcccccgtgggcatggaccacctttattttacaaataaaccattttccaaaaaaaaaaaggcgggctaaaatacccagggcaac

SEQ ID NO: 308981 - DNA, 1282 bp, Homo sapiens
gcccagagctcagcagtgtaggagaggagggtgcgggcctgagagaggcagcaggcttggctggagaggcagaaggaaaaccaaggcaggagagtgtcctggaagctgggagaaggcagagggagatcgaggcttactttctggctgaggggcctagggtgagtcactttgggaggcttgatttcctcctctgtgaaatgggcaacacacctacccttgcccacctcacccccctcaccccgtcgacgtcgagtgaggagcagctgtgaggaggaggaagctttgcacagacgtgaggacggccccgggcgcctctaccccggggacaccccccccccaggagatggaaccccgagggcacggcgtggcggcccatgcgggcagctcgcgttaggacccagcggctccggggctggagggcgggcgccagccccgtcgggggcccggagggggactcggagcgggccaaggggcggctccggcgggcggactcggagcgggcggcggagtgacccggacagctgtcctctctgacaccaccccggcctgcctctttgttgccatgagagctgcctacctcttcctgctattcctgcctgcaggcttgctggctcagggccagtatgacctggacccgctgccgccgttccctgaccacgtccagtacacccactatagcgaccagatcgacaacccagactactatgattatcaaggtaacgggctaggggtaggataggacgggccggcagctggggtggggagaccccctgggaggggtagagggagcagacccccttatcctcccctggctgcagaggtgactcctcggccctccgaggaacagttccagttccagtcccagcagcaagtccaacaggaagtcatcccagccccaaccccagaaccaggaaatgcagagctggagcccacagagcctgggcctcttggtaagggctttcttgacagctggaaaaatggaggcacgccctgaagttggggtggagtagggggtggtgctggtgggctggaggtctttggcccttgcccatgtgggctcttggcagtgtgggcagtatgactgccgtaggctggcatcaccaggccccccaggcagctccaggaggtcccacctgtccccagtgtgcctggctggaggctaaattggcagcctaggaaggcccctgacctcacagatactgggaggggcagggagtgtgctgggggcttcctgccagccagagagactgagtggtgcacatgtggaggcgaggaagggcca

SEQ ID NO: 308982 - DNA, 1860 bp, Homo sapiens
ggcggttctttccggaaattatgactgcagctgttttcactccgctgtgactcagagcgctccgggctgcaggagaggaagaaatcttgcatcaccatggtgcacttctgtggcctactcaccctccaccgggagccagtgccgctgaagagtatctctgtgagcgtgaacatttacgagtttgtggctggtgtgtctgcaactttgaactacgagaatgaggagaaagttcctttggaggccttctttgtgttccccatggatgaagactctgctgtttacagctttgaggccttggtggatgggaagaaaattgtagcagaattacaagacaagatgaaggcccgcaccaactatgagaaagccatctcccagggccaccaggccttcttattggagggggacagcagctccagggatgtcttctcttgcaatgtgggtaacctccaacctgggtcgaaggcggcagtcaccctgaagtatgtgcaggagctgcctctggaagcagatggggctctgcgctttgtgctcccagctgtcctgaatcctagataccagttctctgggtcgtctaaggacagttgccttaatgtgaagactcctatagtccctgtggaggacctgccctacacactcagcatggtcgccaccatagattcccagcatggcattgagaaggtccaatccaactgccccttgagtcctaccgagtacctaggagaggacaagacttctgctcaggtttccctggctgctggacacaagtttgatcgggacgtggaactcctgatttactacaatgaggtgcatacccccagcgtggttttggagatggggatgcctaacatgaagccaggtcatttgatgggagatccatctgcaatggtgagtttctatccaaatatcccagaagatcaaccatcaaatacctgtggagagtttatctttctcatggaccgctcgggaagtatgcagagccccatgagtagccaggatacatctcagctgcgaatacaggcagccaaggaaacactgattttgctgctgaagagtttacctataggctgttatttcaacatctatggatttggctcttcctatgaggcatgctttccggagagtgtgaagtacactcagcaaacaatggaggaggctctggggagagtgaagcttatgcaggccgacctagggggcactgaaatcttggcaccactccagaacatttacaggggaccctccatcccaggccaccccctacagctttttgtctttacagatggagaagttacagacacgtttagtgtaattaaagaagttaggatcaacagacagaaacacaggtaggaagaaaatgtgatttccgggtgattggtgctgagtagtgacacacagactctagtgctacatgatgccggtgttgaccttccttcaagaggaccaaatgatttcagaatttagttttagcagctgaaaatttatttctccctgtaaacgttaaaaacagttttccaaataacatcaacaacacagcaaaaccattgtttcttattctttctaaactacaacgaacacaagaattgaatagtaagatgttaattttttttactataaacatttttagagaagtaaaacatgctgaaaactacacaaattataagcatacaactggactcattatcacagtgaatgcactgtgtgatcgccacataggtaaaaactggaatggtcgtaggcctctccatctgtacccttttccatcatgtcctattccctgtcactacacactaaaactttcctgacttacaataccatgggttatttatgcttgtttttgaatgaaaataaataagttatacagta

SEQ ID NO: 308983 - DNA, 3416 bp, Homo sapiens
ggcggttctttccggaaattatgactgcagctgttttcactccgctgtgactcagagcgctccgggctgcaggagaggaagaaatcttgcatcaccatggtgcacttctgtggcctactcaccctccaccgggagccagtgccgctgaagagtatctctgtgagcgtgaacatttacgagtttgtggctggtgtgtctgcaactttgaactacgagaatgaggagaaagttcctttggaggccttctttgtgttccccatggatgaagactctgctgtttacagctttgaggccttggtggatgggaagaaaattgtagcagaattacaagacaagatgaaggcccgcaccaactatgagaaagccatctcccagggccaccaggccttcttattggagggggacagcagctccagggatgtcttctcttgcaatgtgggtaacctccaacctgggtcgaaggcggcagtcaccctgaagtatgtgcaggagctgcctctggaagcagatggggctctgcgctttgtgctcccagctgtcctgaatcctagataccagttctctgggtcgtctaaggacagttgccttaatgtgaagactcctatagtccctgtggaggacctgccctacacactcagcatggtcgccaccatagattcccagcatggcattgagaaggtccaatccaactgccccttgagtcctaccgagtacctaggagaggacaagacttctgctcaggtttccctggctgctggacacaagtttgatcgggacgtggaactcctgatttactacaatgaggtgcatacccccagcgtggttttggagatggggatgcctaacatgaagccaggtcatttgatgggagatccatctgcaatggtgagtttctatccaaatatcccagaagatcaaccatcaaatacctgtggagagtttatctttctcatggaccgctcgggaagtatgcagagccccatgagtagccaggatacatctcagctgcgaatacaggcagccaaggaaacactgattttgctgctgaagagtttacctataggctgttatttcaacatctatggatttggctcttcctatgaggcatgctttccggagagtgtgaagtacactcagcaaacaatggaggaggctctggggagagtgaagcttatgcaggccgacctagggggcactgaaatcttggcaccactccagaacatttacaggggaccctccatcccaggccaccccctacagctttttgtctttacagatggagaagttacagacacgtttagtgtaattaaagaagttaggatcaacagacagaaacacaggtgtttctcatttggtattggagaaggcacctccaccagcctaataaaaggtattgcccgggcatcagggggcacctcagaatttatcacaggcaaagacaggatgcagtccaaggctctcaggactctgaaacgctctctgcagcctgtggtagaggatgtctctctgagctggcatttgcctcctggtctgtctgctaaaatgctttccccagaacagactgtcatctttaggggtcagagattaatcagctatgcccagctgaccgggaggatgccagcagcagagacaacaggagaagtatgcctcaaatatacactccagggcaagacttttgaggataaggtgacatttcctctacaacccaagcctgatgtcaacctcaccattcaccgccttgctgccaagtccttgctccagaccaaggacatgggcctcagggagactccagcaagtgataaaaaagatgcattgaaccttagccttgagtctggtgtcataagctccttcacagctttcattgctatcaataaggagctcaacaagccggttcaggggcctctggctcatagggacgtcccaaggccaattctgttgggtgcttctgccccattgaagataaaatgccaatcaggttttcgaaaggccttacactctgaccgtcctccttctgcatctcagcccagaggggaacttatgtgttataaggccaagacattccagatggacgattacagtctctgtgggttgataagtcacaaggaccagcacagtccaggctttggagagaatcaccttgtgcagctgatttaccaccaaaatgcaaatggttcctgggatctgaatgaagatctagccaagatcctaggtatgagtttggaagaaataatggctgcacagcctgccgagcttgtggattcctcaggctgggccaccatcctggccgtgatctggctgcacagcaatggtaaggacttgaagtgtgaatgggagcttctggaaaggaaggccgtggcctggatgcgtgcccatgcaggctccaccatgccttcggttgtgaaagctgctattactttcctgaagtcatctgtggatcctgctatctttgccttttgaagataccatccagaaaaagaagtgcctttaatttgctactgtcatttcctctagtatcacttttgctgtgatgatgtgttcttgtgttttataactctttattttttgccataaaagtaaaggatgcttactccacttcgcttctctgctccaggttcactttggatatgatctttcttttcccaacatatgccctcagaaaagtgacagtggtcccagaacctattccctttcttgagggagttcaaaacattcataggcagtaatgttcctcccagggtttccagggaaacaacatgaaaaacaggtgacatgaactacagactaaagattgcagcatttatgttagagaatgcttgaattagagaattttctgcattatctttgtctgttcactttctatcttatatacttatcagggccatactggtaagcttgcgtaggaggagttagagggaagttgaaagccaacatctggatcaatgtaatgtcaagatcacaaagacagagactgcaggggtccactgtgagaggtgacactgttggggaccttcctgattcattcttcttgggctttgctagcctgtacaacctacatgtcttttcttccactgcctgaaagacttgggttgaactataactgttggagagagatgttcctctttaatcatgaaacaccttaagaagtctataatgcaatccttagtcctaccctgaacctatgtgtcctctaagtcaggccctgatctagtgcagtaaagggaagggtgggcttaatgggagctttgcctgggacctgaacctggagcacttaccgcattaggaagaaaggagctccccgtaatcgttcctgacccttgtgtctcatataccctatcctggtggaaatgaccctatttgatatgctgtcccttaaaataacttgtatcaatattaaaatgactatttctaccctttga

SEQ ID NO: 308984 - DNA, 3531 bp, Homo sapiens
ggcggttctttccggaaattatgactgcagctgttttcactccgctgtgactcagagcgctccgggctgcaggagaggaagcccagcctgttctaccagagaacttgcccaggtcagaggtctgcgtagaagcccttttctgagcatcctctcctctcctcacacctgccactgtcctctgcgttgctgtcgaattaaatcttgcatcaccatggtgcacttctgtggcctactcaccctccaccgggagccagtgccgctgaagagtatctctgtgagcgtgaacatttacgagtttgtggctggtgtgtctgcaactttgaactacgagaatgaggagaaagttcctttggaggccttctttgtgttccccatggatgaagactctgctgtttacagctttgaggccttggtggatgggaagaaaattgtagcagaattacaagacaagatgaaggcccgcaccaactatgagaaagccatctcccagggccaccaggccttcttattggagggggacagcagctccagggatgtcttctcttgcaatgtgggtaacctccaacctgggtcgaaggcggcagtcaccctgaagtatgtgcaggagctgcctctggaagcagatggggctctgcgctttgtgctcccagctgtcctgaatcctagataccagttctctgggtcgtctaaggacagttgccttaatgtgaagactcctatagtccctgtggaggacctgccctacacactcagcatggtcgccaccatagattcccagcatggcattgagaaggtccaatccaactgccccttgagtcctaccgagtacctaggagaggacaagacttctgctcaggtttccctggctgctggacacaagtttgatcgggacgtggaactcctgatttactacaatgaggtgcatacccccagcgtggttttggagatggggatgcctaacatgaagccaggtcatttgatgggagatccatctgcaatggtgagtttctatccaaatatcccagaagatcaaccatcaaatacctgtggagagtttatctttctcatggaccgctcgggaagtatgcagagccccatgagtagccaggatacatctcagctgcgaatacaggcagccaaggaaacactgattttgctgctgaagagtttacctataggctgttatttcaacatctatggatttggctcttcctatgaggcatgctttccggagagtgtgaagtacactcagcaaacaatggaggaggctctggggagagtgaagcttatgcaggccgacctagggggcactgaaatcttggcaccactccagaacatttacaggggaccctccatcccaggccaccccctacagctttttgtctttacagatggagaagttacagacacgtttagtgtaattaaagaagttaggatcaacagacagaaacacaggtgtttctcatttggtattggagaaggcacctccaccagcctaataaaaggtattgcccgggcatcagggggcacctcagaatttatcacaggcaaagacaggatgcagtccaaggctctcaggactctgaaacgctctctgcagcctgtggtagaggatgtctctctgagctggcatttgcctcctggtctgtctgctaaaatgctttccccagaacagactgtcatctttaggggtcagagattaatcagctatgcccagctgaccgggaggatgccagcagcagagacaacaggagaagtatgcctcaaatatacactccagggcaagacttttgaggataaggtgacatttcctctacaacccaagcctgatgtcaacctcaccattcaccgccttgctgccaagtccttgctccagaccaaggacatgggcctcagggagactccagcaagtgataaaaaagatgcattgaaccttagccttgagtctggtgtcataagctccttcacagctttcattgctatcaataaggagctcaacaagccggttcaggggcctctggctcatagggacgtcccaaggccaattctgttgggtgcttctgccccattgaagataaaatgccaatcaggttttcgaaaggccttacactctgaccgtcctccttctgcatctcagcccagaggggaacttatgtgttataaggccaagacattccagatggacgattacagtctctgtgggttgataagtcacaaggaccagcacagtccaggctttggagagaatcaccttgtgcagctgatttaccaccaaaatgcaaatggttcctgggatctgaatgaagatctagccaagatcctaggtatgagtttggaagaaataatggctgcacagcctgccgagcttgtggattcctcaggctgggccaccatcctggccgtgatctggctgcacagcaatggtaaggacttgaagtgtgaatgggagcttctggaaaggaaggccgtggcctggatgcgtgcccatgcaggctccaccatgccttcggttgtgaaagctgctattactttcctgaagtcatctgtggatcctgctatctttgccttttgaagataccatccagaaaaagaagtgcctttaatttgctactgtcatttcctctagtatcacttttgctgtgatgatgtgttcttgtgttttataactctttattttttgccataaaagtaaaggatgcttactccacttcgcttctctgctccaggttcactttggatatgatctttcttttcccaacatatgccctcagaaaagtgacagtggtcccagaacctattccctttcttgagggagttcaaaacattcataggcagtaatgttcctcccagggtttccagggaaacaacatgaaaaacaggtgacatgaactacagactaaagattgcagcatttatgttagagaatgcttgaattagagaattttctgcattatctttgtctgttcactttctatcttatatacttatcagggccatactggtaagcttgcgtaggaggagttagagggaagttgaaagccaacatctggatcaatgtaatgtcaagatcacaaagacagagactgcaggggtccactgtgagaggtgacactgttggggaccttcctgattcattcttcttgggctttgctagcctgtacaacctacatgtcttttcttccactgcctgaaagacttgggttgaactataactgttggagagagatgttcctctttaatcatgaaacaccttaagaagtctataatgcaatccttagtcctaccctgaacctatgtgtcctctaagtcaggccctgatctagtgcagtaaagggaagggtgggcttaatgggagctttgcctgggacctgaacctggagcacttaccgcattaggaagaaaggagctccccgtaatcgttcctgacccttgtgtctcatataccctatcctggtggaaatgaccctatttgatatgctgtcccttaaaataacttgtatcaatattaaaatgactatttctaccctttga

SEQ ID NO: 308985 - DNA, 3729 bp, Homo sapiens
ggcggttctttccggaaattatgactgcagctgttttcactccgctgtgactcagagcgctccgggctgcaggagaggaagaaatcttgcatcaccatggtgcacttctgtggcctactcaccctccaccgggagccagtgccgctgaagagtatctctgtgagcgtgaacatttacgagtttgtggctggtgtgtctgcaactttgaactacgagaatgaggagaaagttcctttggaggccttctttgtgttccccatggatgaagactctgctgtttacagctttgaggccttggtggatgggaagaaaattgtagcagaattacaagacaagatgaaggcccgcaccaactatgagaaagccatctcccagggccaccaggccttcttattggagggggacagcagctccagggatgtcttctcttgcaatgtgggtaacctccaacctgggtcgaaggcggcagtcaccctgaagtatgtgcaggagctgcctctggaagcagatggggctctgcgctttgtgctcccagctgtcctgaatcctagataccagttctctgggtcgtctaaggacagttgccttaatgtgaagactcctatagtccctgtggaggacctgccctacacactcagcatggtcgccaccatagattcccagcatggcattgagaaggtccaatccaactgccccttgagtcctaccgagtacctaggagaggacaagacttctgctcaggtttccctggctgctggacacaagtttgatcgggacgtggaactcctgatttactacaatgaggtgcatacccccagcgtggttttggagatggggatgcctaacatgaagccaggtcatttgatgggagatccatctgcaatggtgagtttctatccaaatatcccagaagatcaaccatcaaatacctgtggagagtttatctttctcatggaccgctcgggaagtatgcagagccccatgagtagccaggatacatctcagctgcgaatacaggcagccaaggaaacactgattttgctgctgaagagtttacctataggctgttatttcaacatctatggatttggctcttcctatgaggcatgctttccggagagtgtgaagtacactcagcaaacaatggaggaggctctggggagagtgaagcttatgcaggccgacctagggggcactgaaatcttggcaccactccagaacatttacaggggaccctccatcccaggccaccccctacagctttttgtctttacagatggagaagttacagacacgtttagtgtaattaaagaagttaggatcaacagacagaaacacaggtgtttctcatttggtattggagaaggcacctccaccagcctaataaaaggtattgcccgggcatcagggggcacctcagaatttatcacaggcaaagacaggatgcagtccaaggctctcaggactctgaaacgctctctgcagcctgtggtagaggatgtctctctgagctggcatttgcctcctggtctgtctgctaaaatgctttccccagaacagactgtcatctttaggggtcagagattaatcagctatgcccagctgaccgggaggatgccagcagcagagacaacaggagaagtatgcctcaaatatacactccagggcaagacttttgaggataaggtgacatttcctctacaacccaagcctgatgtcaacctcaccattcaccgccttgctgccaagtccttgctccagaccaaggacatgggcctcagggagactccagcaagtgataaaaaagatgcattgaaccttagccttgagtctggtgtcataagctccttcacagctttcattgctatcaataaggagctcaacaagccggttcaggggcctctggctcatagggacgtcccaaggccaattctgttgggtgcttctgccccattgaagataaaatgccaatcaggttttcgaaaggccttacactctgaccgtcctccttctgcatctcagcccagaggggaacttatgtgttataaggccaagacattccagatggacgattacagtctctgtgggttgataagtcacaaggaccagcacagtccaggctttggagagaatcaccttgtgcagctgatttaccaccaaaatgcaaatggttcctgggatctgaatgaagatctagccaagatcctaggtatgagtttggaagaaataatggctgcacagcctgccgagcttgtggattcctcaggctgggccaccatcctggccgtgatctggctgcacagcaatggtaaggacttgaagtgtgaatgggagcttctggaaaggaaggccgtggcctggatgcgtgcccatgcaggctccaccatgccttcggttgtgaaagctgctattactttcctgaagtcatctgtggatcctgctatctttgccttttgaagataccatccagaaaaagaagtgcctttaatttgctactgtcatttcctctagtatcacttttgctgtgatgatgtgttcttgtgttttataactctttattttttgccataaaagtaaaggatgcttactccacttcgcttctctgctccaggttcactttggatatgatctttcttttcccaacatatgccctcagaaaagtgacagtggtcccagaacctattccctttcttgagggagttcaaaacattcataggcagtaatgttcctcccagggtttccagggaaacaacatgaaaaacaggtgacatgaactacagactaaagattgcagcatttatgttagagaatgcttgaattagagaattttctgcattatctttgtctgttcactttctatcttatatacttatcagggccatactggtaagcttgcgtaggaggagttagagggaagttgaaagccaacatctggatcaatgtaatgtcaagatcacaaagacagagactgcaggggtccactgtgagaggtgacactgttggggaccttcctgattcattcttcttgggctttgctagcctgtacaacctacatgtcttttcttccactgcctgaaagacttgggttgaactataactgttggagagagatgttcctctttaatcatgaaacaccttaagaagtctataatgcaatccttagtcctaccctgaacctatgtgtcctctaagtcaggccctgatctagtgcagtaaagggaagggtgggcttaatgggagctttgcctgggacctgaacctggagcacttaccgcattaggaagaaaggagctccccgtaatcgttcctgacccttgtgtctcatataccctatcctggtggaaatgaccctatttgatatgctgtcccttaaaataacttgtatcaatattaaaatgactatttctaccctttgaaaaaaacaaaaaaaaaaaaaaaaaaaaacaaaaaaaaaaaaaaaaaaaaaaaaaaaaaaagacaaaaaaaacaaaaaacaagcgaaaaaacaaacaaagcagagaagaaagaaggaagcaaagcaaagaagggagaggagagacgcacaagacgcgaaggaggggagaacgaacgcgaaaagcgagaggaagagacaaagagaaaaaaggagagaagcaaaagcagaataggagcgaaagaagggaagaaggggagagacaacgcgggaggagaaaacgagcgacagcgcaaagacgagcagggaggagaaga

SEQ ID NO: 308986 - DNA, 1984 bp, Homo sapiens
ggcggttctttccggaaattatgactgcagctgttttcactccgctgtgactcagagcgctccgggctgcaggagaggaagaaatcttgcatcaccatggtgcacttctgtggcctactcaccctccaccgggagccagtgccgctgaagagtatctctgtgagcgtgaacatttacgagtttgtggctggtgtgtctgcaactttgaactacgagaatgaggagaaagttcctttggaggccttctttgtgttccccatggatgaagactctgctgtttacagctttgaggccttggtggatgggaagaaaattgtagcagaattacaagacaagatgaaggcccgcaccaactatgagaaagccatctcccagggccaccaggccttcttattggagggggacagcagctccagggatgtcttctcttgcaatgtgggtaacctccaacctgggtcgaaggcggcagtcaccctgaagtatgtgcaggagctgcctctggaagcagatggggctctgcgctttgtgctcccagctgtcctgaatcctagataccagttctctgggtcgtctaaggacagttgccttaatgtgaagactcctatagtccctgtggaggacctgccctacacactcagcatggtcgccaccatagattcccagcatggcattgagaaggtccaatccaactgccccttgagtcctaccgagtacctaggagaggacaagacttctgctcaggtttccctggctgctggacacaagtttgatcgggacgtggaactcctgatttactacaatgaggtgcatacccccagcgtggttttggagatggggatgcctaacatgaagccaggatctggctgcacagcaatggtaaggacttgaagtgtgaatgggagcttctggaaaggaaggccgtggcctggatgcgtgcccatgcaggctccaccatgccttcggttgtgaaagctgctattactttcctgaagtcatctgtggatcctgctatctttgccttttgaagataccatccagaaaaagaagtgcctttaatttgctactgtcatttcctctagtatcacttttgctgtgatgatgtgttcttgtgttttataactctttattttttgccataaaagtaaaggatgcttactccacttcgcttctctgctccaggttcactttggatatgatctttcttttcccaacatatgccctcagaaaagtgacagtggtcccagaacctattccctttcttgagggagttcaaaacattcataggcagtaatgttcctcccagggtttccagggaaacaacatgaaaaacaggtgacatgaactacagactaaagattgcagcatttatgttagagaatgcttgaattagagaattttctgcattatctttgtctgttcactttctatcttatatacttatcagggccatactggtaagcttgcgtaggaggagttagagggaagttgaaagccaacatctggatcaatgtaatgtcaagatcacaaagacagagactgcaggggtccactgtgagaggtgacactgttggggaccttcctgattcattcttcttgggctttgctagcctgtacaacctacatgtcttttcttccactgcctgaaagacttgggttgaactataactgttggagagagatgttcctctttaatcatgaaacaccttaagaagtctataatgcaatccttagtcctaccctgaacctatgtgtcctctaagtcaggccctgatctagtgcagtaaagggaagggtgggcttaatgggagctttgcctgggacctgaacctggagcacttaccgcattaggaagaaaggagctccccgtaatcgttcctgacccttgtgtctcatataccctatcctggtggaaatgaccctatttgatatgctgtcccttaaaataacttgtatcaatattaaaatgactatttctaccctttga

SEQ ID NO: 308987 - DNA, 2099 bp, Homo sapiens
ggcggttctttccggaaattatgactgcagctgttttcactccgctgtgactcagagcgctccgggctgcaggagaggaagcccagcctgttctaccagagaacttgcccaggtcagaggtctgcgtagaagcccttttctgagcatcctctcctctcctcacacctgccactgtcctctgcgttgctgtcgaattaaatcttgcatcaccatggtgcacttctgtggcctactcaccctccaccgggagccagtgccgctgaagagtatctctgtgagcgtgaacatttacgagtttgtggctggtgtgtctgcaactttgaactacgagaatgaggagaaagttcctttggaggccttctttgtgttccccatggatgaagactctgctgtttacagctttgaggccttggtggatgggaagaaaattgtagcagaattacaagacaagatgaaggcccgcaccaactatgagaaagccatctcccagggccaccaggccttcttattggagggggacagcagctccagggatgtcttctcttgcaatgtgggtaacctccaacctgggtcgaaggcggcagtcaccctgaagtatgtgcaggagctgcctctggaagcagatggggctctgcgctttgtgctcccagctgtcctgaatcctagataccagttctctgggtcgtctaaggacagttgccttaatgtgaagactcctatagtccctgtggaggacctgccctacacactcagcatggtcgccaccatagattcccagcatggcattgagaaggtccaatccaactgccccttgagtcctaccgagtacctaggagaggacaagacttctgctcaggtttccctggctgctggacacaagtttgatcgggacgtggaactcctgatttactacaatgaggtgcatacccccagcgtggttttggagatggggatgcctaacatgaagccaggatctggctgcacagcaatggtaaggacttgaagtgtgaatgggagcttctggaaaggaaggccgtggcctggatgcgtgcccatgcaggctccaccatgccttcggttgtgaaagctgctattactttcctgaagtcatctgtggatcctgctatctttgccttttgaagataccatccagaaaaagaagtgcctttaatttgctactgtcatttcctctagtatcacttttgctgtgatgatgtgttcttgtgttttataactctttattttttgccataaaagtaaaggatgcttactccacttcgcttctctgctccaggttcactttggatatgatctttcttttcccaacatatgccctcagaaaagtgacagtggtcccagaacctattccctttcttgagggagttcaaaacattcataggcagtaatgttcctcccagggtttccagggaaacaacatgaaaaacaggtgacatgaactacagactaaagattgcagcatttatgttagagaatgcttgaattagagaattttctgcattatctttgtctgttcactttctatcttatatacttatcagggccatactggtaagcttgcgtaggaggagttagagggaagttgaaagccaacatctggatcaatgtaatgtcaagatcacaaagacagagactgcaggggtccactgtgagaggtgacactgttggggaccttcctgattcattcttcttgggctttgctagcctgtacaacctacatgtcttttcttccactgcctgaaagacttgggttgaactataactgttggagagagatgttcctctttaatcatgaaacaccttaagaagtctataatgcaatccttagtcctaccctgaacctatgtgtcctctaagtcaggccctgatctagtgcagtaaagggaagggtgggcttaatgggagctttgcctgggacctgaacctggagcacttaccgcattaggaagaaaggagctccccgtaatcgttcctgacccttgtgtctcatataccctatcctggtggaaatgaccctatttgatatgctgtcccttaaaataacttgtatcaatattaaaatgactatttctaccctttga

SEQ ID NO: 308988 - DNA, 1743 bp, Homo sapiens
ggcggttctttccggaaattatgactgcagctgttttcactccgctgtgactcagagcgctccgggctgcaggagaggaagaaatcttgcatcaccatggtgcacttctgtggcctactcaccctccaccgggagccagtgccgctgaagagtatctctgtgagcgtgaacatttacgagtttgtggctggtgtgtctgcaactttgaactacgagaatgaggagaaagttcctttggaggccttctttgtgttccccatggatgaagactctgctgtttacagctttgaggccttggtggatgggaagaaaattgtagcagaattacaagacaagatgaaggcccgcaccaactatgagaaagccatctcccagggccaccaggccttcttattggagggggacagcagctccagggatgtcttctcttgcaatgtgggtaacctccaacctgggtcgaaggcggcagtcaccctgaagtatgtgcaggagctgcctctggaagcagatggggctctgcgctttgtgctcccagctgtcctgaatcctagataccagttctctgggtcgtctaaggacagttgccttaatgtgaagactcctatagtccctgtggaggacctgccctacacactcagcatggtcgccaccatagattcccagcatggcattgagaaggtccaatccaactgccccttgagtcctaccgagtacctaggagaggacaagacttctgctcaggtttccctggctgctggacacaagtttgatcgggacgtggaactcctgatttactacaatgaggtgcatacccccagcgtggttttggagatggggatgcctaacatgaagccaggtcatttgatgggagatccatctgcaatggtgagtttctatccaaatatcccagaagatcaaccatcaaatacctgtggagagtttatctttctcatggaccgctcgggaagtatgcagagccccatgagtagccaggatacatctcagctgcgaatacaggcagccaaggaaacactgattttgctgctgaagagtttacctataggctgttatttcaacatctatggatttggctcttcctatgaggcatgctttccggagagtgtgaagtacactcagcaaacaatggaggaggctctggggagagtgaagcttatgcaggccgacctagggggcactgaaatcttggcaccactccagaacatttacaggggaccctccatcccaggccaccccctacagctttttgtctttacagatggagaagttacagacacgtttagtgtaattaaagaagttaggatcaacagacagaaacacaggtgtttctcatttggtattggagaaggcacctccaccagcctaataaaaggtattgcccgggcatcagggggcacctcagaatttatcacaggcaaagacaggatgcagtccaaggctctcaggactctgaaacgctctctgcagcctgtggtagaggatgtctctctgagctggcatttgcctcctggtctgtctgctaaaatgctttccccagaacagactgtcatctttaggggtcagagattaatcagctatgcccagctgaccgggaggatgccaccagcagagacaacaggagaagtatcccgcaataccaagggcgagaggaaaagcaagtgccaaggtcctgagacacgaagagatgggcgaggcctgctttgcagcaaacgaatccacggctct

SEQ ID NO: 308989 - DNA, 609 bp, Homo sapiens
  misc_feature (2)..(2): n is a, c, g, or t
  misc_feature (5)..(5): n is a, c, g, or t
  misc_feature (7)..(7): n is a, c, g, or t
gnagngnacagaaggcagttcacctctgctcccgacagcctgggaacccgcaagagccccagcatttgaagtctggtcttgtgaaaccccaccctcctctggctgtgtgattgaatgggatgccctcgaggttcacctcacctgagagggttttgggcagatcagcagtaaggtgttaaattttagaagcctgaaaactccagaagagaaaggccaaccaactcaaacttgaagacatgaaatccccaaggagaaccactttgtgcctcatgtttattgtgatttattcttccaaagctgcactgaactggaattacgagtctactattcatcctttgagtcttcatgaacatgaaccagctggtgaagaggcactgaggcaaaaacgagccgttgccacaaaaagtcctacggctgaagaatacactgttaatattgagatcagttttgaaaatgcatccttcctggatcctatcaaagcctacttgaacagccatacagccatttaggtaacagccatttaggtaacagccatttaggtaacagccatttaggtaacagccatttaggtaacaagcattaggtaaggtacgaactcgaattcgaatc

SEQ ID NO: 308990 - DNA, 5671 bp, Homo sapiens
  misc_feature (2)..(2): n is a, c, g, or t
  misc_feature (5)..(5): n is a, c, g, or t
  misc_feature (7)..(7): n is a, c, g, or t
  misc_feature (536)..(536): n is a, c, g, or t
gnagngnacagaaggcagttcacctctgctcccgacagcctgggaacccgcaagagccccagcatttgaagtctggtcttgtgaaaccccaccctcctctggctgtgtgattgaatgggatgccctcgaggttcacctcacctgagagggttttgggcagatcagcagtaaggtgttaaattttagaagcctgaaaactccagaagagaaaggccaaccaactcaaacttgaagacatgaaatccccaaggagaaccactttgtgcctcatgtttattgtgatttattcttccaaagctgcactgaactggaattacgagtctactattcatcctttgagtcttcatgaacatgaaccagctggtgaagaggcactgaggcaaaaacgagccgttgccacaaaaagtcctacggctgaagaatacactgttaatattgagatcagttttgaaaatgcatccttcctggatcctatcaaagcctacttgaacagcctcagttttccaattcatgggaataacactgaccaaattacngacattttgagcataaatgtgacaacagtctgcagacctgctggaaatgaaatctggtgctcctgcgagacaggttatgggtggcctcgggaaaggtgtcttcacaatctcatttgtcaagagcgtgacgtcttcctcccagggcaccattgcagttgccttaaagaactgcctcccaatggacctttttgcctgcttcaggaagatgttaccctgaacatgagagtcagactaaatgtaggctttcaagaagacctcatgaacacttcctccgccctctataggtcctacaagaccgacttggaaacagcgttccggaagggttacggaattttaccaggcttcaagggcgtgactgtgacagggttcaagtctggaagtgtggttgtgacatatgaagtcaagactacaccaccatcacttgagttaatacataaagccaatgaacaagttgtacagagcctcaatcagacctacaaaatggactacaactcctttcaagcagttactatcaatgaaagcaatttctttgtcacaccagaaatcatctttgaaggggacacagtcagtctggtgtgtgaaaaggaagttttgtcctccaatgtgtcttggcgctatgaagaacagcagttggaaatccagaacagcagcagattctcgatttacaccgcacttttcaacaacatgacttcggtgtccaagctcaccatccacaacatcactccaggtgatgcaggtgaatatgtttgcaaactgatattagacatttttgaatatgagtgcaagaagaaaatagatgttatgcccatccaaattttggcaaatgaagaaatgaaggtgatgtgcgacaacaatcctgtatctttgaactgctgcagtcagggtaatgttaattggagcaaagtagaatggaagcaggaaggaaaaataaatattccaggaacccctgagacagacatagattctagctgcagcagatacaccctcaaggctgatggaacccagtgcccaagcgggtcgtctggaacaacagtcatctacacttgtgagttcatcagtgcctatggagccagaggcagtgcaaacataaaagtgacattcatctctgtggccaatctaacaataaccccggacccaatttctgtttctgagggacaaaacttttctataaaatgcatcagtgatgtgagtaactatgatgaggtttattggaacacttctgctggaattaaaatataccaaagattttataccacgaggaggtatcttgatggagcagaatcagtactgacagtcaagacctcgaccagggagtggaatggaacctatcactgcatatttagatataagaattcatacagtattgcaaccaaagacgtcattgttcacccgctgcctctaaagctgaacatcatggttgatcctttggaagctactgtttcatgcagtggttcccatcacatcaagtgctgcatagaggaggatggagactacaaagttactttccatatgggttcctcatcccttcctgctgcaaaagaagttaacaaaaaacaagtgtgctacaaacacaatttcaatgcaagctcagtttcctggtgttcaaaaactgttgatgtgtgttgtcactttaccaatgctgctaataattcagtttggagcccatctatgaagctgaatctggttcctggggaaaacatcacatgccaggatcccgtaataggtgtcggagagccggggaaagtcatccagaagctatgccggttctcaaacgttcccagcagccctgagagtcccattggcgggaccatcacttacaaatgtgtaggctcccagtgggaggagaagagaaatgactgcatctctgccccaataaacagtctgctccagatggctaaggctttgatcaagagcccctctcaggatgagatgctccctacatacctgaaggatctttctattagcatagacaaagcggaacatgaaatcagctcttctcctgggagtctgggagccattattaacatccttgatctgctctcaacagttccaacccaagtaaattcagaaatgatgacgcacgtgctctctacggttaatgtcatccttggcaagcccgtcttgaacacctggaaggttttacaacagcaatggaccaatcagagttcacagctactacattcagtggaaagattttcccaagcattacagtcaggagatagccctcctttgtccttctcccaaactaatgtgcagatgagcagcacggtaatcaagtccagccacccagaaacctatcaacagaggtttgttttcccatactttgacctctggggcaatgtggtcattgacaagagctatctagaaaacttgcagtcggattcgtctattgtcaccatggctttcccaactctccaagccatccttgctcaggatatccaggaaaataactttgcagagagcttagtgatgacaaccactgtcagccacaatacgactatgccattcaggatttcaatgacttttaagaacaatagcccttcaggcggcgaaacgaagtgtgtcttctggaacttcaggcttgccaacaacacaggggggtgggacagcagtgggtgctatgttgaagaaggtgatggggacaatgtcacctgtatctgtgaccacctaacatcattctccatcctcatgtcccctgactccccagatcctagttctctcctgggaatactcctggatattatttcttatgttggggtgggcttttccatcttgagcttggcagcctgtctagttgtggaagctgtggtgtggaaatcggtgaccaagaatcggacttcttatatgcgccacacctgcatagtgaatatcgctgcctcccttctggtcgccaacacctggttcattgtggtcgctgccatccaggacaatcgctacatactctgcaagacagcctgtgtggctgccaccttcttcatccacttcttctacctcagcgtcttcttctggatgctgacactgggcctcatgctgttctatcgcctggttttcattctgcatgaaacaagcaggtccactcagaaagccattgccttctgtcttggctatggctgcccacttgccatctcggtcatcacgctgggagccacccagccccgggaagtctatacgaggaagaatgtctgttggctcaactgggaggacaccaaggccctgctggctttcgccatcccagcactgatcattgtggtggtgaacataaccatcactattgtggtcatcaccaagatcctgaggccttccattggagacaagccatgcaagcaggagaagagcagcctgtttcagatcagcaagagcattggggtcctcacaccactcttgggcctcacttggggttttggtctcaccactgtgttcccagggaccaaccttgtgttccatatcatatttgccatcctcaatgtcttccagggattattcattttactctttggatgcctctgggatctgaaggtacaggaagctttgctgaataagttttcattgtcgagatggtcttcacagcactcaaagtcaacatccctgggttcatccacacctgtgttttctatgagttctccaatatcaaggagatttaacaatttgtttggtaaaacaggaacgtataatgtttccaccccagaagcaaccagctcatccctggaaaactcatccagtgcttcttcgttgctcaactaagaacaggataatccaacctacgtgacctcccggggacagtggctgtgcttttaaaaagagatgcttgcaaagcaatggggaacgtgttctcggggcaggtttccgggagcagatgccaaaaagactttttcatagagaagaggctttcttttgtaaagacagaataaaaataattgttatgtttctgtttgttccctccccctcccccttgtgtgataccacatgtgtatagtatttaagtgaaactcaagccctcaaggcccaacttctctgtctatattgtaatatagaatttcgaagagacattttcactttttacacattgggcacaaagataagctttgattaaagtagtaagtaaaaggctacctaggaaatacttcagtgaattctaagaaggaaggaaggaaggaaggaaggaaagaagggagggaaacagggagaaagggaaaaagaagaaaaagagaaagatgaaaataggaacaaataaagacaaacaacattaagggccatattgtaagatttccatgttaatgatctaatataatcactcagtgcaacattgagaatttttttttaatggctcaaaaatggaaactgaaagcaagtcatggggaatgaatactttgggcagtatcttcctgatgtcttcttagctaagaggaggaaaaaaaggctgaaaaaatagggaggaaattccttcatcagaacgacttcaagtggataacaatatttataagaaatgaatggaaggaaatatgatcctcctgagactaactttgtatgttaaggtttgaactaagtgaatgtatctgcagaggaagtattataaagatatgtcattagatccaagtgctgattaaatttttatagtttatcagaaaagccttatattttagtttgttccacattttgaaagcaaaaaatatatatttgatatacccttcaattgccaaatttgatatgttgcactgaagacagaccctgtcatatatttaatggcttcaagcaggtacttctctgtgcattatagaatagattttaataatcttatagcattgtatattattattgctgttgtcactgttattattattgtggatactggcccttggtgtgttgcatagctccctatgtattctctgtttccatctttaagttcccagaccaatatacattaagagttttgcatggtctaaattgtgtttattccaaccacgtggaaagctcctggaaagaaattttacattcggttgttctgtgctcctaatgacacttgaccttgttgaacaaatggcagagcctttcccaaggatttgattgtttgtgaattatctgcatgtgtgcttttttttggtgtgtatttcattaaaaaatataaatatttatgaaaa

SEQ ID NO: 308991 - DNA, 5611 bp, Homo sapiens
attctagctcggtacccacaccacctgagtcaagaggaactatagtgtttttaataacataatctcagaagtgccataccatcacctctaccttattctgttgattacatagaccaatcctagtacaatataagaaggtagtacaaaagggtttgaatacctagtggtagggatgggcaaaggtcatcttggaggctagctaccttatacttatcatcatagacatctggtggctattagctattaggcatgactatctaaaagatgacttagccattcatcactcaaccgtcacagcagtcatctttcagattgtcatagctaatagcatggtgatgcatacatgcaaatatcaattttatgcagtgctattgaacttctcagaaaggtaatataaagtcagattcggatgttcttcaagaatgaatacctgcaggctataaatacaaatatggtgaccaccttctccaccttctctctccttgctgttctgattaacgatagtctgcagacctgctggaaatgaaatctggtgctcctgcgagacaggttatgggtggcctcgggaaaggtgtcttcacaatctcatttgtcaagagcgtgacgtcttcctcccagggcaccattgcagttgccttaaagaactgcctcccaatggacctttttgcctgcttcaggaagatgttaccctgaacatgagagtcagactaaatgtaggctttcaagaagacctcatgaacacttcctccgccctctataggtcctacaagaccgacttggaaacagcgttccggaagggttacggaattttaccaggcttcaagggcgtgactgtgacagggttcaagtctggaagtgtggttgtgacatatgaagtcaagactacaccaccatcacttgagttaatacataaagccaatgaacaagttgtacagagcctcaatcagacctacaaaatggactacaactcctttcaagcagttactatcaatgaaagcaatttctttgtcacaccagaaatcatctttgaaggggacacagtcagtctggtgtgtgaaaaggaagttttgtcctccaatgtgtcttggcgctatgaagaacagcagttggaaatccagaacagcagcagattctcgatttacaccgcacttttcaacaacatgacttcggtgtccaagctcaccatccacaacatcactccaggtgatgcaggtgaatatgtttgcaaactgatattagacatttttgaatatgagtgcaagaagaaaatagatgttatgcccatccaaattttggcaaatgaagaaatgaaggtgatgtgcgacaacaatcctgtatctttgaactgctgcagtcagggtaatgttaattggagcaaagtagaatggaagcaggaaggaaaaataaatattccaggaacccctgagacagacatagattctagctgcagcagatacaccctcaaggctgatggaacccagtgcccaagcgggtcgtctggaacaacagtcatctacacttgtgagttcatcagtgcctatggagccagaggcagtgcaaacataaaagtgacattcatctctgtggccaatctaacaataaccccggacccaatttctgtttctgagggacaaaacttttctataaaatgcatcagtgatgtgagtaactatgatgaggtttattggaacacttctgctggaattaaaatataccaaagattttataccacgaggaggtatcttgatggagcagaatcagtactgacagtcaagacctcgaccagggagtggaatggaacctatcactgcatatttagatataagaattcatacagtattgcaaccaaagacgtcattgttcacccgctgcctctaaagctgaacatcatggttgatcctttggaagctactgtttcatgcagtggttcccatcacatcaagtgctgcatagaggaggatggagactacaaagttactttccatatgggttcctcatcccttcctgctgcaaaagaagttaacaaaaaacaagtgtgctacaaacacaatttcaatgcaagctcagtttcctggtgttcaaaaactgttgatgtgtgttgtcactttaccaatgctgctaataattcagtttggagcccatctatgaagctgaatctggttcctggggaaaacatcacatgccaggatcccgtaataggtgtcggagagccggggaaagtcatccagaagctatgccggttctcaaacgttcccagcagccctgagagtcccattggcgggaccatcacttacaaatgtgtaggctcccagtgggaggagaagagaaatgactgcatctctgccccaataaacagtctgctccagatggctaaggctttgatcaagagcccctctcaggatgagatgctccctacatacctgaaggatctttctattagcatagacaaagcggaacatgaaatcagctcttctcctgggagtctgggagccattattaacatccttgatctgctctcaacagttccaacccaagtaaattcagaaatgatgacgcacgtgctctctacggttaatgtcatccttggcaagcccgtcttgaacacctggaaggttttacaacagcaatggaccaatcagagttcacagctactacattcagtggaaagattttcccaagcattacagtcaggagatagccctcctttgtccttctcccaaactaatgtgcagatgagcagcacggtaatcaagtccagccacccagaaacctatcaacagaggtttgttttcccatactttgacctctggggcaatgtggtcattgacaagagctatctagaaaacttgcagtcggattcgtctattgtcaccatggctttcccaactctccaagccatccttgctcaggatatccaggaaaataactttgcagagagcttagtgatgacaaccactgtcagccacaatacgactatgccattcaggatttcaatgacttttaagaacaatagcccttcaggcggcgaaacgaagtgtgtcttctggaacttcaggcttgccaacaacacaggggggtgggacagcagtgggtgctatgttgaagaaggtgatggggacaatgtcacctgtatctgtgaccacctaacatcattctccatcctcatgtcccctgactccccagatcctagttctctcctgggaatactcctggatattatttcttatgttggggtgggcttttccatcttgagcttggcagcctgtctagttgtggaagctgtggtgtggaaatcggtgaccaagaatcggacttcttatatgcgccacacctgcatagtgaatatcgctgcctcccttctggtcgccaacacctggttcattgtggtcgctgccatccaggacaatcgctacatactctgcaagacagcctgtgtggctgccaccttcttcatccacttcttctacctcagcgtcttcttctggatgctgacactgggcctcatgctgttctatcgcctggttttcattctgcatgaaacaagcaggtccactcagaaagccattgccttctgtcttggctatggctgcccacttgccatctcggtcatcacgctgggagccacccagccccgggaagtctatacgaggaagaatgtctgttggctcaactgggaggacaccaaggccctgctggctttcgccatcccagcactgatcattgtggtggtgaacataaccatcactattgtggtcatcaccaagatcctgaggccttccattggagacaagccatgcaagcaggagaagagcagcctgtttcagatcagcaagagcattggggtcctcacaccactcttgggcctcacttggggttttggtctcaccactgtgttcccagggaccaaccttgtgttccatatcatatttgccatcctcaatgtcttccagggattattcattttactctttggatgcctctgggatctgaaggtacaggaagctttgctgaataagttttcattgtcgagatggtcttcacagcactcaaagtcaacatccctgggttcatccacacctgtgttttctatgagttctccaatatcaaggagatttaacaatttgtttggtaaaacaggaacgtataatgtttccaccccagaagcaaccagctcatccctggaaaactcatccagtgcttcttcgttgctcaactaagaacaggataatccaacctacgtgacctcccggggacagtggctgtgcttttaaaaagagatgcttgcaaagcaatggggaacgtgttctcggggcaggtttccgggagcagatgccaaaaagactttttcatagagaagaggctttcttttgtaaagacagaataaaaataattgttatgtttctgtttgttccctccccctcccccttgtgtgataccacatgtgtatagtatttaagtgaaactcaagccctcaaggcccaacttctctgtctatattgtaatatagaatttcgaagagacattttcactttttacacattgggcacaaagataagctttgattaaagtagtaagtaaaaggctacctaggaaatacttcagtgaattctaagaaggaaggaaggaaggaaggaaggaaagaagggagggaaacagggagaaagggaaaaagaagaaaaagagaaagatgaaaataggaacaaataaagacaaacaacattaagggccatattgtaagatttccatgttaatgatctaatataatcactcagtgcaacattgagaatttttttttaatggctcaaaaatggaaactgaaagcaagtcatggggaatgaatactttgggcagtatcttcctgatgtcttcttagctaagaggaggaaaaaaaggctgaaaaaatagggaggaaattccttcatcagaacgacttcaagtggataacaatatttataagaaatgaatggaaggaaatatgatcctcctgagactaactttgtatgttaaggtttgaactaagtgaatgtatctgcagaggaagtattataaagatatgtcattagatccaagtgctgattaaatttttatagtttatcagaaaagccttatattttagtttgttccacattttgaaagcaaaaaatatatatttgatatacccttcaattgccaaatttgatatgttgcactgaagacagaccctgtcatatatttaatggcttcaagcaggtacttctctgtgcattatagaatagattttaataatcttatagcattgtatattattattgctgttgtcactgttattattattgtggatactggcccttggtgtgttgcatagctccctatgtattctctgtttccatctttaagttcccagaccaatatacattaagagttttgcatggtctaaattgtgtttattccaaccacgtggaaagctcctggaaagaaattttacattcggttgttctgtgctcctaatgacacttgaccttgttgaacaaatggcagagcctttcccaaggatttgattgtttgtgaattatctgcatgtgtgcttttttttggtgtgtatttcattaaaaaatataaatatttatgaaaa

SEQ ID NO: 308992 - DNA, 5504 bp, Homo sapiens
  misc_feature (369)..(369): n is a, c, g, or t
ataatcccagcactttgggaggccgagatgggcggatcacttgaggccaaccaactcaaacttgaagacatgaaatccccaaggagaaccactttgtgcctcatgtttattgtgatttattcttccaaagctgcactgaactggaattacgagtctactattcatcctttgagtcttcatgaacatgaaccagctggtgaagaggcactgaggcaaaaacgagccgttgccacaaaaagtcctacggctgaagaatacactgttaatattgagatcagttttgaaaatgcatccttcctggatcctatcaaagcctacttgaacagcctcagttttccaattcatgggaataacactgaccaaattacngacattttgagcataaatgtgacaacagtctgcagacctgctggaaatgaaatctggtgctcctgcgagacaggttatgggtggcctcgggaaaggtgtcttcacaatctcatttgtcaagagcgtgacgtcttcctcccagggcaccattgcagttgccttaaagaactgcctcccaatggacctttttgcctgcttcaggaagatgttaccctgaacatgagagtcagactaaatgtaggctttcaagaagacctcatgaacacttcctccgccctctataggtcctacaagaccgacttggaaacagcgttccggaagggttacggaattttaccaggcttcaagggcgtgactgtgacagggttcaagtctggaagtgtggttgtgacatatgaagtcaagactacaccaccatcacttgagttaatacataaagccaatgaacaagttgtacagagcctcaatcagacctacaaaatggactacaactcctttcaagcagttactatcaatgaaagcaatttctttgtcacaccagaaatcatctttgaaggggacacagtcagtctggtgtgtgaaaaggaagttttgtcctccaatgtgtcttggcgctatgaagaacagcagttggaaatccagaacagcagcagattctcgatttacaccgcacttttcaacaacatgacttcggtgtccaagctcaccatccacaacatcactccaggtgatgcaggtgaatatgtttgcaaactgatattagacatttttgaatatgagtgcaagaagaaaatagatgttatgcccatccaaattttggcaaatgaagaaatgaaggtgatgtgcgacaacaatcctgtatctttgaactgctgcagtcagggtaatgttaattggagcaaagtagaatggaagcaggaaggaaaaataaatattccaggaacccctgagacagacatagattctagctgcagcagatacaccctcaaggctgatggaacccagtgcccaagcgggtcgtctggaacaacagtcatctacacttgtgagttcatcagtgcctatggagccagaggcagtgcaaacataaaagtgacattcatctctgtggccaatctaacaataaccccggacccaatttctgtttctgagggacaaaacttttctataaaatgcatcagtgatgtgagtaactatgatgaggtttattggaacacttctgctggaattaaaatataccaaagattttataccacgaggaggtatcttgatggagcagaatcagtactgacagtcaagacctcgaccagggagtggaatggaacctatcactgcatatttagatataagaattcatacagtattgcaaccaaagacgtcattgttcacccgctgcctctaaagctgaacatcatggttgatcctttggaagctactgtttcatgcagtggttcccatcacatcaagtgctgcatagaggaggatggagactacaaagttactttccatatgggttcctcatcccttcctgctgcaaaagaagttaacaaaaaacaagtgtgctacaaacacaatttcaatgcaagctcagtttcctggtgttcaaaaactgttgatgtgtgttgtcactttaccaatgctgctaataattcagtttggagcccatctatgaagctgaatctggttcctggggaaaacatcacatgccaggatcccgtaataggtgtcggagagccggggaaagtcatccagaagctatgccggttctcaaacgttcccagcagccctgagagtcccattggcgggaccatcacttacaaatgtgtaggctcccagtgggaggagaagagaaatgactgcatctctgccccaataaacagtctgctccagatggctaaggctttgatcaagagcccctctcaggatgagatgctccctacatacctgaaggatctttctattagcatagacaaagcggaacatgaaatcagctcttctcctgggagtctgggagccattattaacatccttgatctgctctcaacagttccaacccaagtaaattcagaaatgatgacgcacgtgctctctacggttaatgtcatccttggcaagcccgtcttgaacacctggaaggttttacaacagcaatggaccaatcagagttcacagctactacattcagtggaaagattttcccaagcattacagtcaggagatagccctcctttgtccttctcccaaactaatgtgcagatgagcagcacggtaatcaagtccagccacccagaaacctatcaacagaggtttgttttcccatactttgacctctggggcaatgtggtcattgacaagagctatctagaaaacttgcagtcggattcgtctattgtcaccatggctttcccaactctccaagccatccttgctcaggatatccaggaaaataactttgcagagagcttagtgatgacaaccactgtcagccacaatacgactatgccattcaggatttcaatgacttttaagaacaatagcccttcaggcggcgaaacgaagtgtgtcttctggaacttcaggcttgccaacaacacaggggggtgggacagcagtgggtgctatgttgaagaaggtgatggggacaatgtcacctgtatctgtgaccacctaacatcattctccatcctcatgtcccctgactccccagatcctagttctctcctgggaatactcctggatattatttcttatgttggggtgggcttttccatcttgagcttggcagcctgtctagttgtggaagctgtggtgtggaaatcggtgaccaagaatcggacttcttatatgcgccacacctgcatagtgaatatcgctgcctcccttctggtcgccaacacctggttcattgtggtcgctgccatccaggacaatcgctacatactctgcaagacagcctgtgtggctgccaccttcttcatccacttcttctacctcagcgtcttcttctggatgctgacactgggcctcatgctgttctatcgcctggttttcattctgcatgaaacaagcaggtccactcagaaagccattgccttctgtcttggctatggctgcccacttgccatctcggtcatcacgctgggagccacccagccccgggaagtctatacgaggaagaatgtctgttggctcaactgggaggacaccaaggccctgctggctttcgccatcccagcactgatcattgtggtggtgaacataaccatcactattgtggtcatcaccaagatcctgaggccttccattggagacaagccatgcaagcaggagaagagcagcctgtttcagatcagcaagagcattggggtcctcacaccactcttgggcctcacttggggttttggtctcaccactgtgttcccagggaccaaccttgtgttccatatcatatttgccatcctcaatgtcttccagggattattcattttactctttggatgcctctgggatctgaaggtacaggaagctttgctgaataagttttcattgtcgagatggtcttcacagcactcaaagtcaacatccctgggttcatccacacctgtgttttctatgagttctccaatatcaaggagatttaacaatttgtttggtaaaacaggaacgtataatgtttccaccccagaagcaaccagctcatccctggaaaactcatccagtgcttcttcgttgctcaactaagaacaggataatccaacctacgtgacctcccggggacagtggctgtgcttttaaaaagagatgcttgcaaagcaatggggaacgtgttctcggggcaggtttccgggagcagatgccaaaaagactttttcatagagaagaggctttcttttgtaaagacagaataaaaataattgttatgtttctgtttgttccctccccctcccccttgtgtgataccacatgtgtatagtatttaagtgaaactcaagccctcaaggcccaacttctctgtctatattgtaatatagaatttcgaagagacattttcactttttacacattgggcacaaagataagctttgattaaagtagtaagtaaaaggctacctaggaaatacttcagtgaattctaagaaggaaggaaggaaggaaggaaggaaagaagggagggaaacagggagaaagggaaaaagaagaaaaagagaaagatgaaaataggaacaaataaagacaaacaacattaagggccatattgtaagatttccatgttaatgatctaatataatcactcagtgcaacattgagaatttttttttaatggctcaaaaatggaaactgaaagcaagtcatggggaatgaatactttgggcagtatcttcctgatgtcttcttagctaagaggaggaaaaaaaggctgaaaaaatagggaggaaattccttcatcagaacgacttcaagtggataacaatatttataagaaatgaatggaaggaaatatgatcctcctgagactaactttgtatgttaaggtttgaactaagtgaatgtatctgcagaggaagtattataaagatatgtcattagatccaagtgctgattaaatttttatagtttatcagaaaagccttatattttagtttgttccacattttgaaagcaaaaaatatatatttgatatacccttcaattgccaaatttgatatgttgcactgaagacagaccctgtcatatatttaatggcttcaagcaggtacttctctgtgcattatagaatagattttaataatcttatagcattgtatattattattgctgttgtcactgttattattattgtggatactggcccttggtgtgttgcatagctccctatgtattctctgtttccatctttaagttcccagaccaatatacattaagagttttgcatggtctaaattgtgtttattccaaccacgtggaaagctcctggaaagaaattttacattcggttgttctgtgctcctaatgacacttgaccttgttgaacaaatggcagagcctttcccaaggatttgattgtttgtgaattatctgcatgtgtgcttttttttggtgtgtatttcattaaaaaatataaatatttatgaaaa

SEQ ID NO: 308993 - DNA, 5769 bp, Homo sapiens
  misc_feature (2)..(2): n is a, c, g, or t
  misc_feature (5)..(5): n is a, c, g, or t
  misc_feature (7)..(7): n is a, c, g, or t
  misc_feature (536)..(536): n is a, c, g, or t
gnagngnacagaaggcagttcacctctgctcccgacagcctgggaacccgcaagagccccagcatttgaagtctggtcttgtgaaaccccaccctcctctggctgtgtgattgaatgggatgccctcgaggttcacctcacctgagagggttttgggcagatcagcagtaaggtgttaaattttagaagcctgaaaactccagaagagaaaggccaaccaactcaaacttgaagacatgaaatccccaaggagaaccactttgtgcctcatgtttattgtgatttattcttccaaagctgcactgaactggaattacgagtctactattcatcctttgagtcttcatgaacatgaaccagctggtgaagaggcactgaggcaaaaacgagccgttgccacaaaaagtcctacggctgaagaatacactgttaatattgagatcagttttgaaaatgcatccttcctggatcctatcaaagcctacttgaacagcctcagttttccaattcatgggaataacactgaccaaattacngacattttgagcataaatgtgacaacagtctgcagacctgctggaaatgaaatctggtgctcctgcgagacaggttatgggtggcctcgggaaaggtgtcttcacaatctcatttgtcaagagcgtgacgtcttcctcccagggcaccattgcagttgccttaaagaactgcctcccaatggacctttttgcctgcttcaggaagatgttaccctgaacatgagagtcagactaaatgtaggctttcaagaagacctcatgaacacttcctccgccctctataggtcctacaagaccgacttggaaacagcgttccggaagggttacggaattttaccaggcttcaagggcgtgactgtgacagggttcaagtctggaagtgtggttgtgacatatgaagtcaagactacaccaccatcacttgagttaatacataaagccaatgaacaagttgtacagagcctcaatcagacctacaaaatggactacaactcctttcaagcagttactatcaatgaaagcaatttctttgtcacaccagaaatcatctttgaaggggacacagtcagtctggtgtgtgaaaaggaagttttgtcctccaatgtgtcttggcgctatgaagaacagcagttggaaatccagaacagcagcagattctcgatttacaccgcacttttcaacaacatgacttcggtgtccaagctcaccatccacaacatcactccaggtgatgcaggtgaatatgtttgcaaactgatattagacatttttgaatatgagtgcaagaagaaaatagatgttatgcccatccaaattttggcaaatgaagaaatgaaggtgatgtgcgacaacaatcctgtatctttgaactgctgcagtcagggtaatgttaattggagcaaagtagaatggaagcaggaaggaaaaataaatattccaggaacccctgagacagacatagattctagctgcagcagatacaccctcaaggctgatggaacccagtgcccaagcgggtcgtctggaacaacagtcatctacacttgtgagttcatcagtgcctatggagccagaggcagtgcaaacataaaagtgacattcatctctgtggccaatctaacaataaccccggacccaatttctgtttctgagggacaaaacttttctataaaatgcatcagtgatgtgagtaactatgatgaggtttattggaacacttctgctggaattaaaatataccaaagattttataccacgaggaggtatcttgatggagcagaatcagtactgacagtcaagacctcgaccagggagtggaatggaacctatcactgcatatttagatataagaattcatacagtattgcaaccaaagacgtcattgttcacccgctgcctctaaagctgaacatcatggttgatcctttggaagctactgtttcatgcagtggttcccatcacatcaagtgctgcatagaggaggatggagactacaaagttactttccatatgggttcctcatcccttcctgctgcaaaagaagttaacaaaaaacaagtgtgctacaaacacaatttcaatgcaagctcagtttcctggtgttcaaaaactgttgatgtgtgttgtcactttaccaatgctgctaataattcagtttggagcccatctatgaagctgaatctggttcctggggaaaacatcacatgccaggatcccgtaataggtgtcggagagccggggaaagtcatccagaagctatgccggttctcaaacgttcccagcagccctgagagtcccattggcgggaccatcacttacaaatgtgtaggctcccagtgggaggagaagagaaatgactgcatctctgccccaataaacagtctgctccagatggctaaggctttgatcaagagcccctctcaggatgagatgctccctacatacctgaaggatctttctattagcatagacaaagcggaacatgaaatcagctcttctcctgggagtctgggagccattattaacatccttgatctgctctcaacagttccaacccaagtaaattcagaaatgatgacgcacgtgctctctacggttaatgtcatccttggcaagcccgtcttgaacacctggaaggttttacaacagcaatggaccaatcagagttcacagctactacattcagtggaaagattttcccaagcattacagtcaggagatagccctcctttgtccttctcccaaactaatgtgcagatgagcagcacggtaatcaagtccagccacccagaaacctatcaacagaggtttgttttcccatactttgacctctggggcaatgtggtcattgacaagagctatctagaaaacttgcagtcggattcgtctattgtcaccatggctttcccaactctccaagccatccttgctcaggatatccaggaaaataactttgcagagagcttagtgatgacaaccactgtcagccacaatacgactatgccattcaggatttcaatgacttttaagaacaatagcccttcaggcggcgaaacgaagtgtgtcttctggaacttcaggcttgccaacaacacaggggggtgggacagcagtgggtgctatgttgaagaaggtgatggggacaatgtcacctgtatctgtgaccacctaacatcattctccatcctcatgtcccctgactccccagatcctagttctctcctgggaatactcctggatattatttcttatgttggggtgggcttttccatcttgagcttggcagcctgtctagttgtggaagctgtggtgtggaaatcggtgaccaagaatcggacttcttatatgcgccacacctgcatagtgaatatcgctgcctcccttctggtcgccaacacctggttcattgtggtcgctgccatccaggacaatcgctacatactctgcaagacagcctgtgtggctgccaccttcttcatccacttcttctacctcagcgtcttcttctggatgctgacactgggcctcatgctgttctatcgcctggttttcattctgcatgaaacaagcaggtccactcagaaagccattgccttctgtcttggctatggctgcccacttgccatctcggtcatcacgctgggagccacccagccccgggaagtctatacgaggaagaatgtctgttggctcaactgggaggacaccaaggccctgctggctttcgccatcccagcactgatcattgtggtggtgaacataaccatcactattgtggtcatcaccaagatcctgaggccttccattggagacaagccatgcaagcaggagaagagcagcctgtttcagatcagcaagagcattggggtcctcacaccactcttgggcctcacttggggttttggtctcaccactgtgttcccagggaccaaccttgtgttccatatcatatttgccatcctcaatgtcttccagggattattcattttactctttggatgcctctgggatctgaaggtacaggaagctttgctgaataagttttcattgtcgagatggtcttcacagcactcaaagtcaacatccctgggttcatccacacctgtgttttctatgagttctccaatatcaaggagatttaacaatttgtttggtaaaacaggaacgtataatgtttccaccccagaagcaaccagctcatccctggaaaactcatccagtgcttcttcgttgctcaactaagaacaggataatccaacctacgtgacctcccggggacagtggctgtgcttttaaaaagagatgcttgcaaagcaatggggaacgtgttctcggggcaggtttccgggagcagatgccaaaaagactttttcatagagaagaggctttcttttgtaaagacagaataaaaataattgttatgtttctgtttgttccctccccctcccccttgtgtgataccacatgtgtatagtatttaagtgaaactcaagccctcaaggcccaacttctctgtctatattgtaatatagaatttcgaagagacattttcactttttacacattgggcacaaagataagctttgattaaagtagtaagtaaaaggctacctaggaaatacttcagtgaattctaagaaggaaggaaggaaggaaggaaggaaagaagggagggaaacagggagaaagggaaaaagaagaaaaagagaaagatgaaaataggaacaaataaagacaaacaacattaagggccatattgtaagatttccatgttaatgatctaatataatcactcagtgcaacattgagaatttttttttaatggctcaaaaatggaaactgaaagcaagtcatggggaatgaatactttgggcagtatcttcctgatgtcttcttagctaagaggaggaaaaaaaggctgaaaaaatagggaggaaattccttcatcagaacgacttcaagtggataacaatatttataagaaatgaatggaaggaaatatgatcctcctgagactaactttgtatgttaaggtttgaactaagtgaatgtatctgcagaggaagtattataaagatatgtcattagatccaagtgctgattaaatttttatagtttatcagaaaagccttatattttagtttgttccacattttgaaagcaaaaaatatatatttgatatacccttcaattgccaaatttgatatgttgcactgaagacagaccctgtcatatatttaatggcttcaagcaggtacttctctgtgcattatagaatagattttaataatcttatagcattgtatattattattgctgttgtcactgttattattattgtggatactggcccttggtgtgttgcatagctccctatgtattctctgtttccatctttaagttcccagaccaatatacattaagagttttgcatggtctaaattgtgtttattccaaccacgtggaaagctcctggaaagaaattttacattcggttgttctgtgctcctaatgacacttgaccttgttgaacaaatggcagagcctttcccaaggatttgattgtttgtgaattatctgcatgtgtgcttttttttggtgtgtatttcattaaaaaatataaatatttatgaaaattgcacgcatattagagttaaccatgtactattgatacagcaacgctacattgcaaataaaagtccgatcccaaaaggagaatgagacaaaaatagag

SEQ ID NO: 308994 - DNA, 6111 bp, Homo sapiens
  misc_feature (2)..(2): n is a, c, g, or t
  misc_feature (5)..(5): n is a, c, g, or t
  misc_feature (7)..(7): n is a, c, g, or t
  misc_feature (536)..(536): n is a, c, g, or t
  misc_feature (6111)..(6111): n is a, c, g, or t
gnagngnacagaaggcagttcacctctgctcccgacagcctgggaacccgcaagagccccagcatttgaagtctggtcttgtgaaaccccaccctcctctggctgtgtgattgaatgggatgccctcgaggttcacctcacctgagagggttttgggcagatcagcagtaaggtgttaaattttagaagcctgaaaactccagaagagaaaggccaaccaactcaaacttgaagacatgaaatccccaaggagaaccactttgtgcctcatgtttattgtgatttattcttccaaagctgcactgaactggaattacgagtctactattcatcctttgagtcttcatgaacatgaaccagctggtgaagaggcactgaggcaaaaacgagccgttgccacaaaaagtcctacggctgaagaatacactgttaatattgagatcagttttgaaaatgcatccttcctggatcctatcaaagcctacttgaacagcctcagttttccaattcatgggaataacactgaccaaattacngacattttgagcataaatgtgacaacagtctgcagacctgctggaaatgaaatctggtgctcctgcgagacaggttatgggtggcctcgggaaaggtgtcttcacaatctcatttgtcaagagcgtgacgtcttcctcccagggcaccattgcagttgccttaaagaactgcctcccaatggacctttttgcctgcttcaggaagatgttaccctgaacatgagagtcagactaaatgtaggctttcaagaagacctcatgaacacttcctccgccctctataggtcctacaagaccgacttggaaacagcgttccggaagggttacggaattttaccaggcttcaagggcgtgactgtgacagggttcaagtctggaagtgtggttgtgacatatgaagtcaagactacaccaccatcacttgagttaatacataaagccaatgaacaagttgtacagagcctcaatcagacctacaaaatggactacaactcctttcaagcagttactatcaatgaaagcaatttctttgtcacaccagaaatcatctttgaaggggacacagtcagtctggtgtgtgaaaaggaagttttgtcctccaatgtgtcttggcgctatgaagaacagcagttggaaatccagaacagcagcagattctcgatttacaccgcacttttcaacaacatgacttcggtgtccaagctcaccatccacaacatcactccaggtgatgcaggtgaatatgtttgcaaactgatattagacatttttgaatatgagtgcaagaagaaaatagatgttatgcccatccaaattttggcaaatgaagaaatgaaggtgatgtgcgacaacaatcctgtatctttgaactgctgcagtcagggtaatgttaattggagcaaagtagaatggaagcaggaaggaaaaataaatattccaggaacccctgagacagacatagattctagctgcagcagatacaccctcaaggctgatggaacccagtgcccaagcgggtcgtctggaacaacagtcatctacacttgtgagttcatcagtgcctatggagccagaggcagtgcaaacataaaagtgacattcatctctgtggccaatctaacaataaccccggacccaatttctgtttctgagggacaaaacttttctataaaatgcatcagtgatgtgagtaactatgatgaggtttattggaacacttctgctggaattaaaatataccaaagattttataccacgaggaggtatcttgatggagcagaatcagtactgacagtcaagacctcgaccagggagtggaatggaacctatcactgcatatttagatataagaattcatacagtattgcaaccaaagacgtcattgttcacccgctgcctctaaagctgaacatcatggttgatcctttggaagctactgtttcatgcagtggttcccatcacatcaagtgctgcatagaggaggatggagactacaaagttactttccatatgggttcctcatcccttcctgctgcaaaagaagttaacaaaaaacaagtgtgctacaaacacaatttcaatgcaagctcagtttcctggtgttcaaaaactgttgatgtgtgttgtcactttaccaatgctgctaataattcagtttggagcccatctatgaagctgaatctggttcctggggaaaacatcacatgccaggatcccgtaataggtgtcggagagccggggaaagtcatccagaagctatgccggttctcaaacgttcccagcagccctgagagtcccattggcgggaccatcacttacaaatgtgtaggctcccagtgggaggagaagagaaatgactgcatctctgccccaataaacagtctgctccagatggctaaggctttgatcaagagcccctctcaggatgagatgctccctacatacctgaaggatctttctattagcatagacaaagcggaacatgaaatcagctcttctcctgggagtctgggagccattattaacatccttgatctgctctcaacagttccaacccaagtaaattcagaaatgatgacgcacgtgctctctacggttaatgtcatccttggcaagcccgtcttgaacacctggaaggttttacaacagcaatggaccaatcagagttcacagctactacattcagtggaaagattttcccaagcattacagtcaggagatagccctcctttgtccttctcccaaactaatgtgcagatgagcagcacggtaatcaagtccagccacccagaaacctatcaacagaggtttgttttcccatactttgacctctggggcaatgtggtcattgacaagagctatctagaaaacttgcagtcggattcgtctattgtcaccatggctttcccaactctccaagccatccttgctcaggatatccaggaaaataactttgcagagagcttagtgatgacaaccactgtcagccacaatacgactatgccattcaggatttcaatgacttttaagaacaatagcccttcaggcggcgaaacgaagtgtgtcttctggaacttcaggcttgccaacaacacaggggggtgggacagcagtgggtgctatgttgaagaaggtgatggggacaatgtcacctgtatctgtgaccacctaacatcattctccatcctcatgtcccctgactccccagatcctagttctctcctgggaatactcctggatattatttcttatgttggggtgggcttttccatcttgagcttggcagcctgtctagttgtggaagctgtggtgtggaaatcggtgaccaagaatcggacttcttatatgcgccacacctgcatagtgaatatcgctgcctcccttctggtcgccaacacctggttcattgtggtcgctgccatccaggacaatcgctacatactctgcaagacagcctgtgtggctgccaccttcttcatccacttcttctacctcagcgtcttcttctggatgctgacactgggcctcatgctgttctatcgcctggttttcattctgcatgaaacaagcaggtccactcagaaagccattgccttctgtcttggctatggctgcccacttgccatctcggtcatcacgctgggagccacccagccccgggaagtctatacgaggaagaatgtctgttggctcaactgggaggacaccaaggccctgctggctttcgccatcccagcactgatcattgtggtggtgaacataaccatcactattgtggtcatcaccaagatcctgaggccttccattggagacaagccatgcaagcaggagaagagcagcctgtttcagatcagcaagagcattggggtcctcacaccactcttgggcctcacttggggttttggtctcaccactgtgttcccagggaccaaccttgtgttccatatcatatttgccatcctcaatgtcttccagggattattcattttactctttggatgcctctgggatctgaaggtacaggaagctttgctgaataagttttcattgtcgagatggtcttcacagcactcaaagtcaacatccctgggttcatccacacctgtgttttctatgagttctccaatatcaaggagatttaacaatttgtttggtaaaacaggaacgtataatgtttccaccccagaagcaaccagctcatccctggaaaactcatccagtgcttcttcgttgctcaactaagaacaggataatccaacctacgtgacctcccggggacagtggctgtgcttttaaaaagagatgcttgcaaagcaatggggaacgtgttctcggggcaggtttccgggagcagatgccaaaaagactttttcatagagaagaggctttcttttgtaaagacagaataaaaataattgttatgtttctgtttgttccctccccctcccccttgtgtgataccacatgtgtatagtatttaagtgaaactcaagccctcaaggcccaacttctctgtctatattgtaatatagaatttcgaagagacattttcactttttacacattgggcacaaagataagctttgattaaagtagtaagtaaaaggctacctaggaaatacttcagtgaattctaagaaggaaggaaggaaggaaggaaggaaagaagggagggaaacagggagaaagggaaaaagaagaaaaagagaaagatgaaaataggaacaaataaagacaaacaacattaagggccatattgtaagatttccatgttaatgatctaatataatcactcagtgcaacattgagaatttttttttaatggctcaaaaatggaaactgaaagcaagtcatggggaatgaatactttgggcagtatcttcctgatgtcttcttagctaagaggaggaaaaaaaggctgaaaaaatagggaggaaattccttcatcagaacgacttcaagtggataacaatatttataagaaatgaatggaaggaaatatgatcctcctgagactaactttgtatgttaaggtttgaactaagtgaatgtatctgcagaggaagtattataaagatatgtcattagatccaagtgctgattaaatttttatagtttatcagaaaagccttatattttagtttgttccacattttgaaagcaaaaaatatatatttgatatacccttcaattgccaaatttgatatgttgcactgaagacagaccctgtcatatatttaatggcttcaagcaggtacttctctgtgcattatagaatagattttaataatcttatagcattgtatattattattgctgttgtcactgttattattattgtggatactggcccttggtgtgttgcatagctccctatgtattctctgtttccatctttaagttcccagaccaatatacattaagagttttgcatggtctaaattgtgtttattccaaccacgtggaaagctcctggaaagaaattttacattcggttgttctgtgctcctaatgacacttgaccttgttgaacaaatggcagagcctttcccaaggatttgattgtttgtgaattatctgcatgtgtgcttttttttggtgtgtatttcattaaaaaatataaatatttatgaaaaaaaaaaaaaaaaaaaaaaaaaaaaaaaaaaaaaaaaaaaaaaaggggggggccccaaaaaattaccccgcggggggccccatttgccaccccttttttttgcaaagggggcccccaaaggggggccgagcgaataaaaacgcagagacagaggggcgccgaggctgtaaaaacacagcgtggcgtggcgcgggggaacgcacgcggctagtgtgggagaccttcttgggggaaagagaacccctcattcgtggtgtggcgtggcagcctatttcggcgggcacaaccctcccctcgaagagagattaagacgccccggaggggacaaatacacatctgacggtgttttggtgctacacccaacgcgaaatatgcatcgcggcaaaaaatttggtcccaggaaattatttagaacattcttaccgaccgtgtataataaan

SEQ ID NO: 308995 - DNA, 3652 bp, Homo sapiens
agttccgattacagaagtcaggttcatgtggaaagcagagaggggctttggaaaatcaagggcaaaattaagaaattgggtagttctgaaaaggtgacggaaagtaaaggggaaaacatcacatgccaggatcccgtaataggtgtcggagagccggggaaagtcatccagaagctatgccggttctcaaacgttcccagcagccctgagagtcccattggcgggaccatcacttacaaatgtgtaggctcccagtgggaggagaagagaaatgactgcatctctgccccaataaacagtctgctccagatggctaaggctttgatcaagagcccctctcaggatgagatgctccctacatacctgaaggatctttctattagcatagacaaagcggaacatgaaatcagctcttctcctgggagtctgggagccattattaacatccttgatctgctctcaacagttccaacccaagtaaattcagaaatgatgacgcacgtgctctctacggttaatgtcatccttggcaagcccgtcttgaacacctggaaggttttacaacagcaatggaccaatcagagttcacagctactacattcagtggaaagattttcccaagcattacagtcaggagatagccctcctttgtccttctcccaaactaatgtgcagatgagcagcacggtaatcaagtccagccacccagaaacctatcaacagaggtttgttttcccatactttgacctctggggcaatgtggtcattgacaagagctatctagaaaacttgcagtcggattcgtctattgtcaccatggctttcccaactctccaagccatccttgctcaggatatccaggaaaataactttgcagagagcttagtgatgacaaccactgtcagccacaatacgactatgccattcaggatttcaatgacttttaagaacaatagcccttcaggcggcgaaacgaagtgtgtcttctggaacttcaggcttgccaacaacacaggggggtgggacagcagtgggtgctatgttgaagaaggtgatggggacaatgtcacctgtatctgtgaccacctaacatcattctccatcctcatgtcccctgactccccagatcctagttctctcctgggaatactcctggatattatttcttatgttggggtgggcttttccatcttgagcttggcagcctgtctagttgtggaagctgtggtgtggaaatcggtgaccaagaatcggacttcttatatgcgccacacctgcatagtgaatatcgctgcctcccttctggtcgccaacacctggttcattgtggtcgctgccatccaggacaatcgctacatactctgcaagacagcctgtgtggctgccaccttcttcatccacttcttctacctcagcgtcttcttctggatgctgacactgggcctcatgctgttctatcgcctggttttcattctgcatgaaacaagcaggtccactcagaaagccattgccttctgtcttggctatggctgcccacttgccatctcggtcatcacgctgggagccacccagccccgggaagtctatacgaggaagaatgtctgttggctcaactgggaggacaccaaggccctgctggctttcgccatcccagcactgatcattgtggtggtgaacataaccatcactattgtggtcatcaccaagatcctgaggccttccattggagacaagccatgcaagcaggagaagagcagcctgtttcagatcagcaagagcattggggtcctcacaccactcttgggcctcacttggggttttggtctcaccactgtgttcccagggaccaaccttgtgttccatatcatatttgccatcctcaatgtcttccagggattattcattttactctttggatgcctctgggatctgaaggtacaggaagctttgctgaataagttttcattgtcgagatggtcttcacagcactcaaagtcaacatccctgggttcatccacacctgtgttttctatgagttctccaatatcaaggagatttaacaatttgtttggtaaaacaggaacgtataatgtttccaccccagaagcaaccagctcatccctggaaaactcatccagtgcttcttcgttgctcaactaagaacaggataatccaacctacgtgacctcccggggacagtggctgtgcttttaaaaagagatgcttgcaaagcaatggggaacgtgttctcggggcaggtttccgggagcagatgccaaaaagactttttcatagagaagaggctttcttttgtaaagacagaataaaaataattgttatgtttctgtttgttccctccccctcccccttgtgtgataccacatgtgtatagtatttaagtgaaactcaagccctcaaggcccaacttctctgtctatattgtaatatagaatttcgaagagacattttcactttttacacattgggcacaaagataagctttgattaaagtagtaagtaaaaggctacctaggaaatacttcagtgaattctaagaaggaaggaaggaaggaaggaaggaaagaagggagggaaacagggagaaagggaaaaagaagaaaaagagaaagatgaaaataggaacaaataaagacaaacaacattaagggccatattgtaagatttccatgttaatgatctaatataatcactcagtgcaacattgagaatttttttttaatggctcaaaaatggaaactgaaagcaagtcatggggaatgaatactttgggcagtatcttcctgatgtcttcttagctaagaggaggaaaaaaaggctgaaaaaatagggaggaaattccttcatcagaacgacttcaagtggataacaatatttataagaaatgaatggaaggaaatatgatcctcctgagactaactttgtatgttaaggtttgaactaagtgaatgtatctgcagaggaagtattataaagatatgtcattagatccaagtgctgattaaatttttatagtttatcagaaaagccttatattttagtttgttccacattttgaaagcaaaaaatatatatttgatatacccttcaattgccaaatttgatatgttgcactgaagacagaccctgtcatatatttaatggcttcaagcaggtacttctctgtgcattatagaatagattttaataatcttatagcattgtatattattattgctgttgtcactgttattattattgtggatactggcccttggtgtgttgcatagctccctatgtattctctgtttccatctttaagttcccagaccaatatacattaagagttttgcatggtctaaattgtgtttattccaaccacgtggaaagctcctggaaagaaattttacattcggttgttctgtgctcctaatgacacttgaccttgttgaacaaatggcagagcctttcccaaggatttgattgtttgtgaattatctgcatgtgtgcttttttttggtgtgtatttcattaaaaaatataaatatttatgaaaattgcacgcatattagagttaaccatgtactattgatacagcaacgctacattgcaaataaaagtccgatcccaaaaggagaatgagacaaaaatagag

SEQ ID NO: 308996 - DNA, 5716 bp, Homo sapiens
  misc_feature (2)..(2): n is a, c, g, or t
  misc_feature (5)..(5): n is a, c, g, or t
  misc_feature (7)..(7): n is a, c, g, or t
  misc_feature (536)..(536): n is a, c, g, or t
gnagngnacagaaggcagttcacctctgctcccgacagcctgggaacccgcaagagccccagcatttgaagtctggtcttgtgaaaccccaccctcctctggctgtgtgattgaatgggatgccctcgaggttcacctcacctgagagggttttgggcagatcagcagtaaggtgttaaattttagaagcctgaaaactccagaagagaaaggccaaccaactcaaacttgaagacatgaaatccccaaggagaaccactttgtgcctcatgtttattgtgatttattcttccaaagctgcactgaactggaattacgagtctactattcatcctttgagtcttcatgaacatgaaccagctggtgaagaggcactgaggcaaaaacgagccgttgccacaaaaagtcctacggctgaagaatacactgttaatattgagatcagttttgaaaatgcatccttcctggatcctatcaaagcctacttgaacagcctcagttttccaattcatgggaataacactgaccaaattacngacattttgagcataaatgtgacaacagtctgcagacctgctggaaatgaaatctggtgctcctgcgagacaggttatgggtggcctcgggaaaggtgtcttcacaatctcatttgtcaagagcgtgacgtcttcctcccagggcaccattgcagttgccttaaagaactgcctcccaatggacctttttgcctgcttcaggaagatgttaccctgaacatgagagtcagactaaatgtaggctttcaagaagacctcatgaacacttcctccgccctctataggtcctacaagaccgacttggaaacagcgttccggaagggttacggaattttaccaggcttcaagggcgtgactgtgacagggttcaagtctggaagtgtggttgtgacatatgaagtcaagactacaccaccatcacttgagttaatacataaagccaatgaacaagttgtacagagcctcaatcagacctacaaaatggactacaactcctttcaagcagttactatcaatgaaagcaatttctttgtcacaccagaaatcatctttgaaggggacacagtcagtctggtgtgtgaaaaggaagttttgtcctccaatgtgtcttggcgctatgaagaacagcagttggaaatccagaacagcagcagattctcgatttacaccgcacttttcaacaacatgacttcggtgtccaagctcaccatccacaacatcactccaggtgatgcaggtgaatatgtttgcaaactgatattagacatttttgaatatgagtgcaagaagaaaatagatgttatgcccatccaaattttggcaaatgaagaaatgaaggtgatgtgcgacaacaatcctgtatctttgaactgctgcagtcagggtaatgttaattggagcaaagtagaatggaagcaggaaggaaaaataaatattccaggaacccctgagacagacatagattctagctgcagcagatacaccctcaaggctgatggaacccagtgcccaagcgggtcgtctggaacaacagtcatctacacttgtgagttcatcagtgcctatggagccagaggcagtgcaaacataaaagtgacattcatctctgtggccaatctaacaataaccccggacccaatttctgtttctgagggacaaaacttttctataaaatgcatcagtgatgtgagtaactatgatgaggtttattggaacacttctgctggaattaaaatataccaaagattttataccacgaggaggtatcttgatggagcagaatcagtactgacagtcaagacctcgaccagggagtggaatggaacctatcactgcatatttagatataagaattcatacagtattgcaaccaaagacgtcattgttcacccgctgcctctaaagctgaacatcatggttgatcctttggaagctactgtttcatgcagtggttcccatcacatcaagtgctgcatagaggaggatggagactacaaagttactttccatatgggttcctcatcccttcctgctgcaaaagaagttaacaaaaaacaagtgtgctacaaacacaatttcaatgcaagctcagtttcctggtgttcaaaaactgttgatgtgtgttgtcactttaccaatgctgctaataattcagtttggagcccatctatgaagctgaatctggttcctggggaaaacatcacatgccaggatcccgtaataggtgtcggagagccggggaaagtcatccagaagctatgccggttctcaaacgttcccagcagccctgagagtcccattggcgggaccatcacttacaaatgtgtaggctcccagtgggaggagaagagaaatgactgcatctctgccccaataaacagtctgctccagatggctaaggctttgatcaagagcccctctcaggatgagatgctccctacatacctgaaggatctttctattagcatagacaaagcggaacatgaaatcagctcttctcctgggagtctgggagccattattaacatccttgatctgctctcaacagttccaacccaagtaaattcagaaatgatgacgcacgtgctctctacggttaatgtcatccttggcaagcccgtcttgaacacctggaaggttttacaacagcaatggaccaatcagagttcacagctactacattcagtggaaagattttcccaagcattacagtcaggagatagccctcctttgtccttctcccaaactaatgtgcagatgagcagcacggtaatcaagtccagccacccagaaacctatcaacagaggtttgttttcccatactttgacctctggggcaatgtggtcattgacaagagctatctagaaaacttgcagtcggattcgtctattgtcaccatggctttcccaactctccaagccatccttgctcaggatatccaggaaaataactttgcagagagcttagtgatgacaaccactgtcagccacaatacgactatgccattcaggatttcaatgacttttaagaacaatagcccttcaggcggcgaaacgaagtgtgtcttctggaacttcaggcttgccaacaacacaggggggtgggacagcagtgggtgctatgttgaagaaggtgatggggacaatgtcacctgtatctgtgaccacctaacatcattctccatcctcatgtcccctgactccccagatcctagttctctcctgggaatactcctggatattatttcttatgttggggtgggcttttccatcttgagcttggcagcctgtctagttgtggaagctgtggtgtggaaatcggtgaccaagaatcggacttcttatatgcgccacacctgcatagtgaatatcgctgcctcccttctggtcgccaacacctggttcattgtggtcgctgccatccaggacaatcgctacatactctgcaagacagcctgtgtggctgccaccttcttcatccacttcttctacctcagcgtcttcttctggatgctgacactgggcctcatgctgttctatcgcctggttttcattctgcatgaaacaagcaggtccactcagaaagccattgccttctgtcttggctatggctgcccacttgccatctcggtcatcacgctgggagccacccagccccgggaagtctatacgaggaagaatgtctgttggctcaactgggaggacaccaaggccctgctggctttcgccatcccagcactgatcattgtggtggtgaacataaccatcactattgtggtcatcaccaagatcctgaggccttccattggagacaagccatgcaagcaggagaagagcagcctgtttcagatcagcaagagcattggggtcctcacaccactcttgggcctcacttggggttttggtctcaccactgtgttcccagggaccaaccttgtgttccatatcatatttgccatcctcaatgtcttccagggattattcattttactctttggatgcctctgggatctgaaggtacaggaagctttgctgaataagttttcattgtcgagatggtcttcacagcactcaaagtcaacatccctgggttcatccacacctgtgttttctatgagttctccaatatcaaggagatttaacaatttgtttggtaaaacaggaacgtataatgtttccaccccagaagcaaccagctcatccctggaaaactcatccagtgcttcttcgttgctcaactaagaacaggataatccaacctacgtgacctcccggggacagtggctgtgcttttaaaaagagatgcttgcaaagcaatggggaacgtgttctcggggcaggtttccgggagcagatgccaaaaagactttttcatagagaagaggctttcttttgtaaagacagaatacacatgtgtatagtatttaagtgaaactcaagccctcaaggcccaacttctctgtctatattgtaatatagaatttcgaagagacattttcactttttacacattgggcacaaagataagctttgattaaagtagtaagtaaaaggctacctaggaaatacttcagtgaattctaagaaggaaggaaggaaggaaggaaggaaagaagggagggaaacagggagaaagggaaaaagaagaaaaagagaaagatgaaaataggaacaaataaagacaaacaacattaagggccatattgtaagatttccatgttaatgatctaatataatcactcagtgcaacattgagaatttttttttaatggctcaaaaatggaaactgaaagcaagtcatggggaatgaatactttgggcagtatcttcctgatgtcttcttagctaagaggaggaaaaaaaggctgaaaaaatagggaggaaattccttcatcagaacgacttcaagtggataacaatatttataagaaatgaatggaaggaaatatgatcctcctgagactaactttgtatgttaaggtttgaactaagtgaatgtatctgcagaggaagtattataaagatatgtcattagatccaagtgctgattaaatttttatagtttatcagaaaagccttatattttagtttgttccacattttgaaagcaaaaaatatatatttgatatacccttcaattgccaaatttgatatgttgcactgaagacagaccctgtcatatatttaatggcttcaagcaggtacttctctgtgcattatagaatagattttaataatcttatagcattgtatattattattgctgttgtcactgttattattattgtggatactggcccttggtgtgttgcatagctccctatgtattctctgtttccatctttaagttcccagaccaatatacattaagagttttgcatggtctaaattgtgtttattccaaccacgtggaaagctcctggaaagaaattttacattcggttgttctgtgctcctaatgacacttgaccttgttgaacaaatggcagagcctttcccaaggatttgattgtttgtgaattatctgcatgtgtgcttttttttggtgtgtatttcattaaaaaatataaatatttatgaaaattgcacgcatattagagttaaccatgtactattgatacagcaacgctacattgcaaataaaagtccgatcccaaaaggagaatgagacaaaaatagag

SEQ ID NO: 308997 - DNA, 4332 bp, Homo sapiens
  misc_feature (2)..(2): n is a, c, g, or t
  misc_feature (5)..(5): n is a, c, g, or t
  misc_feature (7)..(7): n is a, c, g, or t
  misc_feature (536)..(536): n is a, c, g, or t
  misc_feature (4151)..(4151): n is a, c, g, or t
  misc_feature (4302)..(4302): n is a, c, g, or t
gnagngnacagaaggcagttcacctctgctcccgacagcctgggaacccgcaagagccccagcatttgaagtctggtcttgtgaaaccccaccctcctctggctgtgtgattgaatgggatgccctcgaggttcacctcacctgagagggttttgggcagatcagcagtaaggtgttaaattttagaagcctgaaaactccagaagagaaaggccaaccaactcaaacttgaagacatgaaatccccaaggagaaccactttgtgcctcatgtttattgtgatttattcttccaaagctgcactgaactggaattacgagtctactattcatcctttgagtcttcatgaacatgaaccagctggtgaagaggcactgaggcaaaaacgagccgttgccacaaaaagtcctacggctgaagaatacactgttaatattgagatcagttttgaaaatgcatccttcctggatcctatcaaagcctacttgaacagcctcagttttccaattcatgggaataacactgaccaaattacngacattttgagcataaatgtgacaacagtctgcagacctgctggaaatgaaatctggtgctcctgcgagacaggttatgggtggcctcgggaaaggtgtcttcacaatctcatttgtcaagagcgtgacgtcttcctcccagggcaccattgcagttgccttaaagaactgcctcccaatggacctttttgcctgcttcaggaagatgttaccctgaacatgagagtcagactaaatgtaggctttcaagaagacctcatgaacacttcctccgccctctataggtcctacaagaccgacttggaaacagcgttccggaagggttacggaattttaccaggcttcaagggcgtgactgtgacagggttcaagtctggaagtgtggttgtgacatatgaagtcaagactacaccaccatcacttgagttaatacataaagccaatgaacaagttgtacagagcctcaatcagacctacaaaatggactacaactcctttcaagcagttactatcaatgaaagcaatttctttgtcacaccagaaatcatctttgaaggggacacagtcagtctggtgtgtgaaaaggaagttttgtcctccaatgtgtcttggcgctatgaagaacagcagttggaaatccagaacagcagcagattctcgatttacaccgcacttttcaacaacatgacttcggtgtccaagctcaccatccacaacatcactccaggtgatgcaggtgaatatgtttgcaaactgatattagacatttttgaatatgagtgcaagaagaaaatagatgttatgcccatccaaattttggcaaatgaagaaatgaaggtgatgtgcgacaacaatcctgtatctttgaactgctgcagtcagggtaatgttaattggagcaaagtagaatggaagcaggaaggaaaaataaatattccaggaacccctgagacagacatagattctagctgcagcagatacaccctcaaggctgatggaacccagtgcccaagcgggtcgtctggaacaacagtcatctacacttgtgagttcatcagtgcctatggagccagaggcagtgcaaacataaaagtgacattcatctctgtggccaatctaacaataaccccggacccaatttctgtttctgagggacaaaacttttctataaaatgcatcagtgatgtgagtaactatgatgaggtttattggaacacttctgctggaattaaaatataccaaagattttataccacgaggaggtatcttgatggagcagaatcagtactgacagtcaagacctcgaccagggagtggaatggaacctatcactgcatatttagatataagaattcatacagtattgcaaccaaagacgtcattgttcacccgctgcctctaaagctgaacatcatggttgatcctttggaagctactgtttcatgcagtggttcccatcacatcaagtgctgcatagaggaggatggagactacaaagttactttccatatgggttcctcatcccttcctgctgcaaaagaagttaacaaaaaacaagtgtgctacaaacacaatttcaatgcaagctcagtttcctggtgttcaaaaactgttgatgtgtgttgtcactttaccaatgctgctaataattcagtttggagcccatctatgaagctgaatctggttcctggggaaaacatcacatgccaggatcccgtaataggtgtcggagagccggggaaagtcatccagaagctatgccggttctcaaacgttcccagcagccctgagagtcccattggcgggaccatcacttacaaatgtgtaggctcccagtgggaggagaagagaaatgactgcatctctgccccaataaacagtctgctccagatggctaaggctttgatcaagagcccctctcaggatgagatgctccctacatacctgaaggatctttctattagcatagacaaagcggaacatgaaatcagctcttctcctgggagtctgggagccattattaacatccttgatctgctctcaacagttccaacccaagtaaattcagaaatgatgacgcacgtgctctctacggttaatgtcatccttggcaagcccgtcttgaacacctggaaggttttacaacagcaatggaccaatcagagttcacagctactacattcagtggaaagattttcccaagcattacagtcaggagatagccctcctttgtccttctcccaaactaatgtgcagatgagcagcacggtaatcaagtccagccacccagaaacctatcaacagaggtttgttttcccatactttgacctctggggcaatgtggtcattgacaagagctatctagaaaacttgcagtcggattcgtctattgtcaccatggctttcccaactctccaagccatccttgctcaggatatccaggaaaataactttgcagagagcttagtgatgacaaccactgtcagccacaatacgactatgccattcaggatttcaatgacttttaagaacaatagcccttcaggcggcgaaacgaagtgtgtcttctggaacttcaggcttgccaacaacacaggggggtgggacagcagtgggtgctatgttgaagaaggtgatggggacaatgtcacctgtatctgtgaccacctaacatcattctccatcctcatgtcccctgactccccagatcctagttctctcctgggaatactcctggatattatttcttatgttggggtgggcttttccatcttgagcttggcagcctgtctagttgtggaagctgtggtgtggaaatcggtgaccaagaatcggacttcttatatgcgccacacctgcatagtgaatatcgctgcctcccttctggtcgccaacacctggttcattgtggtcgctgccatccaggacaatcgctacatactctgcaagacagcctgtgtggctgccaccttcttcatccacttcttctacctcagcgtcttcttctggatgctgacactgggcctcatgctgttctatcgcctggttttcattctgcatgaaacaagcaggtccactcagaaagccattgccttctgtcttggctatggctgcccacttgccatctcggtcatcacgctgggagccacccagccccgggaagtctatacgaggaagaatgtctgttggctcaactgggaggacaccaaggccctgctggctttcgccatcccagcactgatcattgtggtggtgaacataaccatcactattgtggtcatcaccaagatcctgaggccttccattggagacaagccatgcaagcaggagaagagcagcctgtttcagatcagcaagagcattggggtcctcacaccactcttgggcctcacttggggttttggtctcaccactgtgttcccagggaccaaccttgtgttccatatcatatttgccatcctcaatgtcttccagggattattcattttactctttggatgcctctgggatctgaaggtacaggaagctttgctgaataagttttcattgtcgagatggtcttcacagcactcaaagtcaacatccctggaagctcgtgccgaattcggcagggantccatccctgcctctactggcgctgccaaggctgtgggcaaggtcatccctgagctgaacgggaagctcactggcatggccttccgtgtccccactgccaacgtgtcagtggtggacctgacctgccgtctagaaaaacctgccaaatatngtgccatcaagaaggtggtgaagcaggcgt

SEQ ID NO: 308998 - DNA, 1088 bp, Homo sapiens
  misc_feature (2)..(2): n is a, c, g, or t
  misc_feature (5)..(5): n is a, c, g, or t
  misc_feature (7)..(7): n is a, c, g, or t
  misc_feature (536)..(536): n is a, c, g, or t
gnagngnacagaaggcagttcacctctgctcccgacagcctgggaacccgcaagagccccagcatttgaagtctggtcttgtgaaaccccaccctcctctggctgtgtgattgaatgggatgccctcgaggttcacctcacctgagagggttttgggcagatcagcagtaaggtgttaaattttagaagcctgaaaactccagaagagaaaggccaaccaactcaaacttgaagacatgaaatccccaaggagaaccactttgtgcctcatgtttattgtgatttattcttccaaagctgcactgaactggaattacgagtctactattcatcctttgagtcttcatgaacatgaaccagctggtgaagaggcactgaggcaaaaacgagccgttgccacaaaaagtcctacggctgaagaatacactgttaatattgagatcagttttgaaaatgcatccttcctggatcctatcaaagcctacttgaacagcctcagttttccaattcatgggaataacactgaccaaattacngacattttgagcataaatgtgacaacagataaactactgggtcctcttccctgtgtcctcctcccttggtatatcaatggacacaacaaggactggttcaagatattaagatgggatgacttcaagaggcttcaccatcttaaaaacttgggttaacaagcttctcaattaaaatgcaattgaccttggaaagtttaatttatccttccagaaagactggtcattcacacatagagggggtgaatcttttctgatagtgatctatgaaacaggtttgacaaaagtggatacttcaatgtggcagagaaagcctcaggctcatggacctcaggaccagcagggaacagctaagaggagttggcctaaaagaggaagtgaatgggatgggtgggcaatgaaggttaggcctactgaccatggcactaatgtctaagcatccaaactttcaccatcttcctttttccatccttccctcgcctcattcttccaacagcctaccttatgatccttttttagtaatggcaaataaaactgaggatatttaaaaccgga

SEQ ID NO: 308999 - DNA, 440 bp, Homo sapiens
agaataaatgattggatgtcttgagacagactgtctgagctcctgagtatcagagcaatcttttacttagtaggcaagtgaaatgactcaccgagacggatgtgtgattctgtgacttcacagccttcctgaatgaagcctctatcagtaaactctgcagccagaggtttcttattttaaatggtgaccaaaggtttgcttggtggtttgtatgatgcttgtcataaagtgatcccaagatatggccaggtccttcataataaactactgggtcctcttcccttgggcagataaactactgggtcctcttccctgtgtcctcctcccttggtatatcaatggacacaacaaggactggttcaagatattagtaagtaccagatacccttctctttggcattataggtcaggaaataggaaacaggtacatgcctgcatca

SEQ ID NO: 309000 - DNA, 474 bp, Homo sapiens
cctagacatttccctgagtaaattttttgcacatttcatctagtctacttctcggaggacccaggctgacatagataggaattacttcttcagaaatctaatgcccacagttaacaaaatagacagaagataattttacctagtgtgattaggaatatgtggtttttactctgcttcagatcttttgatacacctatttctcgactttgatatatgacattcatcttgctttatttttcagttccggaagggttacggaattttaccaggcttcaagggcgtgactgtgacagggttcaagtaagaatactttaatttgatcatttctaatttatggctgggatccatatggtagtgaaggaggtaaaccccctagagaggcattattcatgtggaatcctcagcaggagcagtttggtagaggtgaaaaaagtacctcaccccttacagatgtacctgtttaaaagaaagaga

SEQ ID NO: 309001 - DNA, 409 bp, Homo sapiens
aggggctttggaaaatcaagggcaaaattaagaaattgggtagttctgaaaaggtgacggaaagtaaaggtaaatgtgaattcaaacatcaaaattctaccttggcctgaccgtatttctactatattgtctcttccttgcaattatccctttatttcaatgtttccaacacaggggaaaacatcacatgccaggatcccgtaataggtgtcggagagccggggaaagtcatccagaagctatgccggttctcaaacgttcccagcagccctgagagtcccattggcgggaccatcacttacaaatgtgtaggctcccagtgggaggagaagagaaatgactgcatctctgccccaataaacagtctgctccagatggctaaggtgatccttaaagcttccactctgag

SEQ ID NO: 309002 - DNA, 424 bp, Homo sapiens
aaattctaccttggcctgaccgtatttctactatattgtctcttccttgcaattatccctttatttcaatgtttccaacacaggggaaaacatcacatgccaggatcccgtaataggtgtcggagagccggggaaagtcatccagaagctatgccggttctcaaacgttcccagcagccctgagagtcccattggcgggaccatcacttacaaatgtgtaggctcccagtgggaggagaagagaaatgactgcatctctgccccaataaacagtctgctccagatggctaaggtgatccttaaagcttccactctgagctcttggtggggcgatctatctggctgatcatatttctcagcacttaggaaaatgggtttggtgctgctttgtgttgctccaaaactacttttatttgtgtatttc

SEQ ID NO: 309003 - DNA, 614 bp, Homo sapiens
actggtatcagagcaatgtagtcttgagcaagacaactgttttccgtatagatggtattaaaaacttcccaatattttaccgtgaagtacttcttaattaattttaaagtaataaattttctttggccttatctaaaaatccatgatcctgtttatgttccacttaaaataatacactaattcccttgcttttcattagtaggttgaaatttgaataagcagcaggaggtggagcctcagcttagcctgaggtgaacaatgagcacatacagtggtttgcagggcaaacccactagaagcctatttcctgaaaatagactgaaaatccttgtaggactaaactcatccttagggaatagagccaggtacagcaagtctggtgcagttgcaaacctttagtcttccaaagggaaaatcaattctatgtgaagtctgttacttggattttatatccaggccagcagtacaccctcagccccttcttctctccaggtagaccacggtacaagacattaagctaaagaactcaataggattcttaggtcatgtaggataaacttccttctcaacccttttatcttcaaatattaatgctaagagggtagcctggagct

SEQ ID NO: 309004 - DNA, 2420 bp, Homo sapiens
atcaaggtctatcttcaggttccgaagagatttaaagggcttttttcccttctgcgtatcgtcttctatatattttattagtgtcaaggcttttctgtgaaggacaagtagaaactgtgcaaggaaagtactgctgagaaaattaaaccaggcctacactcttttatctttggaagacctttctacactagtgtgcaagaacgagatgttctaatgactttttaaatgtgtaacttaataagcctattccatcacaatcatgatcgctggtaaagtagctcagtggtgtggggaaacgttcccctggatcatactccagaattctgctctcagcaattgcagttaagtaagttacactacagttctcacaagagcctgtgaggggatgtcaggtgcatcattacattgggtgtctcttttcctagatttatgcttttgggatacagacctatgtttacaatataataaatattattgctatcttttaaagatataataataggatgtaaacttgaccacaactactgtttttttgaaatacatgattcatggtttacatgtgtcaaggtgaaatctgagttggcttttacagatagttgactttctatcttttggcattctttggtgtgtagaattactgtaatacttctgcaatcaactgaaaactagagcctttaaatgatttcaattccacagaaagaaagtgagcttgaacataggatgagctttagaaagaaaattgatcaagcagatgtttaattggaattgattattagatcctactttgtggatttagtccctgggattcagtctgtagaaatgtctaatagttctctatagtccttgttcctggtgaaccacagttagggtgttttgtttattttattgttcttgctattgttgatattctatgtagttgagctctgtaaaaggaaattgtattttatgttttagtaattgttgccaactttttaaattaattttcattatttttgagccaaattgaaatgtgcacctcctgtgccttttttctccttagaaaatctaattacttggaacaagttcagatttcactggtcagtcattttcatcttgttttcttcttgctaagtcttaccatgtacctgctttggcaatcattgcaactctgagattataaaatgccttagagaatatactaactaataagatctttttttcagaaacagaaaatagttccttgagtacttccttcttgcatttctgcctatgtttttgaagttgttgctgtttgcctgcaataggctataaggaatagcaggagaaattttactgaagtgctgttttcctaggtgctactttggcagagctaagttatcttttgttttcttaatgcgtttggaccattttgctggctataaaataactgattaatataattctaacacaatgttgacattgtagttacacaaacacaaataaatattttatttaaaattctggaagtaatataaaagggaaaatatatttataagaaagggataaaggtaatagagcccttctgccccccacccaccaaatttacacaacaaaatgacatgttcgaatgtgaaaggtcataatagctttcccatcatgaatcagaaagatgtggacagcttgatgttttagacaaccactgaactagatgactgttgtactgtagctcagtcatttaaaaaatatataaatactaccttgtagtgtcccatactgtgttttttacatggtagattcttatttaagtgctaactggttattttctttggctggtttattgtactgttatacagaatgtaagttgtacagtgaaataagttattaaagcatgtgtaaacattgttatatatcttttctcctaaatggagaattttgaataaaatatatttgaaattttaaaaacacaaaacaaaaaacacacaaacccaaaccccacacacaaacacaaacacaacaaaacagcgcggccctcctcataccacactcccacacaaaggccaccaaaccaccacaccccacccaaactatttcttctaaaacaatacgaaatcaccacataatattagaatatatctcaaatcaatatacaacacaaacatattcacaaaacaatgcataaactacaacaactataaccatcctataaaaacactctgcaacacaactatacaaaactattttatcatagcgagcacacaacaaatcgcagatttactaatggctgaccaccaatactttgtggaacccaaactacattaaacatcagaccacgacatatataaaacagctctctatcagggactcaataatatacaacaatgtcactcagagaggatacaaaagaggcgtccaacaaccacatagagctattatattgaattgactaggttgtcgcgacagcc

SEQ ID NO: 309005 - DNA, 2561 bp, Homo sapiens
  misc_feature (2550)..(2550): n is a, c, g, or t
tcagaacattatgcctttttctgactccagcagagagaaaatgctccaggttatgtgaagcagaatcatcatttaaatatgagtcagggctctttgtacaaggcctgctaaaggattcaactggaagctttgtgctgcctttccggcaagtcatgtatgctccatatcccaccacacacatagatgtggatgtcaatactgtgaagcagatgccaccctgtcatgaacatatttataatcagcgtagatacatgagatccgagctgacagccttctggagagccacttcagaagaagacatggctcaggatacgatcatctacactgacgaaagctttactcctgatttgaatatttttcaagatgtcttacacagagacactctagtgaaagccttcctggatcaggtctttcagctgaaacctggcttatctctcagaagtactttccttgcacagtttctacttgtccttcacagaaaagccttgacactaataaaatatatagaagacgatacgcagaagggaaaaaagccctttaaatctcttcggaacctgaagatagaccttgatttaacagcagagggcgatcttaacataataatggctctggctgagaaaattaaaccaggcctacactcttttatctttggaagacctttctacactagtgtgcaagaacgagatgttctaatgactttttaaatgtgtaacttaataagcctattccatcacaatcatgatcgctggtaaagtagctcagtggtgtggggaaacgttcccctggatcatactccagaattctgctctcagcaattgcagttaagtaagttacactacagttctcacaagagcctgtgaggggatgtcaggtgcatcattacattgggtgtctcttttcctagatttatgcttttgggatacagacctatgtttacaatataataaatattattgctatcttttaaagatataataataggatgtaaacttgaccacaactactgtttttttgaaatacatgattcatggtttacatgtgtcaaggtgaaatctgagttggcttttacagatagttgactttctatcttttggcattctttggtgtgtagaattactgtaatacttctgcaatcaactgaaaactagagcctttaaatgatttcaattccacagaaagaaagtgagcttgaacataggatgagctttagaaagaaaattgatcaagcagatgtttaattggaattgattattagatcctactttgtggatttagtccctgggattcagtctgtagaaatgtctaatagttctctatagtccttgttcctggtgaaccacagttagggtgttttgtttattttattgttcttgctattgttgatattctatgtagttgagctctgtaaaaggaaattgtattttatgttttagtaattgttgccaactttttaaattaattttcattatttttgagccaaattgaaatgtgcacctcctgtgccttttttctccttagaaaatctaattacttggaacaagttcagatttcactggtcagtcattttcatcttgttttcttcttgctaagtcttaccatgtacctgctttggcaatcattgcaactctgagattataaaatgccttagagaatatactaactaataagatctttttttcagaaacagaaaatagttccttgagtacttccttcttgcatttctgcctatgtttttgaagttgttgctgtttgcctgcaataggctataaggaatagcaggagaaattttactgaagtgctgttttcctaggtgctactttggcagagctaagttatcttttgttttcttaatgcgtttggaccattttgctggctataaaataactgattaatataattctaacacaatgttgacattgtagttacacaaacacaaataaatattttatttaaaattctggaagtaatataaaagggaaaatatatttataagaaagggataaaggtaatagagcccttctgccccccacccaccaaatttacacaacaaaatgacatgttcgaatgtgaaaggtcataatagctttcccatcatgaatcagaaagatgtggacagcttgatgttttagacaaccactgaactagatgactgttgtactgtagctcagtcatttaaaaaatatataaatactaccttgtagtgtcccatactgtgttttttacatggtagattcttatttaagtgctaactggttattttctttggctggtttattgtactgttatacagaatgtaagttgtacagtgaaataagttattaaagcatgtgtaaactgattaatcagtttacacaatctattgagatgatcatgtgtttttttgttttagttttgtatatgtgatgaatcacatttattgatttgcttatgttgaaccaaccttgcatcttaagaataaagcccacttggtcatggtagactagctttttgatatgccgctggattgtgtttgctagtgttatgttgaggattttgtgtaactgattgggntcctctagatc

SEQ ID NO: 309006 - DNA, 2899 bp, Homo sapiens
tcagaacattatgcctttttctgactccagcagagagaaaatgctccaggttatgtgaagcagaatcatcatttaaatatgagtcagggctctttgtacaaggcctgctaaaggattcaactggaagctttgtgctgcctttccggcaagtcatgtatgctccatatcccaccacacacatagatgtggatgtcaatactgtgaagcagatgccaccctgtcatgaacatatttataatcagcgtagatacatgagatccgagctgacagccttctggagagccacttcagaagaagacatggctcaggatacgatcatctacactgacgaaagctttactcctgatttgaatatttttcaagatgtcttacacagagacactctagtgaaagccttcctggatcaggtctttcagctgaaacctggcttatctctcagaagtactttccttgcacagtttctacttgtccttcacagaaaagccttgacactaataaaatatatagaagacgatacgcagaagggaaaaaagccctttaaatctcttcggaacctgaagatagaccttgatttaacagcagagggcgatcttaacataataatggctctggctgagaaaattaaaccaggcctacactcttttatctttggaagacctttctacactagtgtgcaagaacgagatgttctaatgactttttaaatgtgtaacttaataagcctattccatcacaatcatgatcgctggtaaagtagctcagtggtgtggggaaacgttcccctggatcatactccagaattctgctctcagcaattgcagttaagtaagttacactacagttctcacaagagcctgtgaggggatgtcaggtgcatcattacattgggtgtctcttttcctagatttatgcttttgggatacagacctatgtttacaatataataaatattattgctatcttttaaagatataataataggatgtaaacttgaccacaactactgtttttttgaaatacatgattcatggtttacatgtgtcaaggtgaaatctgagttggcttttacagatagttgactttctatcttttggcattctttggtgtgtagaattactgtaatacttctgcaatcaactgaaaactagagcctttaaatgatttcaattccacagaaagaaagtgagcttgaacataggatgagctttagaaagaaaattgatcaagcagatgtttaattggaattgattattagatcctactttgtggatttagtccctgggattcagtctgtagaaatgtctaatagttctctatagtccttgttcctggtgaaccacagttagggtgttttgtttattttattgttcttgctattgttgatattctatgtagttgagctctgtaaaaggaaattgtattttatgttttagtaattgttgccaactttttaaattaattttcattatttttgagccaaattgaaatgtgcacctcctgtgccttttttctccttagaaaatctaattacttggaacaagttcagatttcactggtcagtcattttcatcttgttttcttcttgctaagtcttaccatgtacctgctttggcaatcattgcaactctgagattataaaatgccttagagaatatactaactaataagatctttttttcagaaacagaaaatagttccttgagtacttccttcttgcatttctgcctatgtttttgaagttgttgctgtttgcctgcaataggctataaggaatagcaggagaaattttactgaagtgctgttttcctaggtgctactttggcagagctaagttatcttttgttttcttaatgcgtttggaccattttgctggctataaaataactgattaatataattctaacacaatgttgacattgtagttacacaaacacaaataaatattttatttaaaattctggaagtaatataaaagggaaaatatatttataagaaagggataaaggtaatagagcccttctgccccccacccaccaaatttacacaacaaaatgacatgttcgaatgtgaaaggtcataatagctttcccatcatgaatcagaaagatgtggacagcttgatgttttagacaaccactgaactagatgactgttgtactgtagctcagtcatttaaaaaatatataaatactaccttgtagtgtcccatactgtgttttttacatggtagattcttatttaagtgctaactggttattttctttggctggtttattgtactgttatacagaatgtaagttgtacagtgaaataagttattaaagcatgtgtaaacattgttatatatcttttctcctaaatggagaattttgaataaaatatatttgaaattttaaaaacacaaaacaaaaaacacacaaacccaaaccccacacacaaacacaaacacaacaaaacagcgcggccctcctcataccacactcccacacaaaggccaccaaaccaccacaccccacccaaactatttcttctaaaacaatacgaaatcaccacataatattagaatatatctcaaatcaatatacaacacaaacatattcacaaaacaatgcataaactacaacaactataaccatcctataaaaacactctgcaacacaactatacaaaactattttatcatagcgagcacacaacaaatcgcagatttactaatggctgaccaccaatactttgtggaacccaaactacattaaacatcagaccacgacatatataaaacagctctctatcagggactcaataatatacaacaatgtcactcagagaggatacaaaagaggcgtccaacaaccacatagagctattatattgaattgactaggttgtcgcgacagcc

SEQ ID NO: 309007 - DNA, 2880 bp, Homo sapiens
gttcacgtagtaacaaatgaagtgcgcgctgcgacacctcccagcccaccgaactccgccgccatttcctcgcttggcctaacggttcggccaatcccagcgcgcatcaagaaggactgaggctccgccaatcggaggccgccgatttcgacccttcgcctcggcccggcccaatccaggccccggccccgccgcccccggcccgcccccgcggtgccctctctcctccctctttgtgcgtctcgcgccgccgccgcccgccgcgtgagaggacgggctccgcgcgctccggcagcgcattcgggtcccctccccccgggaggcttgcgaaggagaagccgccgcagaggaaaagcaggtgccggtgcctgtccccgggggcgccatggcgaccggagcgaacgccacgccgttggacttcccaagtaagaagcggaagaggagccgctggaaccaagacacaatggaacagaagacagtgattccaggaatgcctacagttattccccctggacttactcgagaacaagaaagagcttatatagtgcaactgcagatagaagacctgactcgtaaactgcgcacaggagacctgggcatcccccctaaccctgaggacaggtccccttcccctgagcccatctacaatagcgaggggaagcggcttaacacccgagagttccgcacccgcaaaaagctggaagaggagcggcacaacctcatcacagagatggttgcactcaatccggatttcaagccacctgcagattacaaacctccagcaacacgtgtgagtgataaagtcatgattccacaagatgagtacccagaaatcaactttgtggggctgctcatcgggcccagagggaacaccctgaagaacatagagaaggagtgcaatgccaagattatgatccgggggaaagggtctgtgaaagaagggaaggttgggcgcaaagatggccagatgttgccaggagaagatgagccacttcatgccctggttactgccaatacaatggagaacgtcaaaaaggcagtggaacagataagaaacatcctgaagcagggtatcgagactccagaggaccagaatgatctacggaagatgcagcttcgggagttggctcgcttaaatgggacccttcgggaagacgataacaggatcttaagaccctggcagagctcagagacccgcagcattaccaacaccacagtgtgtaccaagtgtggaggggctggccacattgcttcagactgtaaattccaaaggcctggtgatcctcagtcagctcaggataaagcacggatggataaagaatatttgtccctcatggctgaactgggtgaagcacctgtcccagcatctgtgggctccacctctgggcctgccaccacacccctggccagcgcacctcgtcctgctgctcccgccaacaacccacctccaccgtctctcatgtctaccacccagagccgcccaccctggatgaattctggcccttcagagagtcggccctaccacggcatgcatggaggtggtcctggtgggcccggaggtggcccccacagcttcccacacccattacccagcctgacaggtgggcatggtggacatcccatgcagcacaaccccaatggacccccacccccttggatgcagccaccaccaccaccgatgaaccagggcccccaccctcctgggcaccatggccctcctccaatggatcagtacctgggaagtacgcctgtgggctctggggtctatcgcctgcatcaaggaaaaggtatgatgccgccaccacctatgggcatgatgccgccgccgccgccgcctcccagtgggcagcccccaccccctccctctggtcctcttcccccatggcaacaacagcagcagcagcctccgccaccccctccgcccagcagcagtatggcttccagtacccccttgccatggcagcaaagatccctccccgcggcggcgatggcccgagccatgagagtgaggactttccgcgcccattggtgacccttccaggcagacagcctcagcaacgcccctggtggacaggatggttcggcaaagcagcctgagttatttttgtggacggaatcggaacacgctggctccatatcgtgaaatttttattaatttttttctttttcctttgttacttctttatcttttcctttcttcagactccgtccaaggagatgctctccccggtcttctgctgcaatttagattcctttcccttctctccagttctccttcccttaccaaggagaggggagcaaatggttttgggcaagggctttggccattcatgtcaagctggttgtgggtttttcaaggtgccatagccacccccaaatatgtttgtttaaagcgtggggttttttaatctctgccacccttgtcaagggagtcttgtaaagttgccgagggtaggttcatctccaggtttcgggattcccatccgtcctggcgatcctgccagcagtgggtgggcagcctgagctccctcgggctcgcctgccagcctggagttcttcctgtgctccttgatcacctgagctgcctcagattccatttggtcctctccttcctggaaggcttccttttatgttttgttttaatcccaaatgtctgaatgttttgcagtgtgtaggggtttgagccccttgttcattctccttcctttttcctcccgcttccctctccatgaagtgattctgttgacaataatgtatactgcgcgttctcttcactggtttatctgcagaaatttctctgggcttttttcggtgttagattcaacactgcgctaaagcggggatgttccattgaataaaagagcagtgtggttttctggg

SEQ ID NO: 309008 - DNA, 3131 bp, Homo sapiens
gttcacgtagtaacaaatgaagtgcgcgctgcgacacctcccagcccaccgaactccgccgccatttcctcgcttggcctaacggttcggccaatcccagcgcgcatcaagaaggactgaggctccgccaatcggaggccgccgatttcgacccttcgcctcggcccggcccaatccaggccccggccccgccgcccccggcccgcccccgcggtgccctctctcctccctctttgtgcgtctcgcgccgccgccgcccgccgcgtgagaggacgggctccgcgcgctccggcagcgcattcgggtcccctccccccgggaggcttgcgaaggagaagccgccgcagaggaaaagcaggtgccggtgcctgtccccgggggcgccatggcgaccggagcgaacgccacgccgttggacttcccaagtaagaagcggaagaggagccgctggaaccaagacacaatggaacagaagacagtgattccaggaatgcctacagttattccccctggacttactcgagaacaagaaagagcttatatagtgcaactgcagatagaagacctgactcgtaaactgcgcacaggagacctgggcatcccccctaaccctgaggacaggtccccttcccctgagcccatctacaatagcgaggggaagcggcttaacacccgagagttccgcacccgcaaaaagctggaagaggagcggcacaacctcatcacagagatggttgcactcaatccggatttcaagccacctgcagattacaaacctccagcaacacgtgtgagtgataaagtcatgattccacaagatgagtacccagaaatcaactttgtggggctgctcatcgggcccagagggaacaccctgaagaacatagagaaggagtgcaatgccaagattatgatccgggggaaagggtctgtgaaagaagggaaggttgggcgcaaagatggccagatgttgccaggagaagatgagccacttcatgccctggttactgccaatacaatggagaacgtcaaaaaggcagtggaacagataagaaacatcctgaagcagggtatcgagactccagaggaccagaatgatctacggaagatgcagcttcgggagttggctcgcttaaatgggacccttcgggaagacgataacaggatcttaagaccctggcagagctcagagacccgcagcattaccaacaccacagtgtgtaccaagtgtggaggggctggccacattgcttcagactgtaaattccaaaggcctggtgatcctcagtcagctcaggataaagcacggatggataaagaatatttgtccctcatggctgaactgggtgaagcacctgtcccagcatctgtgggctccacctctgggcctgccaccacacccctggccagcgcacctcgtcctgctgctcccgccaacaacccacctccaccgtctctcatgtctaccacccagagccgcccaccctggatgaattctggcccttcagagagtcggccctaccacggcatgcatggaggtggtcctggtgggcccggaggtggcccccacagcttcccacacccattacccagcctgacaggtgggcatggtggacatcccatgcagcacaaccccaatggacccccacccccttggatgcagccaccaccaccaccgatgaaccagggcccccaccctcctgggcaccatggccctcctccaatggatcagtacctgggaagtacgcctgtgggctctggggtctatcgcctgcatcaaggaaaaggtatgatgccgccaccacctatgggcatgatgccgccgccgccgccgcctcccagtgggcagcccccaccccctccctctggtcctcttcccccatggcaacaacagcagcagcagcctccgccaccccctccgcccagcagcagtatggcttccagtacccccttgccatggcagcaaaatacgacgactaccaccacgagcgctggcacagggtccatcccgccatggcaacagcagcaggcggctgccgcagcttctccaggagcccctcagatgcaaggcaaccccactatggtgcccctgccccccggggtccagccgcctctgccgcctggggcccctcccccgccccgtagcatcgagtgtcttctttgtcttctttctctcctcacccaactccctttgcctctccccaaaccgggccgccaggatccctccccgcggcggcgatggcccgagccatgagagtgaggactttccgcgcccattggtgacccttccaggcagacagcctcagcaacgcccctggtggacaggatggttcggcaaagcagcctgagttatttttgtggacggaatcggaacacgctggctccatatcgtgaaatttttattaatttttttctttttcctttgttacttctttatcttttcctttcttcagactccgtccaaggagatgctctccccggtcttctgctgcaatttagattcctttcccttctctccagttctccttcccttaccaaggagaggggagcaaatggttttgggcaagggctttggccattcatgtcaagctggttgtgggtttttcaaggtgccatagccacccccaaatatgtttgtttaaagcgtggggttttttaatctctgccacccttgtcaagggagtcttgtaaagttgccgagggtaggttcatctccaggtttcgggattcccatccgtcctggcgatcctgccagcagtgggtgggcagcctgagctccctcgggctcgcctgccagcctggagttcttcctgtgctccttgatcacctgagctgcctcagattccatttggtcctctccttcctggaaggcttccttttatgttttgttttaatcccaaatgtctgaatgttttgcagtgtgtaggggtttgagccccttgttcattctccttcctttttcctcccgcttccctctccatgaagtgattctgttgacaataatgtatactgcgcgttctcttcactggtttatctgcagaaatttctctgggcttttttcggtgttagattcaacactgcgctaaagcggggatgttccattgaataaaagagcagtgtggttttctggg

SEQ ID NO: 309009 - DNA, 4087 bp, Homo sapiens
gttcacgtagtaacaaatgaagtgcgcgctgcgacacctcccagcccaccgaactccgccgccatttcctcgcttggcctaacggttcggccaatcccagcgcgcatcaagaaggactgaggctccgccaatcggaggccgccgatttcgacccttcgcctcggcccggcccaatccaggccccggccccgccgcccccggcccgcccccgcggtgccctctctcctccctctttgtgcgtctcgcgccgccgccgcccgccgcgtgagaggacgggctccgcgcgctccggcagcgcattcgggtcccctccccccgggaggcttgcgaaggagaagccgccgcagaggaaaagcaggtgccggtgcctgtccccgggggcgccatggcgaccggagcgaacgccacgccgttggacttcccaagtaagaagcggaagaggagccgctggaaccaagacacaatggaacagaagacagtgattccaggaatgcctacagttattccccctggacttactcgagaacaagaaagagcttatatagtgcaactgcagatagaagacctgactcgtaaactgcgcacaggagacctgggcatcccccctaaccctgaggacaggtccccttcccctgagcccatctacaatagcgaggggaagcggcttaacacccgagagttccgcacccgcaaaaagctggaagaggagcggcacaacctcatcacagagatggttgcactcaatccggatttcaagccacctgcagattacaaacctccagcaacacgtgtgagtgataaagtcatgattccacaagatgagtacccagaaatcaactttgtggggctgctcatcgggcccagagggaacaccctgaagaacatagagaaggagtgcaatgccaagattatgatccgggggaaagggtctgtgaaagaagggaaggttgggcgcaaagatggccagatgttgccaggagaagatgagccacttcatgccctggttactgccaatacaatggagaacgtcaaaaaggcagtggaacagataagaaacatcctgaagcagggtatcgagactccagaggaccagaatgatctacggaagatgcagcttcgggagttggctcgcttaaatgggacccttcgggaagacgataacaggatcttaagaccctggcagagctcagagacccgcagcattaccaacaccacagtgtgtaccaagtgtggaggggctggccacattgcttcagactgtaaattccaaaggcctggtgatcctcagtcagctcaggataaagcacggatggataaagaatatttgtccctcatggctgaactgggtgaagcacctgtcccagcatctgtgggctccacctctgggcctgccaccacacccctggccagcgcacctcgtcctgctgctcccgccaacaacccacctccaccgtctctcatgtctaccacccagagccgcccaccctggatgaattctggcccttcagagagtcggccctaccacggcatgcatggaggtggtcctggtgggcccggaggtggcccccacagcttcccacacccattacccagcctgacaggtgggcatggtggacatcccatgcagcacaaccccaatggacccccacccccttggatgcagccaccaccaccaccgatgaaccagggcccccaccctcctgggcaccatggccctcctccaatggatcagtacctgggaagtacgcctgtgggctctggggtctatcgcctgcatcaaggaaaaggtatgatgccgccaccacctatgggcatgatgccgccgccgccgccgcctcccagtgggcagcccccaccccctccctctggtcctcttcccccatggcaacaacagcagcagcagcctccgccaccccctccgcccagcagcagtatggcttccagtacccccttgccatggcagcaaaatacgacgactaccaccacgagcgctggcacagggtccatcccgccatggcaacagcagcaggcggctgccgcagcttctccaggagcccctcagatgcaaggcaaccccactatggtgcccctgccccccggggtccagccgcctctgccgcctggggcccctccccctccgccgcctccaccgcctggttccgccggcatgatgtatgccccgccccctcctcctccgcctcccatggacccttctaactttgtcaccatgatgggcatgggggtggcgggcatgccgcccttcgggatgcctccagctcccccaccgcctccaccacagaactagacttgttttttaagaaaatatatattatatatagagagaattggtctcgtttaaacacgccgaacctcaccatatggagccagacattgggacgcacgcatgtgattgtgtgtgcacgcatgtgtgtgtgtgcacgcactgggctgggccaagcgactgaggattcgcttgggaacgggcaggtggtagtaggggcgccagcttgggctctcctggcgccccgtagcatcgagtgtcttctttgtcttctttctctcctcacccaactccctttgcctctccccaaaccgggccgccaggatccctccccgcggcggcgatggcccgagccatgagagtgaggactttccgcgcccattggtgacccttccaggcagacagcctcagcaacgcccctggtggacaggatggttcggcaaagcagcctgagttatttttgtggacggaatcggaacacgctggctccatatcgtgaaatttttattaatttttttctttttcctttgttacttctttatcttttcctttcttcagactccgtccaaggagatgctctccccggtcttctgctgcaatttagattcctttcccttctctccagttctccttcccttaccaaggagaggggagcaaatggttttgggcaagggctttggccattcatgtcaagctggttgtgggtttttcaaggtgccatagccacccccaaatatgtttgtttaaagcgtggggttttttaatctctgccacccttgtcaagggagtcttgtaaagttgccgagggtaggttcatctccaggtttcgggattcccatccgtcctggcgatcctgccagcagtgggtgggcagcctgagctccctcgggctcgcctgccagcctggagttcttcctgtgctccttgatcacctgagctgcctcagattccatttggtcctctccttcctggaaggcttccttttatgttttgttttaatcccaaatgtctgaatgttttgcagtgtgtaggggtttgagccccttgttcattctccttcctttttcctcccgcttccctctccatgaagtgattctgttgacaataatgtatactgcgcgttctcttcactggtttatctgcagaaatttctctgggcttttttcggtgttagattcaacactgcgctaaagcggggatgttccattgaataaaagagcagtgtggttttctgggaaaaaaaaaacaaaaaaaaaaaaaaaaaaaaaaaaaaacgagagagagagagagagagaactagtctcgagtttttttttttttttttttgtttttaattaagagacagggtctcgactgggctcactgcaacctccgcctcccgggctcaagcaattcccccgcctctgcctcccgagtagccggcaccacagccgcccgccaccatgcccgaccaatccctgcagttttagtagagacggagtttcaccatgttggccaggctggtttgaaactcctgatctcaggtgatccaccccactcagccttccaagtagcttggtgtgagtcaccgtgcccagcctgttctctagccttttaaaacactgcacaggtatcttcgggtttaaactcctggcctaaatgatcctcccaccttaccctccaaggaactcggaccacacgcttaagccctatgcccagggattcctttttaattcccttcttcatgccttcgtattacctgagtcgcgctcttgaccccttggggcgtaatcccgcgtcttgccacaattaccgttcttaccacct

SEQ ID NO: 309010 - DNA, 1015 bp, Homo sapiens
gttcacgtagtaacaaatgaagtgcgcgctgcgacacctcccagcccaccgaactccgccgccatttcctcgcttggcctaacggttcggccaatcccagcgcgcatcaagaaggactgaggctccgccaatcggaggccgccgatttcgacccttcgcctcggcccggcccaatccaggccccggccccgccgcccccggcccgcccccgcggtgccctctctcctccctctttgtgcgtctcgcgccgccgccgcccgccgcgtgagaggacgggctccgcgcgctccggcagcgcattcgggtcccctccccccgggaggcttgcgaaggagaagccgccgcagaggaaaagcaggtgccggtgcctgtccccgggggcgccatggcgaccggagcgaacgccacgccgttggacttcccaagtaagaagcggaagaggagccgctggaaccaagacacaatggaacagaagacagtgattccaggaatgcctacagttattccccctggacttactcgagaacaagaaagagcttatataggtaaatatacgttctgcatccaaatgcactttgagattgttacgatttattctgagcaagatctgcattttttgaaagtttgagattgtagttatcttttttgagatgagatactttcacgactttggtatcatctgtcagtttttgcccagtgagttctgcatttgcagctccttgttttggtctgttcgtaactgcagtgttctccatgagtatcaggaaggtagggtttcacttaggagtaagaacagtccccagtccagcagccacccttttcagctgctgttcattgccagttgatgaggtgagtgtcatctgcctctctggacaggccccagtggagaacaccgcaggtactgtaaaccaagtacttttcacagcgtggcctttcaccataattttatatttctccccctaaaatgtggtcttttactttttataggtactttctgaaaaaaaaaaaaatgaca

SEQ ID NO: 309011 - DNA, 1255 bp, Homo sapiens
tcgtccctttcaaagtctccgagttcttcatgcttgttgttgagatttgagatgtttattggtaacattgtcttttttccatccttttttttctttcctaacctggtttcttccagtgcaactgcagatagaagacctgactcgtaaactgcgcacaggagacctgggcatcccccctaaccctgaggacaggttgggaaacagttttaaccagctgacagtaacgcttttacctttttctcaatacgttttactggtggcaacatattgtgtcagttcaataaaatcatagtatgacgactgtaccctgaccactttggggattaaggtttaattagaaatatgtatggtcagtcaacagttagaaaattggaataaaacttaaaaatgttgggagaataaaaagttacaggaaaatggacaactggtttccaattggtaagcatgtagatcttaacctgatttacccacccttaggggacagtgaggtggcccgttaacctgccttttcagtacctgctttggccaaaagcccagggcatagagtttttctcacaggtacacagtgcagggactaaaaatatttttgagcatcactgaacttgagcaagccaggagctctggtcagctcattgctgcagtcttcctgctcatggttttgagatggtttcaaaatcagatgagatttctaaccaacttctttcactgccagttaactttcagccttggccattgccttgggggtgttgggaggggccagaatattctcacctattttgggaaggcatgcaaccaaccctaaattacttttttttttccttaaagggagcgtgggcctcaaacagctgtggtcatgtcatttcagtttgcagtttctctcacctcagaaaaataaattgtgtgggggagatgaacttttttaaactggaattttattagctgattgaacagctaaaattggtcatttaattagaagggcagtaagtctctccctctcactgaattttctcttagtacatacagaatagttgaaaagactttgctttaaaaagtagtgtttttggtttttgttacccagttaatagcttattaaatcaggaagatgatgtaatggctttagaagtcactcactcatgcatctttcttccgccctttgccaggaaacattaacttccttgtttctccatattgactctttaatttgacttactacatttgctatattttacctatagatagattttggttgtagggt

SEQ ID NO: 309012 - DNA, 602 bp, Homo sapiens
gttcacgtagtaacaaatgaagtgcgcgctgcgacacctcccagcccaccgaactccgccgccatttcctcgcttggcctaacggttcggccaatcccagcgcgcatcaagaaggactgaggctccgccaatcggaggccgccgatttcgacccttcgcctcggcccggcccaatccaggccccggcccctgacgagcaggaggctgatctggctggaaaacagcctggaacactggggcggcaccctggtcgtgagctagcaagcactcgcaggaaagagtaccagccctgtcacctggtcgctccggtctcagacggtgggagtgcaacattcttcggtgaagagcacggcaactggcgaagaccatcgcactcgtagggtggaagccgcagggagcactatcgcacgaacgtcgaagcgaagatccaagacaaggacaggccatgcctgcctgaccacgcagaaggattgactgcttaggacgcggacaagcagcatggaagaatggagcgcaccctggtctgaactacaaaatcacagaaggcagtctaggctctggcacctggtgactcccgtcctcagacgtgagatgaccgatcc

SEQ ID NO: 309013 - DNA, 923 bp, Homo sapiens
gtgaggtggccgggctgtgcggcgcaactgtatagactgggggcccactattgctgtccagtccgctggtgtcgggaacaggggtggcgggtgttcagcgctggacggggtgctagctgtgaatgccagcagggcgtgaaagcctcacctgatgacgtgcagcgactcccttctggtcttgaggaaccagaatgggaaccgtaccaaggatagctcctctgcttctacagcaaggcagggttttcatccgggagagacttcccaagtaagaagcggaagaggagccgctggaaccaagacacaatggaacagaagacagtgattccaggaatgcctacagttattccccctggacttactcgagaacaagaaagagcttatatagctgtgaagctacgggaacaggagcagaagggaggacgaagctgaggctccagcagcaggaggagcggcggcggcttgcaggaggccgagactgcggcgcgtggaggaggacaaggagcgcgcgctgggcctgcagcgggaaaagatgcgggagctgcgcgagcggatgctgagcatcctgctgagcaagaagccggacgacagccaacacacacgacgagctgggcgtggcacacgccgacctgctgcagcccgtcctggacatcctgcagaccgatgtcgtccggctgtgtgagcgcgaccacggctgaacgcccctcgggggccaggcccccggccggtggcccccaagggagaagcggggaccaacccaaaagggccgacggggcatcccaaaaaggcgtgaaacggggcagcgtggcgagggggggcccacgcgcagggagggacagacggaccggtcgacgagcgccccgaggatgacacccgagagcaaaggacgcacggacgagaagcagcacgagaccagaaaaagacaa

SEQ ID NO: 309014 - DNA, 555 bp, Homo sapiens
aaggaatgaggttctgatatgttactacatgaatgaactttgaaaacattcatctaactgaaattagccagacaaaaaataatatgctatgattccatttatatgaaatatctagctagaataggcaaattcatggagacaggaagtagaatggtgacttctagggacttagggaagaaaggaatgggaagttactgcttaaagagtttctatctgtggtaataaaaaagttttcaaaatgatggtgataattgtaaactctggtggagaatcataggttttccccttgctgtttgcaggttcagaccctagacaagtatgaccaaatctgcatttgcagcctctcgcagaagctgctttagcactttaacgtttttctctacccagactccccaacctcgaacagccatacagccatttaggtaacagccatttaggtaacagccatttaggtaacagccatttaggtaacagccatttaggtaacagccatttaggtaacagccatttaggtaacagccatttaggtaacatactctcggacagccatgtagt

SEQ ID NO: 309015 - DNA, 301 bp, Homo sapiens
cacccagtcatccaacaggcccgggcgtatctgcttcccagtgtgcccaaacccatctggcagcccactgctgcctccaccttctatgaccacacaacctcagcagcctgaccactcttcccacatctcactcctactgaaaatagaggaggcagaagcaggaagcagaggaccagaatgatctacggaagatgcagcttcgggagttggctcgcttaaatgggacccttcgggaagacgataacaggatcttaagacctggcagaagcaggaagcacgaagcaggaagcggcagaagcgg

SEQ ID NO: 309016 - DNA, 3517 bp, Homo sapiens
gttcacgtagtaacaaatgaagtgcgcgctgcgacacctcccagcccaccgaactccgccgccatttcctcgcttggcctaacggttcggccaatcccagcgcgcatcaagaaggactgaggctccgccaatcggaggccgccgatttcgacccttcgcctcggcccggcccaatccaggccccggccccgccgcccccggcccgcccccgcggtgccctctctcctccctctttgtgcgtctcgcgccgccgccgcccgccgcgtgagaggacgggctccgcgcgctccggcagcgcattcgggtcccctccccccgggaggcttgcgaaggagaagccgccgcagaggaaaagcaggtgccggtgcctgtccccgggggcgccatggcgaccggagcgaacgccacgccgttggacttcccaagtaagaagcggaagaggagccgctggaaccaagacacaatggaacagaagacagtgattccaggaatgcctacagttattccccctggacttactcgagaacaagaaagagcttatatagtgcaactgcagatagaagacctgactcgtaaactgcgcacaggagacctgggcatcccccctaaccctgaggacaggtccccttcccctgagcccatctacaatagcgaggggaagcggcttaacacccgagagttccgcacccgcaaaaagctggaagaggagcggcacaacctcatcacagagatggttgcactcaatccggatttcaagccacctgcagattacaaacctccagcaacacgtgtgagtgataaagtcatgattccacaagatgagtacccagaaatcaactttgtggggctgctcatcgggcccagagggaacaccctgaagaacatagagaaggagtgcaatgccaagattatgatccgggggaaagggtctgtgaaagaagggaaggttgggcgcaaagatggccagatgttgccaggagaagatgagccacttcatgccctggttactgccaatacaatggagaacgtcaaaaaggcagtggaacagataagaaacatcctgaagcagggtatcgagactccagaggaccagaatgatctacggaagatgcagcttcgggagttggctcgcttaaatgggacccttcgggaagacgataacaggatcttaagaccctggcagagctcagagacccgcagcattaccaacaccacagtgtgtaccaagtgtggaggggctggccacattgcttcagactgtaaattccaaaggcctggtgatcctcagtcagctcaggataaagcacggatggataaagaatatttgtccctcatggctgaactgggtgaagcacctgtcccagcatctgtgggctccacctctgggcctgccaccacacccctggccagcgcacctcgtcctgctgctcccgccaacaacccacctccaccgtctctcatgtctaccacccagagccgcccaccctggatgaattctggcccttcagagagtcggccctaccacggcatgcatggaggtggtcctggtgggcccggaggtggcccccacagcttcccacacccattacccagcctgacaggtgggcatggtggacatcccatgcagcacaaccccaatggacccccacccccttggatgcagccaccaccaccaccgatgaaccagggcccccaccctcctgggcaccatggccctcctccaatggatcagtacctgggaagtacgcctgtgggctctggggtctatcgcctgcatcaaggaaaaggtatgatgccgccaccacctatgggcatgatgccgccgccgccgccgcctcccagtgggcagcccccaccccctccctctggtcctcttcccccatggcaacaacagcagcagcagcctccgccaccccctccgcccagcagcagtatggcttccagtacccccttgccatggcagcaaaatacgacgactaccaccacgagcgctggcacagggtccatcccgccatggcaacagcagcaggcggctgccgcagcttctccaggagcccctcagatgcaaggcaaccccactatggtgcccctgccccccggggtccagccgcctctgccgcctggggcccctccccctccgccgcctccaccgcctggttccgccggcatgatgtatgccccgccccctcctcctccgcctcccatggacccttctaactttgtcaccatgatgggcatgggggtggcgggcatgccgcccttcgggatgcctccagctcccccaccgcctccaccacagaactagacttgttttttaagaaaatatatattatatatagagagaattggtctcgtttaaacacgccgaacctcaccatatggagccagacattgggacgcacgcatgtgattgtgtgtgcacgcatgtgtgtgtgtgcacgcactgggctgggccaagcgactgaggattcgcttgggaacgggcaggtggtagtaggggcgccagcttgggctctcctggcgccccgtagcatcgagtgtcttctttgtcttctttctctcctcacccaactccctttgcctctccccaaaccgggccgccaggatccctccccgcggcggcgatggcccgagccatgagagtgaggactttccgcgcccattggtgacccttccaggcagacagcctcagcaacgcccctggtggacaggatggttcggcaaagcagcctgagttatttttgtggacggaatcggaacacgctggctccatatcgtgaaatttttattaatttttttctttttcctttgttacttctttatcttttcctttcttcagactccgtccaaggagatgctctccccggtcttctgctgcaatttagattcctttcccttctctccagttctccttcccttaccaaggagaggggagcaaatggttttgggcaagggctttggccattcatgtcaagctggttgtgggtttttcaaggtgccatagccacccccaaatatgtttgtttaaagcgtggggttttttaatctctgccacccttgtcaagggagtcttgtaaagttgccgagggtaggttcatctccaggtttcgggattcccatccgtcctggcgatcctgccagcagtgggtgggcagcctgagctccctcgggctcgcctgccagcctggagttcttcctgtgctccttgatcacctgagctgcctcagattccatttggtcctctccttcctggaaggcttccttttatgttttgttttaatcccaaatgtctgaatgttttgcagtgtgtaggggtttgagccccttgttcattctccttcctttttcctcccgcttccctctccatgaagtgattctgttgacaataatgtatactgcgcgttctcttcactggtttatctgcagaaatttctctgggcttttttcggtgttagattcaacactgcgctaaagcggggatgttccattgaataaaagagcagtgtggttttctggg

SEQ ID NO: 309017 - DNA, 3541 bp, Homo sapiens
aacccggcgctcgttcccccaccccggccggcgccataggccagccctccgtcaacctcttcaccgcaccctcggacgccccaaggcccccgccgcgctccagcgccgcgcagccaccaccaccaccgatgaaccaggcccccaccctcctgggcaccatggcctcctccaatgggtaaatcagtacctgggaagtacgcctgtgggctctggggtctatcgcctgcatcaaggaaaaggtatgatgccgccaccacctatgggcatgatgccgccgccgcccgccgcgtgagaggacgggctccgcgcgctccggcagcgcattcgggtcccctccccccgggaggcttgcgaaggagaagccgccgcagaggaaaagcaggtgccggtgcctgtccccgggggcgccatggcgaccggagcgaacgccacgccgttggacttcccaagtaagaagcggaagaggagccgctggaaccaagacacaatggaacagaagacagtgattccaggaatgcctacagttattccccctggacttactcgagaacaagaaagagcttatatagtgcaactgcagatagaagacctgactcgtaaactgcgcacaggagacctgggcatcccccctaaccctgaggacaggtccccttcccctgagcccatctacaatagcgaggggaagcggcttaacacccgagagttccgcacccgcaaaaagctggaagaggagcggcacaacctcatcacagagatggttgcactcaatccggatttcaagccacctgcagattacaaacctccagcaacacgtgtgagtgataaagtcatgattccacaagatgagtacccagaaatcaactttgtggggctgctcatcgggcccagagggaacaccctgaagaacatagagaaggagtgcaatgccaagattatgatccgggggaaagggtctgtgaaagaagggaaggttgggcgcaaagatggccagatgttgccaggagaagatgagccacttcatgccctggttactgccaatacaatggagaacgtcaaaaaggcagtggaacagataagaaacatcctgaagcagggtatcgagactccagaggaccagaatgatctacggaagatgcagcttcgggagttggctcgcttaaatgggacccttcgggaagacgataacaggatcttaagaccctggcagagctcagagacccgcagcattaccaacaccacagtgtgtaccaagtgtggaggggctggccacattgcttcagactgtaaattccaaaggcctggtgatcctcagtcagctcaggataaagcacggatggataaagaatatttgtccctcatggctgaactgggtgaagcacctgtcccagcatctgtgggctccacctctgggcctgccaccacacccctggccagcgcacctcgtcctgctgctcccgccaacaacccacctccaccgtctctcatgtctaccacccagagccgcccaccctggatgaattctggcccttcagagagtcggccctaccacggcatgcatggaggtggtcctggtgggcccggaggtggcccccacagcttcccacacccattacccagcctgacaggtgggcatggtggacatcccatgcagcacaaccccaatggacccccacccccttggatgcagccaccaccaccaccgatgaaccagggcccccaccctcctgggcaccatggccctcctccaatggatcagtacctgggaagtacgcctgtgggctctggggtctatcgcctgcatcaaggaaaaggtatgatgccgccaccacctatgggcatgatgccgccgccgccgccgcctcccagtgggcagcccccaccccctccctctggtcctcttcccccatggcaacaacagcagcagcagcctccgccaccccctccgcccagcagcagtatggcttccagtacccccttgccatggcagcaaaatacgacgactaccaccacgagcgctggcacagggtccatcccgccatggcaacagcagcaggcggctgccgcagcttctccaggagcccctcagatgcaaggcaaccccactatggtgcccctgccccccggggtccagccgcctctgccgcctggggcccctccccctccgccgcctccaccgcctggttccgccggcatgatgtatgccccgccccctcctcctccgcctcccatggacccttctaactttgtcaccatgatgggcatgggggtggcgggcatgccgcccttcgggatgcctccagctcccccaccgcctccaccacagaactagacttgttttttaagaaaatatatattatatatagagagaattggtctcgtttaaacacgccgaacctcaccatatggagccagacattgggacgcacgcatgtgattgtgtgtgcacgcatgtgtgtgtgtgcacgcactgggctgggccaagcgactgaggattcgcttgggaacgggcaggtggtagtaggggcgccagcttgggctctcctggcgccccgtagcatcgagtgtcttctttgtcttctttctctcctcacccaactccctttgcctctccccaaaccgggccgccaggatccctccccgcggcggcgatggcccgagccatgagagtgaggactttccgcgcccattggtgacccttccaggcagacagcctcagcaacgcccctggtggacaggatggttcggcaaagcagcctgagttatttttgtggacggaatcggaacacgctggctccatatcgtgaaatttttattaatttttttctttttcctttgttacttctttatcttttcctttcttcagactccgtccaaggagatgctctccccggtcttctgctgcaatttagattcctttcccttctctccagttctccttcccttaccaaggagaggggagcaaatggttttgggcaagggctttggccattcatgtcaagctggttgtgggtttttcaaggtgccatagccacccccaaatatgtttgtttaaagcgtggggttttttaatctctgccacccttgtcaagggagtcttgtaaagttgccgagggtaggttcatctccaggtttcgggattcccatccgtcctggcgatcctgccagcagtgggtgggcagcctgagctccctcgggctcgcctgccagcctggagttcttcctgtgctccttgatcacctgagctgcctcagattccatttggtcctctccttcctggaaggcttccttttatgttttgttttaatcccaaatgtctgaatgttttgcagtgtgtaggggtttgagccccttgttcattctccttcctttttcctcccgcttccctctccatgaagtgattctgttgacaataatgtatactgcgcgttctcttcactggtttatctgcagaaatttctctgggcttttttcggtgttagattcaacactgcgctaaagcggggatgttccattgaataaaagagcagtgtggttttctggg

SEQ ID NO: 309018 - DNA, 3357 bp, Homo sapiens
gtgaggtggccgggctgtgcggcgcaactgtatagactgggggcccactattgctgtccagtccgctggtgtcgggaacaggggtggcgggtgttcagcgctggacggggtgctagctgtgaatgccagcagggcgtgaaagcctcacctgatgacgtgcagcgactcccttctggtcttgaggaaccagaatgggaaccgtaccaaggatagctcctctgcttctacagcaaggcagggttttcatccgggagagacttcccaagtaagaagcggaagaggagccgctggaaccaagacacaatggaacagaagacagtgattccaggaatgcctacagttattccccctggacttactcgagaacaagaaagagcttatatagtgcaactgcagatagaagacctgactcgtaaactgcgcacaggagacctgggcatcccccctaaccctgaggacaggtccccttcccctgagcccatctacaatagcgaggggaagcggcttaacacccgagagttccgcacccgcaaaaagctggaagaggagcggcacaacctcatcacagagatggttgcactcaatccggatttcaagccacctgcagattacaaacctccagcaacacgtgtgagtgataaagtcatgattccacaagatgagtacccagaaatcaactttgtggggctgctcatcgggcccagagggaacaccctgaagaacatagagaaggagtgcaatgccaagattatgatccgggggaaagggtctgtgaaagaagggaaggttgggcgcaaagatggccagatgttgccaggagaagatgagccacttcatgccctggttactgccaatacaatggagaacgtcaaaaaggcagtggaacagataagaaacatcctgaagcagggtatcgagactccagaggaccagaatgatctacggaagatgcagcttcgggagttggctcgcttaaatgggacccttcgggaagacgataacaggatcttaagaccctggcagagctcagagacccgcagcattaccaacaccacagtgtgtaccaagtgtggaggggctggccacattgcttcagactgtaaattccaaaggcctggtgatcctcagtcagctcaggataaagcacggatggataaagaatatttgtccctcatggctgaactgggtgaagcacctgtcccagcatctgtgggctccacctctgggcctgccaccacacccctggccagcgcacctcgtcctgctgctcccgccaacaacccacctccaccgtctctcatgtctaccacccagagccgcccaccctggatgaattctggcccttcagagagtcggccctaccacggcatgcatggaggtggtcctggtgggcccggaggtggcccccacagcttcccacacccattacccagcctgacaggtgggcatggtggacatcccatgcagcacaaccccaatggacccccacccccttggatgcagccaccaccaccaccgatgaaccagggcccccaccctcctgggcaccatggccctcctccaatggatcagtacctgggaagtacgcctgtgggctctggggtctatcgcctgcatcaaggaaaaggtatgatgccgccaccacctatgggcatgatgccgccgccgccgccgcctcccagtgggcagcccccaccccctccctctggtcctcttcccccatggcaacaacagcagcagcagcctccgccaccccctccgcccagcagcagtatggcttccagtacccccttgccatggcagcaaaatacgacgactaccaccacgagcgctggcacagggtccatcccgccatggcaacagcagcaggcggctgccgcagcttctccaggagcccctcagatgcaaggcaaccccactatggtgcccctgccccccggggtccagccgcctctgccgcctggggcccctccccctccgccgcctccaccgcctggttccgccggcatgatgtatgccccgccccctcctcctccgcctcccatggacccttctaactttgtcaccatgatgggcatgggggtggcgggcatgccgcccttcgggatgcctccagctcccccaccgcctccaccacagaactagacttgttttttaagaaaatatatattatatatagagagaattggtctcgtttaaacacgccgaacctcaccatatggagccagacattgggacgcacgcatgtgattgtgtgtgcacgcatgtgtgtgtgtgcacgcactgggctgggccaagcgactgaggattcgcttgggaacgggcaggtggtagtaggggcgccagcttgggctctcctggcgccccgtagcatcgagtgtcttctttgtcttctttctctcctcacccaactccctttgcctctccccaaaccgggccgccaggatccctccccgcggcggcgatggcccgagccatgagagtgaggactttccgcgcccattggtgacccttccaggcagacagcctcagcaacgcccctggtggacaggatggttcggcaaagcagcctgagttatttttgtggacggaatcggaacacgctggctccatatcgtgaaatttttattaatttttttctttttcctttgttacttctttatcttttcctttcttcagactccgtccaaggagatgctctccccggtcttctgctgcaatttagattcctttcccttctctccagttctccttcccttaccaaggagaggggagcaaatggttttgggcaagggctttggccattcatgtcaagctggttgtgggtttttcaaggtgccatagccacccccaaatatgtttgtttaaagcgtggggttttttaatctctgccacccttgtcaagggagtcttgtaaagttgccgagggtaggttcatctccaggtttcgggattcccatccgtcctggcgatcctgccagcagtgggtgggcagcctgagctccctcgggctcgcctgccagcctggagttcttcctgtgctccttgatcacctgagctgcctcagattccatttggtcctctccttcctggaaggcttccttttatgttttgttttaatcccaaatgtctgaatgttttgcagtgtgtaggggtttgagccccttgttcattctccttcctttttcctcccgcttccctctccatgaagtgattctgttgacaataatgtatactgcgcgttctcttcactggtttatctgcagaaatttctctgggcttttttcggtgttagattcaacactgcgctaaagcggggatgttccattgaataaaagagcagtgtggttttctggg

SEQ ID NO: 309019 - DNA, 4835 bp, Homo sapiens
ttttgaagattttttttttttttaaatttacattgtaggtcatagaccacaactgtttagtgcctttttggcctttttccctttaataatatgtctacaggtcaccagtcaattcctccaaaggttgaatttttaacaaaccttctttgcttcctggataactgggattagaatttagttgatgtagccgatgcctgttggaggtgaagaagtcgggccagtctaacctctagaatactagcttttgcctttcacttctgcaatttgggaggaggttaaactgttgtgaggccttcacatggccaattgggtgctggtaagacttgtttttgtaactagctaagaatgcttaattctagacagctgtggggtgggaattagaaatgtcaagcatgttagaaataaaaccagagcagggtttttcctcccttctattcagttttgaaagaggccctaatgcctgattggttttgcttttgagcccaggttggagggaaatgcatgggttttcttaattaagataatttcttaaaaaggtgttatatcacttaagccactttattgttattttgatgctgcttaacttgcacagtaaaaacatgtttaaaacttttcttgtagacttaaatgtataagatggtagtctaatgagctggggtatgtttgcttttgttcactcttaatggattgtgctaacagtttatacaaatgctagaaacggaggtgtcatttagccgtcattagccatgaacaaacctgacctttttattccatcgtgtgtgtaacgtggtgtgacatggttccctttaggctgaagacagtgggagcagccgagttcagtccttgctctccaactaggcaaggttctctcaactaaaccaagggtataggagtcttgattactttcagtatgtttttttaataacctgatccacatggtctcttcccttcttgcagctgctactaaattttcattcagaatatcaagctatggtcctttttgtaatcttaactcaaaattctaggagtgtaacctctcttttttattaccgcaaaatccagctgtggtaaactgaccattttatcattacatttttttacttgtagcaacagcattttactccttaaaaaaatgagagagagaaaatctgctttctggacttgtaaactctggtggagaatcataggttttccccttgctgtttgcaggttcagaccctagacaagtatgaccaaatctgcatttgcagcctctcgcagaagctgctttagcactttaacgtttttctctacccagactccccaacctcgaacagccagaaaacaggttgtctcctgggccttggacacagccagccaggccattgaaggaaaagcaaagacgaagcgaaccatctctctccattgtgggggccaagtagctgcagtagccttcagtcccagttgcattgggttaaagagctcatacatactatgtgttaggggtacagaagcttttcctcatagggcatgagctctccaagagttaaccttttgcctaaacttggggtttctgtggttcataaagttgggatatgtattttttttcaaatggaagaaaatccgtatttggcaagaagactccaggggatgatactgtccttgccacttacagtccaaagattttccccaaagaatagacattttttcctctcatcacttctagatgcaaaatcttttatttttttcctttctcacacacaccccagacccctaacgttaagccagcttccatctccccattccacacgatcttgagtagcacacgttatggtcggttcctccgaagagtgttgtattagggtctgagaggcagaggggctgggaaagacttgttatagtccgtgtgggaatgagagaagtcggtgcagaatagtaaacgggagtctgtttcccacaggtccccttcccctgagcccatctacaatagcgaggggaagcggcttaacacccgagagttccgcacccgcaaaaagctggaagaggagcggcacaacctcatcacagagatggttgcactcaatccggatttcaagccacctgcagattacaaacctccagcaacacgtgtgagtgataaagtcatgattccacaagatgagtacccagaaatcaactttgtggggctgctcatcgggcccagagggaacaccctgaagaacatagagaaggagtgcaatgccaagattatgatccgggggaaagggtctgtgaaagaagggaaggttgggcgcaaagatggccagatgttgccaggagaagatgagccacttcatgccctggttactgccaatacaatggagaacgtcaaaaaggcagtggaacagataagaaacatcctgaagcagggtatcgagactccagaggaccagaatgatctacggaagatgcagcttcgggagttggctcgcttaaatgggacccttcgggaagacgataacaggatcttaagaccctggcagagctcagagacccgcagcattaccaacaccacagtgtgtaccaagtgtggaggggctggccacattgcttcagactgtaaattccaaaggcctggtgatcctcagtcagctcaggataaagcacggatggataaagaatatttgtccctcatggctgaactgggtgaagcacctgtcccagcatctgtgggctccacctctgggcctgccaccacacccctggccagcgcacctcgtcctgctgctcccgccaacaacccacctccaccgtctctcatgtctaccacccagagccgcccaccctggatgaattctggcccttcagagagtcggccctaccacggcatgcatggaggtggtcctggtgggcccggaggtggcccccacagcttcccacacccattacccagcctgacaggtgggcatggtggacatcccatgcagcacaaccccaatggacccccacccccttggatgcagccaccaccaccaccgatgaaccagggcccccaccctcctgggcaccatggccctcctccaatggatcagtacctgggaagtacgcctgtgggctctggggtctatcgcctgcatcaaggaaaaggtatgatgccgccaccacctatgggcatgatgccgccgccgccgccgcctcccagtgggcagcccccaccccctccctctggtcctcttcccccatggcaacaacagcagcagcagcctccgccaccccctccgcccagcagcagtatggcttccagtacccccttgccatggcagcaaaatacgacgactaccaccacgagcgctggcacagggtccatcccgccatggcaacagcagcaggcggctgccgcagcttctccaggagcccctcagatgcaaggcaaccccactatggtgcccctgccccccggggtccagccgcctctgccgcctggggcccctccccctccgccgcctccaccgcctggttccgccggcatgatgtatgccccgccccctcctcctccgcctcccatggacccttctaactttgtcaccatgatgggcatgggggtggcgggcatgccgcccttcgggatgcctccagctcccccaccgcctccaccacagaactagacttgttttttaagaaaatatatattatatatagagagaattggtctcgtttaaacacgccgaacctcaccatatggagccagacattgggacgcacgcatgtgattgtgtgtgcacgcatgtgtgtgtgtgcacgcactgggctgggccaagcgactgaggattcgcttgggaacgggcaggtggtagtaggggcgccagcttgggctctcctggcgccccgtagcatcgagtgtcttctttgtcttctttctctcctcacccaactccctttgcctctccccaaaccgggccgccaggatccctccccgcggcggcgatggcccgagccatgagagtgaggactttccgcgcccattggtgacccttccaggcagacagcctcagcaacgcccctggtggacaggatggttcggcaaagcagcctgagttatttttgtggacggaatcggaacacgctggctccatatcgtgaaatttttattaatttttttctttttcctttgttacttctttatcttttcctttcttcagactccgtccaaggagatgctctccccggtcttctgctgcaatttagattcctttcccttctctccagttctccttcccttaccaaggagaggggagcaaatggttttgggcaagggctttggccattcatgtcaagctggttgtgggtttttcaaggtgccatagccacccccaaatatgtttgtttaaagcgtggggttttttaatctctgccacccttgtcaagggagtcttgtaaagttgccgagggtaggttcatctccaggtttcgggattcccatccgtcctggcgatcctgccagcagtgggtgggcagcctgagctccctcgggctcgcctgccagcctggagttcttcctgtgctccttgatcacctgagctgcctcagattccatttggtcctctccttcctggaaggcttccttttatgttttgttttaatcccaaatgtctgaatgttttgcagtgtgtaggggtttgagccccttgttcattctccttcctttttcctcccgcttccctctccatgaagtgattctgttgacaataatgtatactgcgcgttctcttcactggtttatctgcagaaatttctctgggcttttttcggtgttagattcaacactgcgctaaagcggggatgttccattgaataaaagagcagtgtggttttctggg

SEQ ID NO: 309020 - DNA, 3465 bp, Homo sapiens
aacccggcgctcgttcccccaccccggccggcgccataggccagccctccgtcaacctcttcaccgcaccctcggacgccccaaggcccccgccgcgctccagcgccgcgcagccaccaccaccaccgatgaaccaggcccccaccctcctgggcaccatggcctcctccaatgggtaaatcagtacctgggaagtacgcctgtgggctctggggtctatcgcctgcatcaaggaaaaggtatgatgccgccaccacctatgggcatgatgccgccgccgcccgccgcgtgagaggacgggctccgcgcgctccggcagcgcattcgggtcccctccccccgggaggcttgcgaaggagaagccgccgcagaggaaaagcaggtgccggtgcctgtccccgggggcgccatggcgaccggagcgaacgccacgccgttggacttcccaagtaagaagcggaagaggagccgctggaaccaagacacaatggaacagaagacagtgattccaggaatgcctacagttattccccctggacttactcgagaacaagaaagagcttatataggtccccttcccctgagcccatctacaatagcgaggggaagcggcttaacacccgagagttccgcacccgcaaaaagctggaagaggagcggcacaacctcatcacagagatggttgcactcaatccggatttcaagccacctgcagattacaaacctccagcaacacgtgtgagtgataaagtcatgattccacaagatgagtacccagaaatcaactttgtggggctgctcatcgggcccagagggaacaccctgaagaacatagagaaggagtgcaatgccaagattatgatccgggggaaagggtctgtgaaagaagggaaggttgggcgcaaagatggccagatgttgccaggagaagatgagccacttcatgccctggttactgccaatacaatggagaacgtcaaaaaggcagtggaacagataagaaacatcctgaagcagggtatcgagactccagaggaccagaatgatctacggaagatgcagcttcgggagttggctcgcttaaatgggacccttcgggaagacgataacaggatcttaagaccctggcagagctcagagacccgcagcattaccaacaccacagtgtgtaccaagtgtggaggggctggccacattgcttcagactgtaaattccaaaggcctggtgatcctcagtcagctcaggataaagcacggatggataaagaatatttgtccctcatggctgaactgggtgaagcacctgtcccagcatctgtgggctccacctctgggcctgccaccacacccctggccagcgcacctcgtcctgctgctcccgccaacaacccacctccaccgtctctcatgtctaccacccagagccgcccaccctggatgaattctggcccttcagagagtcggccctaccacggcatgcatggaggtggtcctggtgggcccggaggtggcccccacagcttcccacacccattacccagcctgacaggtgggcatggtggacatcccatgcagcacaaccccaatggacccccacccccttggatgcagccaccaccaccaccgatgaaccagggcccccaccctcctgggcaccatggccctcctccaatggatcagtacctgggaagtacgcctgtgggctctggggtctatcgcctgcatcaaggaaaaggtatgatgccgccaccacctatgggcatgatgccgccgccgccgccgcctcccagtgggcagcccccaccccctccctctggtcctcttcccccatggcaacaacagcagcagcagcctccgccaccccctccgcccagcagcagtatggcttccagtacccccttgccatggcagcaaaatacgacgactaccaccacgagcgctggcacagggtccatcccgccatggcaacagcagcaggcggctgccgcagcttctccaggagcccctcagatgcaaggcaaccccactatggtgcccctgccccccggggtccagccgcctctgccgcctggggcccctccccctccgccgcctccaccgcctggttccgccggcatgatgtatgccccgccccctcctcctccgcctcccatggacccttctaactttgtcaccatgatgggcatgggggtggcgggcatgccgcccttcgggatgcctccagctcccccaccgcctccaccacagaactagacttgttttttaagaaaatatatattatatatagagagaattggtctcgtttaaacacgccgaacctcaccatatggagccagacattgggacgcacgcatgtgattgtgtgtgcacgcatgtgtgtgtgtgcacgcactgggctgggccaagcgactgaggattcgcttgggaacgggcaggtggtagtaggggcgccagcttgggctctcctggcgccccgtagcatcgagtgtcttctttgtcttctttctctcctcacccaactccctttgcctctccccaaaccgggccgccaggatccctccccgcggcggcgatggcccgagccatgagagtgaggactttccgcgcccattggtgacccttccaggcagacagcctcagcaacgcccctggtggacaggatggttcggcaaagcagcctgagttatttttgtggacggaatcggaacacgctggctccatatcgtgaaatttttattaatttttttctttttcctttgttacttctttatcttttcctttcttcagactccgtccaaggagatgctctccccggtcttctgctgcaatttagattcctttcccttctctccagttctccttcccttaccaaggagaggggagcaaatggttttgggcaagggctttggccattcatgtcaagctggttgtgggtttttcaaggtgccatagccacccccaaatatgtttgtttaaagcgtggggttttttaatctctgccacccttgtcaagggagtcttgtaaagttgccgagggtaggttcatctccaggtttcgggattcccatccgtcctggcgatcctgccagcagtgggtgggcagcctgagctccctcgggctcgcctgccagcctggagttcttcctgtgctccttgatcacctgagctgcctcagattccatttggtcctctccttcctggaaggcttccttttatgttttgttttaatcccaaatgtctgaatgttttgcagtgtgtaggggtttgagccccttgttcattctccttcctttttcctcccgcttccctctccatgaagtgattctgttgacaataatgtatactgcgcgttctcttcactggtttatctgcagaaatttctctgggcttttttcggtgttagattcaacactgcgctaaagcggggatgttccattgaataaaagagcagtgtggttttctggg

SEQ ID NO: 309021 - DNA, 3432 bp, Homo sapiens
gttcacgtagtaacaaatgaagtgcgcgctgcgacacctcccagcccaccgaactccgccgccatttcctcgcttggcctaacggttcggccaatcccagcgcgcatcaagaaggactgaggctccgccaatcggaggccgccgatttcgacccttcgcctcggcccggcccaatccaggccccggccccgccgcccccggcccgcccccgcggtgccctctctcctccctctttgtgcgtctcgcgccgccgccgcccgccgcgtgagaggacgggctccgcgcgctccggcagcgcattcgggtcccctccccccgggaggcttgcgaaggagaagccgccgcagaggaaaagcaggtgccggtgcctgtccccgggggcgccatggcgaccggagcgaacgccacgccgttggacttcccaagtaagaagcggaagaggagccgctggaaccaagacacaatggaacagaagacagtgattccaggaatgcctacagttattccccctggacttactcgagaacaagaaagagcttatatagtgcaactgcagatagaagacctgactcgtaaactgcgcacaggagacctgggcatcccccctaaccctgaggacaggtccccttcccctgagcccatctacaatagcgaggggaagcggcttaacacccgagagttccgcacccgcaaaaagctggaagaggagcggcacaacctcatcacagagatggttgcactcaatccggatttcaagccacctgcagattacaaacctccagcaacacgtgtgagtgataaagtcatgattccacaagatgagtacccagaaatcaactttgtggggctgctcatcgggcccagagggaacaccctgaagaacatagagaaggagtgcaatgccaagattatgatccgggggaaagggtctgtgaaagaagggaaggttgggcgcaaagatggccagatgttgccaggagaagatgagccacttcatgccctggttactgccaatacaatggagaacgtcaaaaaggcagtggaacagataagaaacatcctgaagcagggtatcgagactccagaggaccagaatgatctacggaagatgcagcttcgggagttggctcgcttaaatgggacccttcgggaagacgataacaggatcttaagaccctggcagagctcagagacccgcagcattaccaacaccacagtgtgtaccaagtgtggaggggctggccacattgcttcagactgtaaattccaaaggcctggtgatcctcagtcagctcaggataaagcacggatggataaagaatatttgtccctcatggctgaactgggtgaagcacctgtcccagcatctgtgggctccacctctgggcctgccaccacacccctggccagcgcacctcgtcctgctgctcccgccaacaacccacctccaccgtctctcatgtctaccacccagagccgcccaccctggatgaattctggcccttcagagagtcggccctaccacggcatgcatggaggtggtcctggtgggcccggaggtggcccccacagcttcccacacccattacccagcctgacaggtgggcatggtggacatcccatgcagcacaaccccaatggacccccacccccttggatgcagccaccaccaccaccgatgaaccagggcccccaccctcctgggcaccatggccctcctccaatggatcagtacctgggaagtacgcctgtgggctctggggtctatcgcctgcatcaaggaaaaggtatgatgccgccaccacctatgggcatgatgccgccgccgccgccgcctcccagtgggcagcccccaccccctccctctggtcctcttcccccatggcaacaacagcagcagcagcctccgccaccccctccgcccagcagcagtatggcttccagtacccccttgccatggcagcaaaatacgacgactaccaccacgagcgctggcacagggtccatcccgccatggcaacagcagcaggcggctgccgcagcttctccaggagcccctcagatgcaaggcaaccccactatggtgcccctgccccgccccctcctcctccgcctcccatggacccttctaactttgtcaccatgatgggcatgggggtggcgggcatgccgcccttcgggatgcctccagctcccccaccgcctccaccacagaactagacttgttttttaagaaaatatatattatatatagagagaattggtctcgtttaaacacgccgaacctcaccatatggagccagacattgggacgcacgcatgtgattgtgtgtgcacgcatgtgtgtgtgtgcacgcactgggctgggccaagcgactgaggattcgcttgggaacgggcaggtggtagtaggggcgccagcttgggctctcctggcgccccgtagcatcgagtgtcttctttgtcttctttctctcctcacccaactccctttgcctctccccaaaccgggccgccaggatccctccccgcggcggcgatggcccgagccatgagagtgaggactttccgcgcccattggtgacccttccaggcagacagcctcagcaacgcccctggtggacaggatggttcggcaaagcagcctgagttatttttgtggacggaatcggaacacgctggctccatatcgtgaaatttttattaatttttttctttttcctttgttacttctttatcttttcctttcttcagactccgtccaaggagatgctctccccggtcttctgctgcaatttagattcctttcccttctctccagttctccttcccttaccaaggagaggggagcaaatggttttgggcaagggctttggccattcatgtcaagctggttgtgggtttttcaaggtgccatagccacccccaaatatgtttgtttaaagcgtggggttttttaatctctgccacccttgtcaagggagtcttgtaaagttgccgagggtaggttcatctccaggtttcgggattcccatccgtcctggcgatcctgccagcagtgggtgggcagcctgagctccctcgggctcgcctgccagcctggagttcttcctgtgctccttgatcacctgagctgcctcagattccatttggtcctctccttcctggaaggcttccttttatgttttgttttaatcccaaatgtctgaatgttttgcagtgtgtaggggtttgagccccttgttcattctccttcctttttcctcccgcttccctctccatgaagtgattctgttgacaataatgtatactgcgcgttctcttcactggtttatctgcagaaatttctctgggcttttttcggtgttagattcaacactgcgctaaagcggggatgttccattgaataaaagagcagtgtggttttctggg

SEQ ID NO: 309022 - DNA, 3780 bp, Homo sapiens
ttttgaagattttttttttttttaaatttacattgtaggtcatagaccacaactgtttagtgcctttttggcctttttccctttaataatatgtctacaggtcaccagtcaattcctccaaaggttgaatttttaacaaaccttctttgcttcctggataactgggattagaatttagttgatgtagccgatgcctgttggaggtgaagaagtcgggccagtctaacctctagaatactagcttttgcctttcacttctgcaatttgggaggaggttaaactgttgtgaggccttcacatggccaattgggtgctggtaagacttgtttttgtaactagctaagaatgcttaattctagacagctgtggggtgggaattagaaatgtcaagcatgttagaaataaaaccagagcagggtttttcctcccttctattcagttttgaaagaggccctaatgcctgattggttttgcttttgagcccaggttggagggaaatgcatgggttttcttaattaagataatttcttaaaaaggtgttatatcacttaagccactttattgttattttgatgctgcttaacttgcacagtaaaaacatgtttaaaacttttcttgtagacttaaatgtataagatggtagtctaatgagctggggtatgtttgcttttgttcactcttaatggattgtgctaacagtttatacaaatgctagaaacggaggtgtcatttagccgtcattagccatgaacaaacctgacctttttattccatcgtgtgtgtaacgtggtgtgacatggttccctttaggctgaagacagtgggagcagccgagttcagtccttgctctccaactaggcaaggttctctcaactaaaccaagggtccccttcccctgagcccatctacaatagcgaggggaagcggcttaacacccgagagttccgcacccgcaaaaagctggaagaggagcggcacaacctcatcacagagatggttgcactcaatccggatttcaagccacctgcagattacaaacctccagcaacacgtgtgagtgataaagtcatgattccacaagatgagtacccagaaatcaactttgtggggctgctcatcgggcccagagggaacaccctgaagaacatagagaaggagtgcaatgccaagattatgatccgggggaaagggtctgtgaaagaagggaaggttgggcgcaaagatggccagatgttgccaggagaagatgagccacttcatgccctggttactgccaatacaatggagaacgtcaaaaaggcagtggaacagataagaaacatcctgaagcagggtatcgagactccagaggaccagaatgatctacggaagatgcagcttcgggagttggctcgcttaaatgggacccttcgggaagacgataacaggatcttaagaccctggcagagctcagagacccgcagcattaccaacaccacagtgtgtaccaagtgtggaggggctggccacattgcttcagactgtaaattccaaaggcctggtgatcctcagtcagctcaggataaagcacggatggataaagaatatttgtccctcatggctgaactgggtgaagcacctgtcccagcatctgtgggctccacctctgggcctgccaccacacccctggccagcgcacctcgtcctgctgctcccgccaacaacccacctccaccgtctctcatgtctaccacccagagccgcccaccctggatgaattctggcccttcagagagtcggccctaccacggcatgcatggaggtggtcctggtgggcccggaggtggcccccacagcttcccacacccattacccagcctgacaggtgggcatggtggacatcccatgcagcacaaccccaatggacccccacccccttggatgcagccaccaccaccaccgatgaaccagggcccccaccctcctgggcaccatggccctcctccaatggatcagtacctgggaagtacgcctgtgggctctggggtctatcgcctgcatcaaggaaaaggtatgatgccgccaccacctatgggcatgatgccgccgccgccgccgcctcccagtgggcagcccccaccccctccctctggtcctcttcccccatggcaacaacagcagcagcagcctccgccaccccctccgcccagcagcagtatggcttccagtacccccttgccatggcagcaaaatacgacgactaccaccacgagcgctggcacagggtccatcccgccatggcaacagcagcaggcggctgccgcagcttctccaggagcccctcagatgcaaggcaaccccactatggtgcccctgccccccggggtccagccgcctctgccgcctggggcccctccccctccgccgcctccaccgcctggttccgccggcatgatgtatgccccgccccctcctcctccgcctcccatggacccttctaactttgtcaccatgatgggcatgggggtggcgggcatgccgcccttcgggatgcctccagctcccccaccgcctccaccacagaactagacttgttttttaagaaaatatatattatatatagagagaattggtctcgtttaaacacgccgaacctcaccatatggagccagacattgggacgcacgcatgtgattgtgtgtgcacgcatgtgtgtgtgtgcacgcactgggctgggccaagcgactgaggattcgcttgggaacgggcaggtggtagtaggggcgccagcttgggctctcctggcgccccgtagcatcgagtgtcttctttgtcttctttctctcctcacccaactccctttgcctctccccaaaccgggccgccaggatccctccccgcggcggcgatggcccgagccatgagagtgaggactttccgcgcccattggtgacccttccaggcagacagcctcagcaacgcccctggtggacaggatggttcggcaaagcagcctgagttatttttgtggacggaatcggaacacgctggctccatatcgtgaaatttttattaatttttttctttttcctttgttacttctttatcttttcctttcttcagactccgtccaaggagatgctctccccggtcttctgctgcaatttagattcctttcccttctctccagttctccttcccttaccaaggagaggggagcaaatggttttgggcaagggctttggccattcatgtcaagctggttgtgggtttttcaaggtgccatagccacccccaaatatgtttgtttaaagcgtggggttttttaatctctgccacccttgtcaagggagtcttgtaaagttgccgagggtaggttcatctccaggtttcgggattcccatccgtcctggcgatcctgccagcagtgggtgggcagcctgagctccctcgggctcgcctgccagcctggagttcttcctgtgctccttgatcacctgagctgcctcagattccatttggtcctctccttcctggaaggcttccttttatgttttgttttaatcccaaatgtctgaatgttttgcagtgtgtaggggtttgagccccttgttcattctccttcctttttcctcccgcttccctctccatgaagtgattctgttgacaataatgtatactgcgcgttctcttcactggtttatctgcagaaatttctctgggcttttttcggtgttagattcaacactgcgctaaagcggggatgttccattgaataaaagagcagtgtggttttctggg

SEQ ID NO: 309023 - DNA, 3089 bp, Homo sapiens
gttcacgtagtaacaaatgaagtgcgcgctgcgacacctcccagcccaccgaactccgccgccatttcctcgcttggcctaacggttcggccaatcccagcgcgcatcaagaaggactgaggctccgccaatcggaggccgccgatttcgacccttcgcctcggcccggcccaatccaggccccggccccgccgcccccggcccgcccccgcggtgccctctctcctccctctttgtgcgtctcgcgccgccgccgcccgccgcgtgagaggacgggctccgcgcgctccggcagcgcattcgggtcccctccccccgggaggcttgcgaaggagaagccgccgcagaggaaaagcaggtgccggtgcctgtccccgggggcgccatggcgaccggagcgaacgccacgccgttggacttcccaagtaagaagcggaagaggagccgctggaaccaagacacaatggaacagaagacagtgattccaggaatgcctacagttattccccctggacttactcgagaacaagaaagagcttatatagtgcaactgcagatagaagacctgactcgtaaactgcgcacaggagacctgggcatcccccctaaccctgaggacaggtccccttcccctgagcccatctacaatagcgaggggaagcggcttaacacccgagagttccgcacccgcaaaaagctggaagaggagcggcacaacctcatcacagagatggttgcactcaatccggatttcaagccacctgcagattacaaacctccagcaacacgtgtgagtgataaagtcatgattccacaagatgagtacccagaaatcaactttgtggggctgctcatcgggcccagagggaacaccctgaagaacatagagaaggagtgcaatgccaagattatgatccgggggaaagggtctgtgaaagaagggaaggttgggcgcaaagatggccagatgttgccaggagaagatgagccacttcatgccctggttactgccaatacaatggagaacgtcaaaaaggcagtggaacagataagaaacatcctgaagcagggtatcgagactccagaggaccagaatgatctacggaagatgcagcttcgggagttggctcgcttaaatgggacccttcgggaagacgataacaggatcttaagaccctggcagagctcagagacccgcagcattaccaacaccacagtgtgtaccaagtgtggaggggctggccacattgcttcagactgtaaattccaaaggcctggtgatcctcagtcagctcaggataaagcacggatggataaagaatatttgtccctcatggctgaactgggtgaagcacctgtcccagcatctgtgggctccacctctgggcctgccaccacacccctggccagcgcacctcgtcctgctgctcccgccaacaacccacctccaccgtctctcatgtctaccacccagagccgcccaccctggatgaattctggcccttcagagagtcggccctaccacggcatgcatggaggtggtcctggtgggcccggaggtggcccccacagcttcccacacccattacccagcctgacaggtgggcatggtggacatcccatgcagcacaaccccaatggacccccacccccttggatgcagccaccaccaccaccgatgaaccagggcccccaccctcctgggcaccatggccctcctccaatggatcagtacctgggaagtacgcctgtgggctctggggtctatcgcctgcatcaaggaaaaggtatgatgccgccaccacctatgggcatgatgccgccgccgccgccgcctcccagtgggcagcccccaccccctccctctggtcctcttcccccatggcaacaacagcagcagcagcctccgccaccccctccgcccagcagcagtatggcttccagtacccccttgccatggcagcaaaatacgacgactaccaccacgagcgctggcacagggtccatcccgccatggcaacagcagcaggcggctgccgcagcttctccaggagcccctcagatgcaaggcaaccccactatggtgcccctgccccccggggtccagccgcctctgccgcctggggcccctccccctccgccgcctccaccgcctggttccgccggcatgatgtatgatccctccccgcggcggcgatggcccgagccatgagagtgaggactttccgcgcccattggtgacccttccaggcagacagcctcagcaacgcccctggtggacaggatggttcggcaaagcagcctgagttatttttgtggacggaatcggaacacgctggctccatatcgtgaaatttttattaatttttttctttttcctttgttacttctttatcttttcctttcttcagactccgtccaaggagatgctctccccggtcttctgctgcaatttagattcctttcccttctctccagttctccttcccttaccaaggagaggggagcaaatggttttgggcaagggctttggccattcatgtcaagctggttgtgggtttttcaaggtgccatagccacccccaaatatgtttgtttaaagcgtggggttttttaatctctgccacccttgtcaagggagtcttgtaaagttgccgagggtaggttcatctccaggtttcgggattcccatccgtcctggcgatcctgccagcagtgggtgggcagcctgagctccctcgggctcgcctgccagcctggagttcttcctgtgctccttgatcacctgagctgcctcagattccatttggtcctctccttcctggaaggcttccttttatgttttgttttaatcccaaatgtctgaatgttttgcagtgtgtaggggtttgagccccttgttcattctccttcctttttcctcccgcttccctctccatgaagtgattctgttgacaataatgtatactgcgcgttctcttcactggtttatctgcagaaatttctctgggcttttttcggtgttagattcaacactgcgctaaagcggggatgttccattgaataaaagagcagtgtggttttctggg

SEQ ID NO: 309024 - DNA, 3317 bp, Homo sapiens
gttcacgtagtaacaaatgaagtgcgcgctgcgacacctcccagcccaccgaactccgccgccatttcctcgcttggcctaacggttcggccaatcccagcgcgcatcaagaaggactgaggctccgccaatcggaggccgccgatttcgacccttcgcctcggcccggcccaatccaggccccggccccgccgcccccggcccgcccccgcggtgccctctctcctccctctttgtgcgtctcgcgccgccgccgcccgccgcgtgagaggacgggctccgcgcgctccggcagcgcattcgggtcccctccccccgggaggcttgcgaaggagaagccgccgcagaggaaaagcaggtgccggtgcctgtccccgggggcgccatggcgaccggagcgaacgccacgccgttggacttcccaagtaagaagcggaagaggagccgctggaaccaagacacaatggaacagaagacagtgattccaggaatgcctacagttattccccctggacttactcgagaacaagaaagagcttatatagtgcaactgcagatagaagacctgactcgtaaactgcgcacaggagacctgggcatcccccctaaccctgaggacaggtccccttcccctgagcccatctacaatagcgaggggaagcggcttaacacccgagagttccgcacccgcaaaaagctggaagaggagcggcacaacctcatcacagagatggttgcactcaatccggatttcaagccacctgcagattacaaacctccagcaacacgtgtgagtgataaagtcatgattccacaagatgagtacccagaaatcaactttgtggggctgctcatcgggcccagagggaacaccctgaagaacatagagaaggagtgcaatgccaagattatgatccgggggaaagggtctgtgaaagaagggaaggttgggcgcaaagatggccagatgttgccaggagaagatgagccacttcatgccctggttactgccaatacaatggagaacgtcaaaaaggcagtggaacagataagaaacatcctgaagcagggtatcgagactccagaggaccagaatgatctacggaagatgcagcttcgggagttggctcgcttaaatgggacccttcgggaagacgataacaggatcttaagaccctggcagagctcagagacccgcagcattaccaacaccacagtgtgtaccaagtgtggaggggctggccacattgcttcagactgtaaattccaaaggcctggtgatcctcagtcagctcaggataaagcacggatggataaagaatatttgtccctcatggctgaactgggtgaagcacctgtcccagcatctgtgggctccacctctgggcctgccaccacacccctggccagcgcacctcgtcctgctgctcccgccaacaacccacctccaccgtctctcatgtctaccacccagagccgcccaccctggatgaattctggcccttcagagagtcggccctaccacggcatgcatggaggtggtcctggtgggcccggaggtggcccccacagcttcccacacccattacccagcctgacaggtgggcatggtggacatcccatgcagcacaaccccaatggacccccacccccttggatgcagccaccaccaccaccgatgaaccagggcccccaccctcctgggcaccatggccctcctccaatggatcagtacctgggaagtacgcctgtgggctctggggtctatcgcctgcatcaaggaaaaggtatgatgccgccaccacctatgggcatgatgccgccgccgccgccgcctcccagtgggctgacaggaaccatagagcctcacacaagcaggcaggtgtcttgggatgagcccctgggctctgctggggttgtaaacagaaagggcctctccgccgcctccaccgcctggttccgccggcatgatgtatgccccgccccctcctcctccgcctcccatggacccttctaactttgtcaccatgatgggcatgggggtggcgggcatgccgcccttcgggatgcctccagctcccccaccgcctccaccacagaactagacttgttttttaagaaaatatatattatatatagagagaattggtctcgtttaaacacgccgaacctcaccatatggagccagacattgggacgcacgcatgtgattgtgtgtgcacgcatgtgtgtgtgtgcacgcactgggctgggccaagcgactgaggattcgcttgggaacgggcaggtggtagtaggggcgccagcttgggctctcctggcgccccgtagcatcgagtgtcttctttgtcttctttctctcctcacccaactccctttgcctctccccaaaccgggccgccaggatccctccccgcggcggcgatggcccgagccatgagagtgaggactttccgcgcccattggtgacccttccaggcagacagcctcagcaacgcccctggtggacaggatggttcggcaaagcagcctgagttatttttgtggacggaatcggaacacgctggctccatatcgtgaaatttttattaatttttttctttttcctttgttacttctttatcttttcctttcttcagactccgtccaaggagatgctctccccggtcttctgctgcaatttagattcctttcccttctctccagttctccttcccttaccaaggagaggggagcaaatggttttgggcaagggctttggccattcatgtcaagctggttgtgggtttttcaaggtgccatagccacccccaaatatgtttgtttaaagcgtggggttttttaatctctgccacccttgtcaagggagtcttgtaaagttgccgagggtaggttcatctccaggtttcgggattcccatccgtcctggcgatcctgccagcagtgggtgggcagcctgagctccctcgggctcgcctgccagcctggagttcttcctgtgctccttgatcacctgagctgcctcagattccatttggtcctctccttcctggaaggcttccttttatgttttgttttaatcccaaatgtctgaatgttttgcagtgtgtaggggtttgagccccttgttcattctccttcctttttcctcccgcttccctctccatgaagtgattctgttgacaataatgtatactgcgcgttctcttcactggtttatctgcagaaatttctctgggcttttttcggtgttagattcaacactgcgctaaagcggggatgttccattgaataaaagagcagtgtggttttctggg

SEQ ID NO: 309025 - DNA, 3496 bp, Homo sapiens
gttcacgtagtaacaaatgaagtgcgcgctgcgacacctcccagcccaccgaactccgccgccatttcctcgcttggcctaacggttcggccaatcccagcgcgcatcaagaaggactgaggctccgccaatcggaggccgccgatttcgacccttcgcctcggcccggcccaatccaggccccggccccgccgcccccggcccgcccccgcggtgccctctctcctccctctttgtgcgtctcgcgccgccgccgcccgccgcgtgagaggacgggctccgcgcgctccggcagcgcattcgggtcccctccccccgggaggcttgcgaaggagaagccgccgcagaggaaaagcaggtgccggtgcctgtccccgggggcgccatggcgaccggagcgaacgccacgccgttggacttcccaagtaagaagcggaagaggagccgctggaaccaagacacaatggaacagaagacagtgattccaggaatgcctacagttattccccctggacttactcgagaacaagaaagagcttatatagtgcaactgcagatagaagacctgactcgtaaactgcgcacaggagacctgggcatcccccctaaccctgaggacaggtccccttcccctgagcccatctacaatagcgaggggaagcggcttaacacccgagagttccgcacccgcaaaaagctggaagaggagcggcacaacctcatcacagagatggttgcactcaatccggatttcaagccacctgcagattacaaacctccagcaacacgtgtgagtgataaagtcatgattccacaagatgagtacccagaaatcaactttgtggggctgctcatcgggcccagagggaacaccctgaagaacatagagaaggagtgcaatgccaagattatgatccgggggaaagggtctgtgaaagaagggaaggttgggcgcaaagatggccagatgttgccaggagaagatgagccacttcatgccctggttactgccaatacaatggagaacgtcaaaaaggcagtggaacagataagaaacatcctgaagcagggtatcgagactccagaggaccagaatgatctacggaagatgcagcttcgggagttggctcgcttaaatgggacccttcgggaagacgataacaggatcttaagaccctggcagagctcagagacccgcagcattaccaacaccacagtgtgtaccaagtgtggaggggctggccacattgcttcagactgtaaattccaaaggcctggtgatcctcagtcagctcaggataaagcacggatggataaagaatatttgtccctcatggctgaactgggtgaagcacctgtcccagcatctgtgggctccacctctgggcctgccaccacacccctggccagcgcacctcgtcctgctgctcccgccaacaacccacctccaccgagccgcccaccctggatgaattctggcccttcagagagtcggccctaccacggcatgcatggaggtggtcctggtgggcccggaggtggcccccacagcttcccacacccattacccagcctgacaggtgggcatggtggacatcccatgcagcacaaccccaatggacccccacccccttggatgcagccaccaccaccaccgatgaaccagggcccccaccctcctgggcaccatggccctcctccaatggatcagtacctgggaagtacgcctgtgggctctggggtctatcgcctgcatcaaggaaaaggtatgatgccgccaccacctatgggcatgatgccgccgccgccgccgcctcccagtgggcagcccccaccccctccctctggtcctcttcccccatggcaacaacagcagcagcagcctccgccaccccctccgcccagcagcagtatggcttccagtacccccttgccatggcagcaaaatacgacgactaccaccacgagcgctggcacagggtccatcccgccatggcaacagcagcaggcggctgccgcagcttctccaggagcccctcagatgcaaggcaaccccactatggtgcccctgccccccggggtccagccgcctctgccgcctggggcccctccccctccgccgcctccaccgcctggttccgccggcatgatgtatgccccgccccctcctcctccgcctcccatggacccttctaactttgtcaccatgatgggcatgggggtggcgggcatgccgcccttcgggatgcctccagctcccccaccgcctccaccacagaactagacttgttttttaagaaaatatatattatatatagagagaattggtctcgtttaaacacgccgaacctcaccatatggagccagacattgggacgcacgcatgtgattgtgtgtgcacgcatgtgtgtgtgtgcacgcactgggctgggccaagcgactgaggattcgcttgggaacgggcaggtggtagtaggggcgccagcttgggctctcctggcgccccgtagcatcgagtgtcttctttgtcttctttctctcctcacccaactccctttgcctctccccaaaccgggccgccaggatccctccccgcggcggcgatggcccgagccatgagagtgaggactttccgcgcccattggtgacccttccaggcagacagcctcagcaacgcccctggtggacaggatggttcggcaaagcagcctgagttatttttgtggacggaatcggaacacgctggctccatatcgtgaaatttttattaatttttttctttttcctttgttacttctttatcttttcctttcttcagactccgtccaaggagatgctctccccggtcttctgctgcaatttagattcctttcccttctctccagttctccttcccttaccaaggagaggggagcaaatggttttgggcaagggctttggccattcatgtcaagctggttgtgggtttttcaaggtgccatagccacccccaaatatgtttgtttaaagcgtggggttttttaatctctgccacccttgtcaagggagtcttgtaaagttgccgagggtaggttcatctccaggtttcgggattcccatccgtcctggcgatcctgccagcagtgggtgggcagcctgagctccctcgggctcgcctgccagcctggagttcttcctgtgctccttgatcacctgagctgcctcagattccatttggtcctctccttcctggaaggcttccttttatgttttgttttaatcccaaatgtctgaatgttttgcagtgtgtaggggtttgagccccttgttcattctccttcctttttcctcccgcttccctctccatgaagtgattctgttgacaataatgtatactgcgcgttctcttcactggtttatctgcagaaatttctctgggcttttttcggtgttagattcaacactgcgctaaagcggggatgttccattgaataaaagagcagtgtggttttctggg

SEQ ID NO: 309026 - DNA, 2705 bp, Homo sapiens
  misc_feature (34)..(34): n is a, c, g, or t
tcggtacctcctggtggtgctgctgtctggtggngctgctcatcgggcccagagggaacaccctgaagaacatagagaaggagtgcaatgccaagattatgatccgggggaaagggtctgtgaaagaagggaaggttgggcgcaaagatggccagatgttgccaggagaagatgagccacttcatgccctggttactgccaatacaatggagaacgtcaaaaaggcagtggaacagataagaaacatcctgaagcagggtatcgagactccagaggaccagaatgatctacggaagatgcagcttcgggagttggctcgcttaaatgggacccttcgggaagacgataacaggatcttaagaccctggcagagctcagagacccgcagcattaccaacaccacagtgtgtaccaagtgtggaggggctggccacattgcttcagactgtaaattccaaaggcctggtgatcctcagtcagctcaggataaagcacggatggataaagaatatttgtccctcatggctgaactgggtgaagcacctgtcccagcatctgtgggctccacctctgggcctgccaccacacccctggccagcgcacctcgtcctgctgctcccgccaacaacccacctccaccgtctctcatgtctaccacccagagccgcccaccctggatgaattctggcccttcagagagtcggccctaccacggcatgcatggaggtggtcctggtgggcccggaggtggcccccacagcttcccacacccattacccagcctgacaggtgggcatggtggacatcccatgcagcacaaccccaatggacccccacccccttggatgcagccaccaccaccaccgatgaaccagggcccccaccctcctgggcaccatggccctcctccaatggatcagtacctgggaagtacgcctgtgggctctggggtctatcgcctgcatcaaggaaaaggtatgatgccgccaccacctatgggcatgatgccgccgccgccgccgcctcccagtgggcagcccccaccccctccctctggtcctcttcccccatggcaacaacagcagcagcagcctccgccaccccctccgcccagcagcagtatggcttccagtacccccttgccatggcagcaaaatacgacgactaccaccacgagcgctggcacagggtccatcccgccatggcaacagcagcaggcggctgccgcagcttctccaggagcccctcagatgcaaggcaaccccactatggtgcccctgccccccggggtccagccgcctctgccgcctggggcccctccccctccgccgcctccaccgcctggttccgccggcatgatgtatgccccgccccctcctcctccgcctcccatggacccttctaactttgtcaccatgatgggcatgggggtggcgggcatgccgcccttcgggatgcctccagctcccccaccgcctccaccacagaactagacttgttttttaagaaaatatatattatatatagagagaattggtctcgtttaaacacgccgaacctcaccatatggagccagacattgggacgcacgcatgtgattgtgtgtgcacgcatgtgtgtgtgtgcacgcactgggctgggccaagcgactgaggattcgcttgggaacgggcaggtggtagtaggggcgccagcttgggctctcctggcgccccgtagcatcgagtgtcttctttgtcttctttctctcctcacccaactccctttgcctctccccaaaccgggccgccaggatccctccccgcggcggcgatggcccgagccatgagagtgaggactttccgcgcccattggtgacccttccaggcagacagcctcagcaacgcccctggtggacaggatggttcggcaaagcagcctgagttatttttgtggacggaatcggaacacgctggctccatatcgtgaaatttttattaatttttttctttttcctttgttacttctttatcttttcctttcttcagactccgtccaaggagatgctctccccggtcttctgctgcaatttagattcctttcccttctctccagttctccttcccttaccaaggagaggggagcaaatggttttgggcaagggctttggccattcatgtcaagctggttgtgggtttttcaaggtgccatagccacccccaaatatgtttgtttaaagcgtggggttttttaatctctgccacccttgtcaagggagtcttgtaaagttgccgagggtaggttcatctccaggtttcgggattcccatccgtcctggcgatcctgccagcagtgggtgggcagcctgagctccctcgggctcgcctgccagcctggagttcttcctgtgctccttgatcacctgagctgcctcagattccatttggtcctctccttcctggaaggcttccttttatgttttgttttaatcccaaatgtctgaatgttttgcagtgtgtaggggtttgagccccttgttcattctccttcctttttcctcccgcttccctctccatgaagtgattctgttgacaataatgtatactgcgcgttctcttcactggtttatctgcagaaatttctctgggcttttttcggtgttagattcaacactgcgctaaagcggggatgttccattgaataaaagagcagtgtggttttctggg

SEQ ID NO: 309027 - DNA, 3318 bp, Homo sapiens
gttcacgtagtaacaaatgaagtgcgcgctgcgacacctcccagcccaccgaactccgccgccatttcctcgcttggcctaacggttcggccaatcccagcgcgcatcaagaaggactgaggctccgccaatcggaggccgccgatttcgacccttcgcctcggcccggcccaatccaggccccggccccgccgcccccggcccgcccccgcggtgccctctctcctccctctttgtgcgtctcgcgccgccgccgcccgccgcgtgagaggacgggctccgcgcgctccggcagcgcattcgggtcccctccccccgggaggcttgcgaaggagaagccgccgcagaggaaaagcaggtgccggtgcctgtccccgggggcgccatggcgaccggagcgaacgccacgccgttggacttcccaagtaagaagcggaagaggagccgctggaaccaagacacaatggaacagaagacagtgattccaggaatgcctacagttattccccctggacttactcgagaacaagaaagagcttatatagtgcaactgcagatagaagacctgactcgtaaactgcgcacaggagacctgggcatcccccctaaccctgaggacaggtccccttcccctgagcccatctacaatagcgaggggaagcggcttaacacccgagagttccgcacccgcaaaaagctggaagaggagcggcacaacctcatcacagagatggttgcactcaatccggatttcaagccacctgcagattacaaacctccagcaacacgtgtgagtgataaagtcatgattccacaagatgagtacccagaaatcaactttgtggggctgctcatcgggcccagagggaacaccctgaagaacatagagaaggagtgcaatgccaagattatgatccgggggaaagggtctgtgaaagaagggaaggttgggcgcaaagatggccagatgttgccaggagaagatgagccacttcatgccctggttactgccaatacaatggagaacgtcaaaaaggcagtggaacagataagaaacatcctgaagcagggtatcgagactccagaggaccagaatgatctacggaagatgcagcttcgggagttggctcgcttaaatgggacccttcgggaagacgataacaggatcttaagaccctggcagagctcagagacccgcagcattaccaacaccacagtggtcctgctgctcccgccaacaacccacctccaccgtctctcatgtctaccacccagagccgcccaccctggatgaattctggcccttcagagagtcggccctaccacggcatgcatggaggtggtcctggtgggcccggaggtggcccccacagcttcccacacccattacccagcctgacaggtgggcatggtggacatcccatgcagcacaaccccaatggacccccacccccttggatgcagccaccaccaccaccgatgaaccagggcccccaccctcctgggcaccatggccctcctccaatggatcagtacctgggaagtacgcctgtgggctctggggtctatcgcctgcatcaaggaaaaggtatgatgccgccaccacctatgggcatgatgccgccgccgccgccgcctcccagtgggcagcccccaccccctccctctggtcctcttcccccatggcaacaacagcagcagcagcctccgccaccccctccgcccagcagcagtatggcttccagtacccccttgccatggcagcaaaatacgacgactaccaccacgagcgctggcacagggtccatcccgccatggcaacagcagcaggcggctgccgcagcttctccaggagcccctcagatgcaaggcaaccccactatggtgcccctgccccccggggtccagccgcctctgccgcctggggcccctccccctccgccgcctccaccgcctggttccgccggcatgatgtatgccccgccccctcctcctccgcctcccatggacccttctaactttgtcaccatgatgggcatgggggtggcgggcatgccgcccttcgggatgcctccagctcccccaccgcctccaccacagaactagacttgttttttaagaaaatatatattatatatagagagaattggtctcgtttaaacacgccgaacctcaccatatggagccagacattgggacgcacgcatgtgattgtgtgtgcacgcatgtgtgtgtgtgcacgcactgggctgggccaagcgactgaggattcgcttgggaacgggcaggtggtagtaggggcgccagcttgggctctcctggcgccccgtagcatcgagtgtcttctttgtcttctttctctcctcacccaactccctttgcctctccccaaaccgggccgccaggatccctccccgcggcggcgatggcccgagccatgagagtgaggactttccgcgcccattggtgacccttccaggcagacagcctcagcaacgcccctggtggacaggatggttcggcaaagcagcctgagttatttttgtggacggaatcggaacacgctggctccatatcgtgaaatttttattaatttttttctttttcctttgttacttctttatcttttcctttcttcagactccgtccaaggagatgctctccccggtcttctgctgcaatttagattcctttcccttctctccagttctccttcccttaccaaggagaggggagcaaatggttttgggcaagggctttggccattcatgtcaagctggttgtgggtttttcaaggtgccatagccacccccaaatatgtttgtttaaagcgtggggttttttaatctctgccacccttgtcaagggagtcttgtaaagttgccgagggtaggttcatctccaggtttcgggattcccatccgtcctggcgatcctgccagcagtgggtgggcagcctgagctccctcgggctcgcctgccagcctggagttcttcctgtgctccttgatcacctgagctgcctcagattccatttggtcctctccttcctggaaggcttccttttatgttttgttttaatcccaaatgtctgaatgttttgcagtgtgtaggggtttgagccccttgttcattctccttcctttttcctcccgcttccctctccatgaagtgattctgttgacaataatgtatactgcgcgttctcttcactggtttatctgcagaaatttctctgggcttttttcggtgttagattcaacactgcgctaaagcggggatgttccattgaataaaagagcagtgtggttttctggg

SEQ ID NO: 309028 - DNA, 3167 bp, Homo sapiens
gttcacgtagtaacaaatgaagtgcgcgctgcgacacctcccagcccaccgaactccgccgccatttcctcgcttggcctaacggttcggccaatcccagcgcgcatcaagaaggactgaggctccgccaatcggaggccgccgatttcgacccttcgcctcggcccggcccaatccaggccccggccccgccgcccccggcccgcccccgcggtgccctctctcctccctctttgtgcgtctcgcgccgccgccgcccgccgcgtgagaggacgggctccgcgcgctccggcagcgcattcgggtcccctccccccgggaggcttgcgaaggagaagccgccgcagaggaaaagcaggtgccggtgcctgtccccgggggcgccatggcgaccggagcgaacgccacgccgttggacttcccaagtaagaagcggaagaggagccgctggaaccaagacacaatggaacagaagacagtgattccaggaatgcctacagttattccccctggacttactcgagaacaagaaagagcttatatagtgcaactgcagatagaagacctgactcgtaaactgcgcacaggagacctgggcatcccccctaaccctgaggacaggtccccttcccctgagcccatctacaatagcgaggggaagcggcttaacacccgagagttccgcacccgcaaaaagctggaagaggagcggcacaacctcatcacagagatggttgcactcaatccggatttcaagccacctgcagattacaaacctccagcaacacgtgtgagtgataaagtcatgattccacaagatgagtacccagaaatcaactttgtggggctgctcatcgggcccagagggaacaccctgaagaacatagagaaggagtgcaatgccaagattatgatccgggggaaagggtctgtgaaagaagggaaggttgggcgcaaagatggccagatgttgccaggagaagatgagccacttcatgccctggttactgccaatacaatggagaacgtcaaaaaggcagtggaacagataagaaacatcctgaagcagggtatcgagactccagaggaccagaatgatctacggaagatgcagcttcgggagttggctcgcttaaatgggacccttcgggaagacgataacaggatcttaagaccctggcagagctcagagacccgcagcattaccaacaccacagtgcagcttcccacacccattacccagcctgacaggtgggcatggtggacatcccatgcagcacaaccccaatggacccccacccccttggatgcagccaccaccaccaccgatgaaccagggcccccaccctcctgggcaccatggccctcctccaatggatcagtacctgggaagtacgcctgtgggctctggggtctatcgcctgcatcaaggaaaaggtatgatgccgccaccacctatgggcatgatgccgccgccgccgccgcctcccagtgggcagcccccaccccctccctctggtcctcttcccccatggcaacaacagcagcagcagcctccgccaccccctccgcccagcagcagtatggcttccagtacccccttgccatggcagcaaaatacgacgactaccaccacgagcgctggcacagggtccatcccgccatggcaacagcagcaggcggctgccgcagcttctccaggagcccctcagatgcaaggcaaccccactatggtgcccctgccccccggggtccagccgcctctgccgcctggggcccctccccctccgccgcctccaccgcctggttccgccggcatgatgtatgccccgccccctcctcctccgcctcccatggacccttctaactttgtcaccatgatgggcatgggggtggcgggcatgccgcccttcgggatgcctccagctcccccaccgcctccaccacagaactagacttgttttttaagaaaatatatattatatatagagagaattggtctcgtttaaacacgccgaacctcaccatatggagccagacattgggacgcacgcatgtgattgtgtgtgcacgcatgtgtgtgtgtgcacgcactgggctgggccaagcgactgaggattcgcttgggaacgggcaggtggtagtaggggcgccagcttgggctctcctggcgccccgtagcatcgagtgtcttctttgtcttctttctctcctcacccaactccctttgcctctccccaaaccgggccgccaggatccctccccgcggcggcgatggcccgagccatgagagtgaggactttccgcgcccattggtgacccttccaggcagacagcctcagcaacgcccctggtggacaggatggttcggcaaagcagcctgagttatttttgtggacggaatcggaacacgctggctccatatcgtgaaatttttattaatttttttctttttcctttgttacttctttatcttttcctttcttcagactccgtccaaggagatgctctccccggtcttctgctgcaatttagattcctttcccttctctccagttctccttcccttaccaaggagaggggagcaaatggttttgggcaagggctttggccattcatgtcaagctggttgtgggtttttcaaggtgccatagccacccccaaatatgtttgtttaaagcgtggggttttttaatctctgccacccttgtcaagggagtcttgtaaagttgccgagggtaggttcatctccaggtttcgggattcccatccgtcctggcgatcctgccagcagtgggtgggcagcctgagctccctcgggctcgcctgccagcctggagttcttcctgtgctccttgatcacctgagctgcctcagattccatttggtcctctccttcctggaaggcttccttttatgttttgttttaatcccaaatgtctgaatgttttgcagtgtgtaggggtttgagccccttgttcattctccttcctttttcctcccgcttccctctccatgaagtgattctgttgacaataatgtatactgcgcgttctcttcactggtttatctgcagaaatttctctgggcttttttcggtgttagattcaacactgcgctaaagcggggatgttccattgaataaaagagcagtgtggttttctggg

SEQ ID NO: 309029 - DNA, 2494 bp, Homo sapiens
gttcacgtagtaacaaatgaagtgcgcgctgcgacacctcccagcccaccgaactccgccgccatttcctcgcttggcctaacggttcggccaatcccagcgcgcatcaagaaggactgaggctccgccaatcggaggccgccgatttcgacccttcgcctcggcccggcccaatccaggccccggccccgccgcccccggcccgcccccgcggtgccctctctcctccctctttgtgcgtctcgcgccgccgccgcccgccgcgtgagaggacgggctccgcgcgctccggcagcgcattcgggtcccctccccccgggaggcttgcgaaggagaagccgccgcagaggaaaagcaggtgccggtgcctgtccccgggggcgccatggcgaccggagcgaacgccacgccgttggacttcccaagtaagaagcggaagaggagccgctggaaccaagacacaatggaacagaagacagtgattccaggaatgcctacagttattccccctggacttactcgagaacaagaaagagcttatatagtgcaactgcagatagaagacctgactcgtaaactgcgcacaggagacctgggcatcccccctaaccctgaggacaggtccccttcccctgagcccatctacaatagcgaggggaagcggcttaacacccgagagttccgcacccgcaaaaagctggaagaggagcggcacaacctcatcacagagatggttgcactcaatccggatttcaagccacctgcagattacaaacctccagcaacacgtgtgagtgataaagtcatgattccacaagatgagtacccagaaatcaactttgtggggctgctcatcgggcccagagggaacaccctgaagaacatagagaaggagtgcaatgccaagattatgatccgggggaaagggtctgtgaaagaagggaaggttgggcgcaaagatggccagatgttgccaggagaagatgagccacttcatgccctggttactgccaatacaatggagaacgtcaaaaaggcagtggaacagataagaaacatcctgaagcagggtatcgagactccagaggaccagaatgatctacggaagatgcagcttcgggagttggctcgcttaaatgggacccttcgggaagacgataacaggatcttaagaccctggcagagctcagagacccgcagcattaccaacaccacagtggtggcgggcatgccgcccttcgggatgcctccagctcccccaccgcctccaccacagaactagacttgttttttaagaaaatatatattatatatagagagaattggtctcgtttaaacacgccgaacctcaccatatggagccagacattgggacgcacgcatgtgattgtgtgtgcacgcatgtgtgtgtgtgcacgcactgggctgggccaagcgactgaggattcgcttgggaacgggcaggtggtagtaggggcgccagcttgggctctcctggcgccccgtagcatcgagtgtcttctttgtcttctttctctcctcacccaactccctttgcctctccccaaaccgggccgccaggatccctccccgcggcggcgatggcccgagccatgagagtgaggactttccgcgcccattggtgacccttccaggcagacagcctcagcaacgcccctggtggacaggatggttcggcaaagcagcctgagttatttttgtggacggaatcggaacacgctggctccatatcgtgaaatttttattaatttttttctttttcctttgttacttctttatcttttcctttcttcagactccgtccaaggagatgctctccccggtcttctgctgcaatttagattcctttcccttctctccagttctccttcccttaccaaggagaggggagcaaatggttttgggcaagggctttggccattcatgtcaagctggttgtgggtttttcaaggtgccatagccacccccaaatatgtttgtttaaagcgtggggttttttaatctctgccacccttgtcaagggagtcttgtaaagttgccgagggtaggttcatctccaggtttcgggattcccatccgtcctggcgatcctgccagcagtgggtgggcagcctgagctccctcgggctcgcctgccagcctggagttcttcctgtgctccttgatcacctgagctgcctcagattccatttggtcctctccttcctggaaggcttccttttatgttttgttttaatcccaaatgtctgaatgttttgcagtgtgtaggggtttgagccccttgttcattctccttcctttttcctcccgcttccctctccatgaagtgattctgttgacaataatgtatactgcgcgttctcttcactggtttatctgcagaaatttctctgggcttttttcggtgttagattcaacactgcgctaaagcggggatgttccattgaataaaagagcagtgtggttttctggg

SEQ ID NO: 309030 - DNA, 3563 bp, Homo sapiens
  misc_feature (3179)..(3179): n is a, c, g, or t
  misc_feature (3188)..(3188): n is a, c, g, or t
gttcacgtagtaacaaatgaagtgcgcgctgcgacacctcccagcccaccgaactccgccgccatttcctcgcttggcctaacggttcggccaatcccagcgcgcatcaagaaggactgaggctccgccaatcggaggccgccgatttcgacccttcgcctcggcccggcccaatccaggccccggccccgccgcccccggcccgcccccgcggtgccctctctcctccctctttgtgcgtctcgcgccgccgccgcccgccgcgtgagaggacgggctccgcgcgctccggcagcgcattcgggtcccctccccccgggaggcttgcgaaggagaagccgccgcagaggaaaagcaggtgccggtgcctgtccccgggggcgccatggcgaccggagcgaacgccacgccgttggacttcccaagtaagaagcggaagaggagccgctggaaccaagacacaatggaacagaagacagtgattccaggaatgcctacagttattccccctggacttactcgagaacaagaaagagcttatatagtgcaactgcagatagaagacctgactcgtaaactgcgcacaggagacctgggcatcccccctaaccctgaggacaggtccccttcccctgagcccatctacaatagcgaggggaagcggcttaacacccgagagttccgcacccgcaaaaagctggaagaggagcggcacaacctcatcacagagatggttgcactcaatccggatttcaagccacctgcagattacaaacctccagcaacacgtgtgagtgataaagtcatgattccacaagatgagtacccagaaatcaactttgtggggctgctcatcgggcccagagggaacaccctgaagaacatagagaaggagtgcaatgccaagattatgatccgggggaaagggtctgtgaaagaagggaaggttgggcgcaaagatggccagatgttgccaggagaagatgagccacttcatgccctggttactgccaatacaatggagaacgtcaaaaaggcagtggaacagataagaaacatcctgaagcagggtatcgagactccagaggaccagaatgatctacggaagatgcagcttcgggagttggctcgcttaaatgggacccttcgggaagacgataacaggatcttaagaccctggcagagctcagagacccgcagcattaccaacaccacagtgtgtaccaagtgtggaggggctggccacattgcttcagactgtaaattccaaaggcctggtgatcctcagtcagctcaggataaagcacggatggataaagaatatttgtccctcatggctgaactgggtgaagcacctgtcccagcatctgtgggctccacctctgggcctgccaccacacccctggccagcgcacctcgtcctgctgctcccgccaacaacccacctccaccgtctctcatgtctaccacccagagccgcccaccctggatgaattctggcccttcagagagtcggccctaccacggcatgcatggaggtggtcctggtgggcccggaggtggcccccacagcttcccacacccattacccagcctgacaggtgggcatggtggacatcccatgcagcacaaccccaatggacccccacccccttggatgcagccaccaccaccaccgatgaaccagggcccccaccctcctgggcaccatggccctcctccaatggatcagtacctgggaagtacgcctgtgggctctggggtctatcgcctgcatcaaggaaaaggtatgatgccgccaccacctatgggcatgatgccgccgccgccgccgcctcccagtgggcagcccccaccccctccctctggtcctcttcccccatggcaacaacagcagcagcagcctccgccaccccctccgcccagcagcagtatggcttccagtacccccttgccatggcagcaaaatacgacgactaccaccacgagcgctggcacagggtccatcccgccatggcaacagcagcaggcggctgccgcagcttctccaggagcccctcagatgcaaggcaaccccactatggtgcccctgccccccggggtccagccgcctctgccgcctggggcccctccccctccgccgcctccaccgcctggttccgccggcatgatgtatgccccgccccctcctcctccgcctcccatggacccttctaactttgtcaccatgatgggcatgggggtggcgggcatgccgcccttcgggatgcctccagctcccccaccgcctccaccacagaactagacttgttttttaagaaaatatatattatatatagagagaattggtctcgtttaaacacgccgaacctcaccatatggagccagacattgggacgcacgcatgtgattgtgtgtgcacgcatgtgtgtgtgtgcacgcactgggctgggccaagcgactgaggattcgcttgggaacgggcaggtggtagtaggggcgccagcttgggctctcctggcgccccgtagcatcgagtgtcttctttgtcttctttctctcctcacccaactccctttgcctctccccaaaccgggccgccaggatccctccccgcggcggcgatggcccgagccatgagagtgaggactttccgcgcccattggtgacccttccaggcagacagcctcagcaacgcccctggtggacaggatggttcggcaaagcagcctgagttatttttgtggacggaatcggaacacgctggctccatatcgtgaaatttttattaatttttttctttttcctttgttacttctttatcttttcctttcttcagactccgtccaaggagatgctctccccggtcttctgctgcaatttagattcctttcccttctctccagttctccttcccttaccaaggagaggggagcaaatggttttgggcaagggctttggccattcatgtcaagctggttgtgggtttttcaaggtgccatagccacccccaaatatgtttgtttaaagcgtggggttttttaatctctgccacccttgtcaagggagtcttgtaaagttgccgagggtaggttcatctccaggtttcgggattcccatccgtcctggcgatcctgccagcagtgggtgggcagcctgagctcccatccgtctggcgntcctgcagnagtgggtgggcagcctgagctccctcgggctcgcctgccagcctggagttcttcctgtgctccttgatcacctgagctgcctcagattccatttggtcctctccttcctggaaggcttccttttatgttttgttttaatcccaaatgtctgaatgttttgcagtgtgtaggggtttgagccccttgttcattctccttcctttttcctcccgcttccctctccatgaagtgattctgttgacaataatgtatactgcgcgttctcttcactggtttatctgcagaaatttctctgggcttttttcggtgttagattcaacactgcgctaaagcggggatgttccattgaataaaagagcagtgtggttttctggg

SEQ ID NO: 309031 - DNA, 3431 bp, Homo sapiens
gttcacgtagtaacaaatgaagtgcgcgctgcgacacctcccagcccaccgaactccgccgccatttcctcgcttggcctaacggttcggccaatcccagcgcgcatcaagaaggactgaggctccgccaatcggaggccgccgatttcgacccttcgcctcggcccggcccaatccaggccccggccccgccgcccccggcccgcccccgcggtgccctctctcctccctctttgtgcgtctcgcgccgccgccgcccgccgcgtgagaggacgggctccgcgcgctccggcagcgcattcgggtcccctccccccgggaggcttgcgaaggagaagccgccgcagaggaaaagcaggtgccggtgcctgtccccgggggcgccatggcgaccggagcgaacgccacgccgttggacttcccaagtaagaagcggaagaggagccgctggaaccaagacacaatggaacagaagacagtgattccaggaatgcctacagttattccccctggacttactcgagaacaagaaagagcttatatagtgcaactgcagatagaagacctgactcgtaaactgcgcacaggagacctgggcatcccccctaaccctgaggacaggtccccttcccctgagcccatctacaatagcgaggggaagcggcttaacacccgagagttccgcacccgcaaaaagctggaagaggagcggcacaacctcatcacagagatggttgcactcaatccggatttcaagccacctgcagattacaaacctccagcaacacgtgtgagtgataaagtcatgattccacaagatgagtacccagaaatcaactttgtggggctgctcatcgggcccagagggaacaccctgaagaacatagagaaggagtgcaatgccaagattatgatccgggggaaagggtctgtgaaagaagggaaggttgggcgcaaagatggccagatgttgccaggagaagatgagccacttcatgccctggttactgccaatacaatggagaacgtcaaaaaggcagtggaacagataagaaacatcctgaagcagggtatcgagactccagaggaccagaatgatctacggaagatgcagcttcgggagttggctcgcttaaatgggacccttcgggaagacgataacaggatcttaagaccctggcagagctcagagacccgcagcattaccaacaccacagtgtgtaccaagtgtggaggggctggccacattgcttcagactgtaaattccaaaggcctggtgatcctcagtcagctcaggataaagcacggatggataaagaatatttgtccctcatggctgaactgggtgaagcacctgtcccagcatctgtgggctccacctctgggcctgccaccacacccctggccagcgcacctcgtcctgctgctcccgccaacaacccacctccaccgtctctcatgtctaccacccagagccgcccaccctggatgaattctggcccttcagagagtcggccctaccacggcatgcatggaggtggtcctggtgggcccggaggtggcccccacagcttcccacacccattacccagcctgacaggtgggcatggtggacatcccatgcagcacaaccccaatggacccccacccccttggatgcagccaccaccaccaccgatgaaccagggcccccaccctcctgggcaccatggccctcctccaatggatcagtacctgggaagtacgcctgtgggctctggggtctatcgcctgcatcaaggaaaaggtatgatgccgccaccacctatgggcatgatgccgccgccgccgccgcctcccagtgggcagcccccaccccctccctctggtcctcttcccccatggcaacaacagcagcagcagcctccgccaccccctccgcccagcagcagtatggcttccagtacccccttgccatggcagcaaaatacgacgactaccaccacgagcgctggcacagggtccatcccgccatggcaacagcagcaggcggctgccgcagcttctccaggagcccctcagatgcaaggcaaccccactatggtgcccctgccccccggggtccagccgcctctgccgcctggggcccctccccctccgccgcctccaccgcctggttccgccggcatgatgtatgccccgccccctcctcctccgcctcccatggacccttctaactttgtcaccatgatgggcatgggggtggcgggcatgccgcccttcgggatgcctccagctcccccaccgcctccaccacagaactagacttgttttttaagaaaatatatattatatatagagagaattggtctcgtttaaacacgccgaacctcaccatatggagccagacattgggacgcacgcatgtgattgtgtgtgcacgcatgtgtgtgtgtgcacgcactgggctgggccaagcgactgaggattcgcttgggaacgggcaggtggtagtaggggcgccagcttgggctctcctggcgccccgtagcatcgagtgtcttctttgtcttctttctctcctcacccaactccctttgcctctccccaaaccgggccgccaggatccctccccgcggcggcgatggcccgagccatgagagtgaggactttccgcgcccattggtgacccttccaggcagacagcctcagcaacgcccctggtggacaggatggttcggcaaagcagcctgagttatttttgtggacggaatcggaacacgctggctccatatcgtgaaatttttattaatttttttctttttcctttgttacttctttatcttttcctttcttcagactccgtccaaggagatgctctccccggtcttctgctgcaatttagattcctttcccttctctccagttctccttcccttaccaaggagaggggagcaaatggttttgggcaagggctttggccattcatgtcaagctggttgtgggtttttcaaggtgccatagccacccccaaatatgtttgtttaaagcgtggggttttttaatctctgccacccttgtcaagggagtcttgtaaagttgccgagggtaggttcatctccaggtttcgggattcccatccgtcctggcgatcctgccagcagtgggtgggcagcctgagctccctcgggcttccttttatgttttgttttaatcccaaatgtctgaatgttttgcagtgtgtaggggtttgagccccttgttcattctccttcctttttcctcccgcttccctctccatgaagtgattctgttgacaataatgtatactgcgcgttctcttcactggtttatctgcagaaatttctctgggcttttttcggtgttagattcaacactgcgctaaagcggggatgttccattgaataaaagagcagtgtggttttctggg

SEQ ID NO: 309032 - DNA, 2082 bp, Homo sapiens
gttcacgtagtaacaaatgaagtgcgcgctgcgacacctcccagcccaccgaactccgccgccatttcctcgcttggcctaacggttcggccaatcccagcgcgcatcaagaaggactgaggctccgccaatcggaggccgccgatttcgacccttcgcctcggcccggcccaatccaggccccggccccgccgcccccggcccgcccccgcggtgccctctctcctccctctttgtgcgtctcgcgccgccgccgcccgccgcgtgagaggacgggctccgcgcgctccggcagcgcattcgggtcccctccccccgggaggcttgcgaaggagaagccgccgcagaggaaaagcaggtgccggtgcctgtccccgggggcgccatggcgaccggagcgaacgccacgccgttggacttcccaagtaagaagcggaagaggagccgctggaaccaagacacaatggaacagaagacagtgattccaggaatgcctacagttattccccctggacttactcgagaacaagaaagagcttatatagtgcaactgcagatagaagacctgactcgtaaactgcgcacaggagacctgggcatcccccctaaccctgaggacaggtccccttcccctgagcccatctacaatagcgaggggaagcggcttaacacccgagagttccgcacccgcaaaaagctggaagaggagcggcacaacctcatcacagagatggttgcactcaatccggatttcaagccacctgcagattacaaacctccagcaacacgtgtgagtgataaagtcatgattccacaagatgagtacccagaaatcaactttgtggggctgctcatcgggcccagagggaacaccctgaagaacatagagaaggagtgcaatgccaagattatgatccgggggaaagggtctgtgaaagaagggaaggttgggcgcaaagatggccagatgttgccaggagaagatgagccacttcatgccctggttactgccaatacaatggagaacgtcaaaaaggcagtggaacagataagaaacatcctgaagcagggtatcgagactccagaggaccagaatgatctacggaagatgcagcttcgggagttggctcgcttaaatgggacccttcgggaagacgataacaggatcttaagaccctggcagagctcagagacccgcagcattaccaacaccacagtgtgtaccaagtgtggaggggctggccacattgcttcagactgtaaattccaaaggcctggtgatcctcagtcagctcaggataaagcacggatggataaagaatatttgtccctcatggctgaactgggtgaagcacctgtcccagcatctgtgggctccacctctgggcctgccaccacacccctggccagcgcacctcgtcctgctgctcccgccaacaacccacctccaccgtctctcatgtctaccacccagagccgcccaccctggatgaattctggcccttcagagagtcggccctaccacggcatgcatggaggtggtcctggtgggcccggaggtggcccccacagcttcccacacccattacccagcctgacaggtgggcatggtggacatcccatgcagcacaaccccaatggacccccacccccttggatgcagccaccaccaccaccgatgaaccagggcccccaccctcctgggcaccatggccctcctccaatggatcagtacctgggaagtacgcctgtgggctctggggtctatcgcctgcatcaaggaaaaggtatgatgccgccaccacctatgggcatgatgccgccgccgccgccgcctcccagtgggcagccccaaggcgcatccatggtggtcctcctacacggataggaaacaaggagcagagcagctccgcaaccaccgttcgccagaagaagtatgggaccaagttaccccctgccatggaggaaagatactcaccagaggaggcaaggccgagacaagaagagggggggttcccgggccttggaaccctcacggaaaaggtaagaacgccccgtggccaagaagttggcgacagctgg

SEQ ID NO: 309033 - DNA, 1938 bp, Homo sapiens
  misc_feature (1634)..(1634): n is a, c, g, or t
gttcacgtagtaacaaatgaagtgcgcgctgcgacacctcccagcccaccgaactccgccgccatttcctcgcttggcctaacggttcggccaatcccagcgcgcatcaagaaggactgaggctccgccaatcggaggccgccgatttcgacccttcgcctcggcccggcccaatccaggccccggccccgccgcccccggcccgcccccgcggtgccctctctcctccctctttgtgcgtctcgcgccgccgccgcccgccgcgtgagaggacgggctccgcgcgctccggcagcgcattcgggtcccctccccccgggaggcttgcgaaggagaagccgccgcagaggaaaagcaggtgccggtgcctgtccccgggggcgccatggcgaccggagcgaacgccacgccgttggacttcccaagtaagaagcggaagaggagccgctggaaccaagacacaatggaacagaagacagtgattccaggaatgcctacagttattccccctggacttactcgagaacaagaaagagcttatatagtgcaactgcagatagaagacctgactcgtaaactgcgcacaggagacctgggcatcccccctaaccctgaggacaggtccccttcccctgagcccatctacaatagcgaggggaagcggcttaacacccgagagttccgcacccgcaaaaagctggaagaggagcggcacaacctcatcacagagatggttgcactcaatccggatttcaagccacctgcagattacaaacctccagcaacacgtgtgagtgataaagtcatgattccacaagatgagtacccagaaatcaactttgtggggctgctcatcgggcccagagggaacaccctgaagaacatagagaaggagtgcaatgccaagattatgatccgggggaaagggtctgtgaaagaagggaaggttgggcgcaaagatggccagatgttgccaggagaagatgagccacttcatgccctggttactgccaatacaatggagaacgtcaaaaaggcagtggaacagataagaaacatcctgaagcagggtatcgagactccagaggaccagaatgatctacggaagatgcagcttcgggagttggctcgcttaaatgggacccttcgggaagacgataacaggatcttaagaccctggcagagctcagagacccgcagcattaccaacaccacagtgtgtaccaagtgtggaggggctggccacattgcttcagactgtaaattccaaaggcctggtgatcctcagtcagctcaggataaagcacggatggataaagaatatttgtccctcatggctgaactgggtgaagcacctgtcccagcatctgtgggctccacctctgggcctgccaccacacccctggccagcgcacctcgtcctgctgctcccgccaacaacccacctccaccgtctctcatgtctaccacccagagccgcccaccctggatgaattctggcccttcagagagtcggccctaccacggcatgcatggaggtggtcctggtgggcccggaggtggcccccacagcttcccacacccattacccagcctgacaggtgggcatggtggacatcccatgcagcaaaaangaacaacaaccacatgcaagacaacaaaacacaaaagaaaaaaagaaacaacaagtgagcacaaggagaaacacaccacataaacacgaaaacaaacagaaagagagaaagagagcagaacagaaagagaggggaacaggagcgaaacaggaaacagaaaggagaagaagacaaaggggcgagcaagagaagacacaagacaaaaaaaacggagaagagaacgaaagacagagcaggcggacgaagagcgagagaggacaaggagaaaaagaagagagagaagaagaagaagaagacagaaagc

SEQ ID NO: 309034 - DNA, 1743 bp, Homo sapiens
  misc_feature (1637)..(1637): n is a, c, g, or t
gttcacgtagtaacaaatgaagtgcgcgctgcgacacctcccagcccaccgaactccgccgccatttcctcgcttggcctaacggttcggccaatcccagcgcgcatcaagaaggactgaggctccgccaatcggaggccgccgatttcgacccttcgcctcggcccggcccaatccaggccccggccccgccgcccccggcccgcccccgcggtgccctctctcctccctctttgtgcgtctcgcgccgccgccgcccgccgcgtgagaggacgggctccgcgcgctccggcagcgcattcgggtcccctccccccgggaggcttgcgaaggagaagccgccgcagaggaaaagcaggtgccggtgcctgtccccgggggcgccatggcgaccggagcgaacgccacgccgttggacttcccaagtaagaagcggaagaggagccgctggaaccaagacacaatggaacagaagacagtgattccaggaatgcctacagttattccccctggacttactcgagaacaagaaagagcttatatagtgcaactgcagatagaagacctgactcgtaaactgcgcacaggagacctgggcatcccccctaaccctgaggacaggtccccttcccctgagcccatctacaatagcgaggggaagcggcttaacacccgagagttccgcacccgcaaaaagctggaagaggagcggcacaacctcatcacagagatggttgcactcaatccggatttcaagccacctgcagattacaaacctccagcaacacgtgtgagtgataaagtcatgattccacaagatgagtacccagaaatcaactttgtggggctgctcatcgggcccagagggaacaccctgaagaacatagagaaggagtgcaatgccaagattatgatccgggggaaagggtctgtgaaagaagggaaggttgggcgcaaagatggccagatgttgccaggagaagatgagccacttcatgccctggttactgccaatacaatggagaacgtcaaaaaggcagtggaacagataagaaacatcctgaagcagggtatcgagactccagaggaccagaatgatctacggaagatgcagcttcgggagttggctcgcttaaatgggacccttcgggaagacgataacaggatcttaagaccctggcagagctcagagacccgcagcattaccaacaccacagtgtgtaccaagtgtggaggggctggccacattgcttcagactgtaaattccaaaggcctggtgatcctcagtcagctcaggataaagcacggatggataaagaatatttgtccctcatggctgaactgggtgaagcacctgtcccagcatctgtgggctccacctctgggcctgccaccacacccctggccagcgcacctcgtcctgctgctcccgccaacaacccacctccaccgtctctcatgtctaccacccagagccgcccaccctggatgaattctggcccttcagagagtcggccctaccacggcatgcatggaggtggtcctggtgggcccggaggtggcccccacagcttcccacacccattacccagcctgacaggtgggcatggtggacatcccatgcagcacctgaagnacatagagaaggagtgccatgccaagattatgatccgggggaaagggtctgtgaaagaagggaaggttgggcgccaagatggccagatgttgccaggaagatgcct

SEQ ID NO: 309035 - DNA, 1971 bp, Homo sapiens
gttcacgtagtaacaaatgaagtgcgcgctgcgacacctcccagcccaccgaactccgccgccatttcctcgcttggcctaacggttcggccaatcccagcgcgcatcaagaaggactgaggctccgccaatcggaggccgccgatttcgacccttcgcctcggcccggcccaatccaggccccggccccgccgcccccggcccgcccccgcggtgccctctctcctccctctttgtgcgtctcgcgccgccgccgcccgccgcgtgagaggacgggctccgcgcgctccggcagcgcattcgggtcccctccccccgggaggcttgcgaaggagaagccgccgcagaggaaaagcaggtgccggtgcctgtccccgggggcgccatggcgaccggagcgaacgccacgccgttggacttcccaagtaagaagcggaagaggagccgctggaaccaagacacaatggaacagaagacagtgattccaggaatgcctacagttattccccctggacttactcgagaacaagaaagagcttatatagtgcaactgcagatagaagacctgactcgtaaactgcgcacaggagacctgggcatcccccctaaccctgaggacaggtccccttcccctgagcccatctacaatagcgaggggaagcggcttaacacccgagagttccgcacccgcaaaaagctggaagaggagcggcacaacctcatcacagagatggttgcactcaatccggatttcaagccacctgcagattacaaacctccagcaacacgtgtgagtgataaagtcatgattccacaagatgagtacccagaaatcaactttgtggggctgctcatcgggcccagagggaacaccctgaagaacatagagaaggagtgcaatgccaagattatgatccgggggaaagggtctgtgaaagaagggaaggttgggcgcaaagatggccagatgttgccaggagaagatgagccacttcatgccctggttactgccaatacaatggagaacgtcaaaaaggcagtggaacagataagaaacatcctgaagcagggtatcgagactccagaggaccagaatgatctacggaagatgcagcttcgggagttggctcgcttaaatgggacccttcgggaagacgataacaggatcttaagaccctggcagagctcagagacccgcagcattaccaacaccacagtgtgtaccaagtgtggaggggctggccacattgcttcagactgtaaattccaaaggcctggtgatcctcagtcagctcaggataaagcacggatggataaagaatatttgtccctcatggctgaactgggtgaagcacctgtcccagcatctgtgggctccacctctgggcctgccaccacacccctggccagcgcacctcgtcctgctgctcccgccaacaacccacctccaccgtctctcatgtctaccacccagagccgcccaccctggatgaattctggcccttcagagagtcggccctaccacggcatgcatggaggtggtcctggtgggcccggaggtggcccccacagcttcccacacccattacccagcctgacaggctgcgggcatccatgagaaacccaagggcaccacacacacttgaaaaaccaccacacgagaaacagggccagccaggcaagcgcaccccaagagaatacgagaacaaaaaacacaagaagacagaggcaacaaagcaggcaacacagaaaagactgaaaccaagcaggcgaaatgaacactcgaccaaaaaaaaatgaaccaaaatcaactacagaaaaacaaaacaacaacgagaagacacgatcgcacaacgaacaacgcagacaaaaccaccaccaacaaatcaaaaacaaaacaactacattaacacaggatgtgcaaaacaaccacaatagcgacgctggctgactgcgcctcctcccagagag

SEQ ID NO: 309036 - DNA, 599 bp, Homo sapiens
cgagctcggtaccccgttgacacttcaggggcaagggctttggccattcatgtcaagctggttgtgggtttttcaaggtgccatagccacccccaaatatgtttgtttaaagcgtggggttttttaatctctgccacccttgtcaagggagtcttgtaaagttgccgagggtaggttcatctccaggtttcgggattcccatccgtcctggcgatcctgccagcagtgggtgggcagcctgagctccctcgggctcgcctgccagcctggagttcttcctgtgctccttgatcacctgagctgcctcagattccatttggtcctctccttcctggaaggcttccttttatgttttgttttaatcccaaatgtctgaatgttttgcagtgtgtaggggtttgagccccttgttcattctccttcctttttcctcccgcttccctctccatgaagtgattctgttgacaataatgtatactgcgcgttctcttcactggtttatctgcagaaatttctctgggcttttttcggtgttagattcaacactgcgctaaagcggggatgttccattgaataaaagagcagtgtggttttctggg

SEQ ID NO: 309037 - DNA, 1891 bp, Homo sapiens
gttcacgtagtaacaaatgaagtgcgcgctgcgacacctcccagcccaccgaactccgccgccatttcctcgcttggcctaacggttcggccaatcccagcgcgcatcaagaaggactgaggctccgccaatcggaggccgccgatttcgacccttcgcctcggcccggcccaatccaggccccggccccgccgcccccggcccgcccccgcggtgccctctctcctccctctttgtgcgtctcgcgccgccgccgcccgccgcgtgagaggacgggctccgcgcgctccggcagcgcattcgggtcccctccccccgggaggcttgcgaaggagaagccgccgcagaggaaaagcaggtgccggtgcctgtccccgggggcgccatggcgaccggagcgaacgccacgccgttggacttcccaagtaagaagcggaagaggagccgctggaaccaagacacaatggaacagaagacagtgattccaggaatgcctacagttattccccctggacttactcgagaacaagaaagagcttatatagtgcaactgcagatagaagacctgactcgtaaactgcgcacaggagacctgggcatcccccctaaccctgaggacaggtccccttcccctgagcccatctacaatagcgaggggaagcggcttaacacccgagagttccgcacccgcaaaaagctggaagaggagcggcacaacctcatcacagagatggttgcactcaatccggatttcaagccacctgcagattacaaacctccagcaacacgtgtgagtgataaagtcatgattccacaagatgagtacccagaaatcaactttgtggggctgctcatcgggcccagagggaacaccctgaagaacatagagaaggagtgcaatgccaagattatgatccgggggaaagggtctgtgaaagaagggaaggttgggcgcaaagatggccagatgttgccaggagaagatgagccacttcatgccctggttactgccaatacaatggagaacgtcaaaaaggcagtggaacagataagaaacatcctgaagcagggtatcgagactccagaggaccagaatgatctacggaagatgcagcttcgggagttggctcgcttaaatgggacccttcgggaagacgataacaggatcttaagaccctggcagagctcagagacccgcagcattaccaacaccacagtgtgtaccaagtgtggaggggctggccacattgcttcagactgtaaattccaaaggcctggtgatcctcagtcagctcaggataaagcacggatggataaagaatatttgtccctcatggctgaactgggtgaagcacctgtcccagcatctgtgggctccacctctgggcctgccaccacacccctggccagcgcacctcgtcctgctgctcccgccaacaacccacctccaccgtctctcatgtctaccacccagagccgcccaccctggatgaattctggcccttcagagagtcggccctaccacggcatgcatggaggtggtcctggtgggcccggaggtggcccccacagcttcccacacccattacccagcctgacaggcaggcttcacagatgatcattaggtttgggaatcttaaatagagtctcccttctctcttttcactgttagggagggagagggagtgatgtttttggtgctctgttactttagctgaaggattttctatcaatcttcacaatctgtcttgaaatggttcccatcagccacttcgtgcaggaatccaaggggctaagaaacatacacacacacatacacatacacacacgggcacacacacaggcccactgtgcccagagacccacacgcgcagcaggctgccaggaaacc

SEQ ID NO: 309038 - DNA, 2061 bp, Homo sapiens
gttcacgtagtaacaaatgaagtgcgcgctgcgacacctcccagcccaccgaactccgccgccatttcctcgcttggcctaacggttcggccaatcccagcgcgcatcaagaaggactgaggctccgccaatcggaggccgccgatttcgacccttcgcctcggcccggcccaatccaggccccggccccgccgcccccggcccgcccccgcggtgccctctctcctccctctttgtgcgtctcgcgccgccgccgcccgccgcgtgagaggacgggctccgcgcgctccggcagcgcattcgggtcccctccccccgggaggcttgcgaaggagaagccgccgcagaggaaaagcaggtgccggtgcctgtccccgggggcgccatggcgaccggagcgaacgccacgccgttggacttcccaagtaagaagcggaagaggagccgctggaaccaagacacaatggaacagaagacagtgattccaggaatgcctacagttattccccctggacttactcgagaacaagaaagagcttatatagtgcaactgcagatagaagacctgactcgtaaactgcgcacaggagacctgggcatcccccctaaccctgaggacaggtccccttcccctgagcccatctacaatagcgaggggaagcggcttaacacccgagagttccgcacccgcaaaaagctggaagaggagcggcacaacctcatcacagagatggttgcactcaatccggatttcaagccacctgcagattacaaacctccagcaacacgtgtgagtgataaagtcatgattccacaagatgagtacccagaaatcaactttgtggggctgctcatcgggcccagagggaacaccctgaagaacatagagaaggagtgcaatgccaagattatgatccgggggaaagggtctgtgaaagaagggaaggttgggcgcaaagatggccagatgttgccaggagaagatgagccacttcatgccctggttactgccaatacaatggagaacgtcaaaaaggcagtggaacagataagaaacatcctgaagcagggtatcgagactccagaggaccagaatgatctacggaagatgcagcttcgggagttggctcgcttaaatgggacccttcgggaagacgataacaggatcttaagaccctggcagagctcagagacccgcagcattaccaacaccacagtgtgtaccaagtgtggaggggctggccacattgcttcagactgtaaattccaaaggcctggtgatcctcagtcagctcaggataaagcacggatggataaagaatatttgtccctcatggctgaactgggtgaagcacctgtcccagcatctgtgggctccacctctgggcctgccaccacacccctggccagcgcacctcgtcctgctgctcccgccaacaacccacctccaccgagccgcccaccctggatgaattctggcccttcagagagtcggccctaccacggcatgcatggaggtggtcctggtgggcccggaggtggcccccacagcttcccacacccattacccagcctgacaggtgggcatggtggacatcccatgcagcacaaccccaatggacccccacccccttggatgcagccaccaccaccaccgatgaaccagggcccccaccctcctgggcaccatggccctcctccaatggatcagtacctgggaagtacgcctgtgggctctggggtctatcgcctgcatcaaggaaaaggtatgatgccgccaccacctatgggcatgatgccgccgccgccgccgcctcccagtgggcagccccaaggcgcatccatggtggtcctcctacacggataggaaacaaggagcagagcagctccgcaaccaccgttcgccagaagaagtatgggaccaagttaccccctgccatggaggaaagatactcaccagaggaggcaaggccgagacaagaagagggggggttcccgggccttggaaccctcacggaaaaggtaagaacgccccgtggccaagaagttggcgacagctgg

SEQ ID NO: 309039 - DNA, 1573 bp, Homo sapiens
gttcacgtagtaacaaatgaagtgcgcgctgcgacacctcccagcccaccgaactccgccgccatttcctcgcttggcctaacggttcggccaatcccagcgcgcatcaagaaggactgaggctccgccaatcggaggccgccgatttcgacccttcgcctcggcccggcccaatccaggccccggccccgccgcccccggcccgcccccgcggtgccctctctcctccctctttgtgcgtctcgcgccgccgccgcccgccgcgtgagaggacgggctccgcgcgctccggcagcgcattcgggtcccctccccccgggaggcttgcgaaggagaagccgccgcagaggaaaagcaggtgccggtgcctgtccccgggggcgccatggcgaccggagcgaacgccacgccgttggacttcccaagtaagaagcggaagaggagccgctggaaccaagacacaatggaacagaagacagtgattccaggaatgcctacagttattccccctggacttactcgagaacaagaaagagcttatatagtgcaactgcagatagaagacctgactcgtaaactgcgcacaggagacctgggcatcccccctaaccctgaggacaggtccccttcccctgagcccatctacaatagcgaggggaagcggcttaacacccgagagttccgcacccgcaaaaagctggaagaggagcggcacaacctcatcacagagatggttgcactcaatccggatttcaagccacctgcagattacaaacctccagcaacacgtgtgagtgataaagtcatgattccacaagatgagtacccagaaatcaactttgtggggctgctcatcgggcccagagggaacaccctgaagaacatagagaaggagtgcaatgccaagattatgatccgggggaaagggtctgtgaaagaagggaaggttgggcgcaaagatggccagatgttgccaggagaagatgagccacttcatgccctggttactgccaatacaatggagaacgtcaaaaaggcagtggaacagataagaaacatcctgaagcagggtatcgagactccagaggaccagaatgatctacggaagatgcagcttcgggagttggctcgcttaaatgggacccttcgggaagacgataacaggatcttaagaccctggcagagctcagagacccgcagcattaccaacaccacagtgtgtaccaagtgtggaggggctggccacattgcttcagactgtaaattccaaaggcctggtgatcctcagtcagctcaggataaagcacggatggataaagaatatttgtccctcatggctgaactgggtgaagcacctgtcccagcatctgtgggctccacctctgggcctgccaccacacccctggccagcgcacctctggttgtccgcaagaaccactcacgttctcatgtttacaccagagcggccccctggtgagttctggccttgagagttggccttcccgggctgtggggggccttgtgggcccgggtggcccccgtgcccccctttccgctggaggggctggggcgc

SEQ ID NO: 309040 - DNA, 381 bp, Homo sapiens
ggcttgttctagcatgaccttgcatcagtcttatgcatgagaccattcttgattttaaaacccttctccttgatcacctgagctgcctcagattccatttggtcctctccttcctggaaggcttccttttatgttttgttttaatcccaaatgtctgaatgttttgcagtgtgtaggggtttgagccccttgttcattctccttcctttttcctcccgcttccctctccatgaagtgattctgttgacaataatgtatactgcgcgttctcttcactggtttatctgcagaaatttctctgggcttttttcggtgttagattcaacactgcgctaaagcggggatgttccattgaataaaagagcagtgtggttttctggg

SEQ ID NO: 309041 - DNA, 1684 bp, Homo sapiens
gttcacgtagtaacaaatgaagtgcgcgctgcgacacctcccagcccaccgaactccgccgccatttcctcgcttggcctaacggttcggccaatcccagcgcgcatcaagaaggactgaggctccgccaatcggaggccgccgatttcgacccttcgcctcggcccggcccaatccaggccccggccccgccgcccccggcccgcccccgcggtgccctctctcctccctctttgtgcgtctcgcgccgccgccgcccgccgcgtgagaggacgggctccgcgcgctccggcagcgcattcgggtcccctccccccgggaggcttgcgaaggagaagccgccgcagaggaaaagcaggtgccggtgcctgtccccgggggcgccatggcgaccggagcgaacgccacgccgttggacttcccaagtaagaagcggaagaggagccgctggaaccaagacacaatggaacagaagacagtgattccaggaatgcctacagttattccccctggacttactcgagaacaagaaagagcttatatagtgcaactgcagatagaagacctgactcgtaaactgcgcacaggagacctgggcatcccccctaaccctgaggacaggttgggaaacagttttaaccagctgacagtaacgcttttacctttttctcaatacgttttactggtggcaacatattgtgtcagttcaataaaatcatagtatgacgactgtaccctgaccactttggggattaaggtttaattagaaatatgtatggtcagtcaacagttagaaaattggaataaaacttaaaaatgttgggagaataaaaagttacaggaaaatggacaactggtttccaattggtaagcatgtagatcttaacctgatttacccacccttaggggacagtgaggtggcccgttaacctgccttttcagtacctgctttggccaaaagcccagggcatagagtttttctcacaggtacacagtgcagggactaaaaatatttttgagcatcactgaacttgagcaagccaggagctctggtcagctcattgctgcagtcttcctgctcatggttttgagatggtttcaaaatcagatgagatttctaaccaacttctttcactgccagttaactttcagccttggccattgccttgggggtgttgggaggggccagaatattctcacctattttgggaaggcatgcaaccaaccctaaattacttttttttttccttaaagggagcgtgggcctcaaacagctgtggtcatgtcatttcagtttgcagtttctctcacctcagaaaaataaattgtgtgggggagatgaacttttttaaactggaattttattagctgattgaacagctaaaattggtcatttaattagaagggcagtaagtctctccctctcactgaattttctcttagtacatacagaatagttgaaaagactttgctttaaaaagtagtgtttttggtttttgttacccagttaatagcttattaaatcaggaagatgatgtaatggctttagaagtcactcactcatgcatctttcttccgccctttgccaggaaacattaacttccttgtttctccatattgactctttaatttgacttactacatttgctatattttacctatagatagattttggttgtagggt

SEQ ID NO: 309042 - DNA, 646 bp, Homo sapiens
tccctctcggttggtgtcttttcctctcaggtcgtctgcgttgttgctctgttgttcctctgctcccgttggccgtgtgttgatcgagcgggcgtgtcgctcggcttgttttagtttaggctgccgtcccctcttgtcgacgcctcctgttttcattcactgaatctggtgtgctctcggctgcctgtcttggcgcccccccgtgtggggtattttgtgtctggtctcggccccccctttcttctttttttttgttttttttttttttttttttttttttttttttttttttttttttttttttttttttttttttttaaaccacactgctcttttattcaatggaacatccccgctttagcgcagtgttgaatctaacaccgaaaaaagcccagagaaatttctgcagataaaccagtgaagagaacgcgcagtgtgtaggggtttgagccccttgttcattctccttcctttttcctcccgcttccctctccatgaagtgattctgttgacaataatgtatactgcgcgttctcttcactggtttatctgcagaaatttctctgggcttttttcggtgttagattcaacactgcgctaaagcggggatgttccattgaataaaagagcagtgtggttttctggg

SEQ ID NO: 309043 - DNA, 653 bp, Homo sapiens
gcctggtgatcctcagtcagctcaggataaagcacggatggataaagaatatttgtccctcatggctgaactgggtgaagcacctgtcccagcatctgtgggctccacctctgggcctgccaccacacccctggccagcgcacctcgtcctgctgctcccgccaacaacccacctccaccggtgagcctgggggctggctctcttggtctggcttccccattctctactgcagagactgggagctatggccacgtggtttgggtagagcagacaatggatgtggatggcaacattgttcttccgggatctcaggccagtttggggacttctcacttcgggaagaccttgttcttgtgttctggtcctgtgtcataacccgaagaacaatgttgccactagggggcgcaggcagggacgttggcaggaaatgctctcacgtagtctctcatgtctaccacccagagccgcccaccctggatgaattctggcccttcagagagtcggccctaccacggcatgcatggaggtggtcctggtgggcccggaggtggcccccacagcttcccacacccattacccagcctgacaggtgggcatggtggacatcccatgcagcacaaccccaatggacccccacccccttggatgcagc

SEQ ID NO: 309044 - DNA, 1906 bp, Homo sapiens
gggggcacttcacgtgacgccggtgccgggcgaacatggcggcggccaccggaccctcgttttggctggggaatgaaaccctgaaggtgccgctggcgctctttgccttgaaccggcagcgcctgtgtgagcggctgcggaagaaccctgctgtgcaggccggctccatcgtggtcctgcagggcggggaggagactcagcgctactgcaccgacaccggggtcctcttccgccaggagtccttctttcactgggcgttcggtgtcactgagccaggctgctatggtgtcatcgatgttgacactgggaagtcgaccctgtttgtgcccaggcttcctgccagccatgccacctggatgggaaagatccattccaaggagcacttcaaggagaagtatgccgtggacgacgtccagtacgtagatgagattgccagcgtcctgacgtcacagaagccctctgtcctcctcactttgcgtggcgtcaacacggacagcggcagtgtctgcagggaggcctcctttgacggcatcagcaagttcgaagtcaacaataccattcttcacccagagatcgttgagtgccgagtgtttaagacggatatggagctggaggttctgcgctataccaataaaatctccagcgaggcccaccgtgaggtaatgaaggctgtaaaagtgggaatgaaagaatatgagttggaaagcctcttcgagcactactgctactcccggggcggcatgcgccacagctcctacacctgcatctgcggcagtggtgagaactcagccgtgctacactacggacacgccggagctcccaacgaccgaacgatccagaatggggatatgtgcctgttcgacatgggcggtgagtattactgcttcgcttccgacatcacctgctcctttcccgccaacggcaagttcactgcagaccagaaggccgtctatgaggcagtgctgcggagctcccgtgccgtcatgggtgccatgaagccaggtgtctggtggcctgacatgcaccgcctggctgaccgcatccacctggaggagctggcccacatgggcatcctgagcggcagcgtggacgccatggtccaggctcacctgggggccgtgtttatgcctcacgggcttggccacttcctgggcattgacgtgcacgacgtgggaggctacccagagggcgtggagcgcatcgacgagcccggcctgcggagcctgcgcactgcacggcacctgcagccaggcatggtgctcaccgtggagccgggcatctacttcatcgaccacctcctggatgaggccctggcggacccggcccgcgcctccttccttaaccgcgaggtcctgcagcgctttcgcggttttggcggggtccgcatcgaggaggacgtcgtggtgactgacagcggcatagagctgctgacctgcgtgccccgcactgtggaagagattgaagcatgcatggcaggctgtgacaaggcctttacccccttctctggccccaagtagagccagccagaaatcccagcgcacctgggggcctggccttgcaacctcttttcgtgatgggcagcctgctggtcagcactccagtagcgagagacggcacccagaatcagatcccagcttcggcatttgatcagaccaaacagtgctgtttcccggggaggaaacacttttttaattacccttttgcaggctcccacctttaatctgttttataccttgcttattaaatgagcgacttaaaatgattgaaaataatgctgttctttagtagcaactaaaatgtgtcttgctgtcatttatattccttttcccaggaaagaagcatttctgatactttctgtcaaaaatcaatatgcagaatggcatttgcaataaaaggtttcctaaaa

SEQ ID NO: 309045 - DNA, 924 bp, Homo sapiens
caggctgtacgccccgggattatgggatgggcgaacatggcggcggccaccggaccctcgttttggctggggaatgaaaccctgaaggtgccgctggcgctctttgccttgaaccggcagcgcctgtgtgagcggctgcggaagaaccctgctgtgcaggccggctccatcgtggtcctgcagggcggggaggagactcagcgctactgcaccgacaccggggtcctcttccgccaggagtccttctttcactgggcgttcggtgtcactgagccaggctgctatggtgtcatcgatgttgacactgggaagtcgaccctgtttgtgcccaggcttcctgccagccatgccacctggatgggaaagatccattccaaggagcacttcaaggagaagtatgccgtggacgacgtccagtacgtagatgagattgccagcgtcctgacgtcacagaagccctctgtcctcctcactttgcgtggcgtcaacacggacagcggcagtgtctgcagggaggcctcctttgacggcatcagcaagttcgaagtcaacaataccattcttcacccagagatcgttgagtgccgagtgtttaagacggatatggagctggaggttctgcgctataccaataaaatctccagcgaggcccaccgtgaggtaatgaaggctgtaaaaagtgggaatgaaaagatatgagttggaaaagcctcttcgaaccactaatggctacttcccggggggattggccacagttccaaaaccagctttggggcgtggtaaaatccaccctgtttaataaggacccggatcccagcgacaaagccaagggatattctgtagatgggggaataagaggggcaaaacggccttcgaagaatatggaacaaggttagagggacccacagacaacgttgaaccaaa

SEQ ID NO: 309046 - DNA, 1978 bp, Homo sapiens
gggggcacttcacgtgacgccggtgccgggcgaacatggcggcggccaccgggtgagtgctgcgcctccctcgctctttcccgctggcgtggagaggggcatgggtgtcccggccggaccgcggaccctcgttttggctggggaatgaaaccctgaaggtgccgctggcgctctttgccttgaaccggcagcgcctgtgtgagcggctgcggaagaaccctgctgtgcaggccggctccatcgtggtcctgcagggcggggaggagactcagcgctactgcaccgacaccggggtcctcttccgccaggagtccttctttcactgggcgttcggtgtcactgagccaggctgctatggtgtcatcgatgttgacactgggaagtcgaccctgtttgtgcccaggcttcctgccagccatgccacctggatgggaaagatccattccaaggagcacttcaaggagaagtatgccgtggacgacgtccagtacgtagatgagattgccagcgtcctgacgtcacagaagccctctgtcctcctcactttgcgtggcgtcaacacggacagcggcagtgtctgcagggaggcctcctttgacggcatcagcaagttcgaagtcaacaataccattcttcacccagagatcgttgagtgccgagtgtttaagacggatatggagctggaggttctgcgctataccaataaaatctccagcgaggcccaccgtgaggtaatgaaggctgtaaaagtgggaatgaaagaatatgagttggaaagcctcttcgagcactactgctactcccggggcggcatgcgccacagctcctacacctgcatctgcggcagtggtgagaactcagccgtgctacactacggacacgccggagctcccaacgaccgaacgatccagaatggggatatgtgcctgttcgacatgggcggtgagtattactgcttcgcttccgacatcacctgctcctttcccgccaacggcaagttcactgcagaccagaaggccgtctatgaggcagtgctgcggagctcccgtgccgtcatgggtgccatgaagccaggtgtctggtggcctgacatgcaccgcctggctgaccgcatccacctggaggagctggcccacatgggcatcctgagcggcagcgtggacgccatggtccaggctcacctgggggccgtgtttatgcctcacgggcttggccacttcctgggcattgacgtgcacgacgtgggaggctacccagagggcgtggagcgcatcgacgagcccggcctgcggagcctgcgcactgcacggcacctgcagccaggcatggtgctcaccgtggagccgggcatctacttcatcgaccacctcctggatgaggccctggcggacccggcccgcgcctccttccttaaccgcgaggtcctgcagcgctttcgcggttttggcggggtccgcatcgaggaggacgtcgtggtgactgacagcggcatagagctgctgacctgcgtgccccgcactgtggaagagattgaagcatgcatggcaggctgtgacaaggcctttacccccttctctggccccaagtagagccagccagaaatcccagcgcacctgggggcctggccttgcaacctcttttcgtgatgggcagcctgctggtcagcactccagtagcgagagacggcacccagaatcagatcccagcttcggcatttgatcagaccaaacagtgctgtttcccggggaggaaacacttttttaattacccttttgcaggctcccacctttaatctgttttataccttgcttattaaatgagcgacttaaaatgattgaaaataatgctgttctttagtagcaactaaaatgtgtcttgctgtcatttatattccttttcccaggaaagaagcatttctgatactttctgtcaaaaatcaatatgcagaatggcatttgcaataaaaggtttcctaaaa

SEQ ID NO: 309047 - DNA, 1783 bp, Homo sapiens
gggggcacttcacgtgacgccggtgccgggcgaacatggcggcggccaccggaccctcgttttggctggggaatgaaaccctgaaggtgccgctggcgctctttgccttgaaccggcagcgcctgtgtgagcggctgcggaagaaccctgctgtgcaggccggctccatcgtggtcctgcagggcggggaggagactcagcgctactgcaccgacaccggggtcctcttccgccaggagtccttctttcactgggcgttcggtgtcactgagccaggctgctatggtgtcatcgatgttgacactgggaagtcgaccctgtttgtgcccaggcttcctgccagccatgccacctggatgggaaagatccattccaaggagcacttcaaggagaagtatgccgtggacgacgtccagtacgtagatgagattgccagcgtcctgacgtcacagaagccctctgtcctcctcactttgcgtggcgtcaacacggacagcggcagtgtctgcagggaggcctcctttgacggcatcagcaagttcgaagtcaacaataccattcttcacccagagatcgttgagtgcctcttcgagcactactgctactcccggggcggcatgcgccacagctcctacacctgcatctgcggcagtggtgagaactcagccgtgctacactacggacacgccggagctcccaacgaccgaacgatccagaatggggatatgtgcctgttcgacatgggcggtgagtattactgcttcgcttccgacatcacctgctcctttcccgccaacggcaagttcactgcagaccagaaggccgtctatgaggcagtgctgcggagctcccgtgccgtcatgggtgccatgaagccaggtgtctggtggcctgacatgcaccgcctggctgaccgcatccacctggaggagctggcccacatgggcatcctgagcggcagcgtggacgccatggtccaggctcacctgggggccgtgtttatgcctcacgggcttggccacttcctgggcattgacgtgcacgacgtgggaggctacccagagggcgtggagcgcatcgacgagcccggcctgcggagcctgcgcactgcacggcacctgcagccaggcatggtgctcaccgtggagccgggcatctacttcatcgaccacctcctggatgaggccctggcggacccggcccgcgcctccttccttaaccgcgaggtcctgcagcgctttcgcggttttggcggggtccgcatcgaggaggacgtcgtggtgactgacagcggcatagagctgctgacctgcgtgccccgcactgtggaagagattgaagcatgcatggcaggctgtgacaaggcctttacccccttctctggccccaagtagagccagccagaaatcccagcgcacctgggggcctggccttgcaacctcttttcgtgatgggcagcctgctggtcagcactccagtagcgagagacggcacccagaatcagatcccagcttcggcatttgatcagaccaaacagtgctgtttcccggggaggaaacacttttttaattacccttttgcaggctcccacctttaatctgttttataccttgcttattaaatgagcgacttaaaatgattgaaaataatgctgttctttagtagcaactaaaatgtgtcttgctgtcatttatattccttttcccaggaaagaagcatttctgatactttctgtcaaaaatcaatatgcagaatggcatttgcaataaaaggtttcctaaaa

SEQ ID NO: 309048 - DNA, 2097 bp, Homo sapiens
gggggcacttcacgtgacgccggtgccgggcgaacatggcggcggccaccggaccctcgttttggctggggaatgaaaccctgaaggtgccgctggcgctctttgccttgaaccggcagcgcctgtgtgagcggctgcggaagaaccctgctgtgcaggccggctccatcgtggtcctgcagggcggggaggagactcagcgctactgcaccgacaccggggtcctcttccgccaggagtccttctttcactgggcgttcggtgtcactgagccaggctgctatggtgtcatcgatgttgacactgggaagtcgaccctgtttgtgcccaggcttcctgccagccatgccacctggatgggaaagatccattccaaggagcacttcaaggagaagtatgccgtggacgacgtccagtacgtagatgagattgccagcgtcctgacgtcacagaagccctctgtcctcctcactttgcgtggcgtcaacacggacagcggcagtgtctgcagggaggcctcctttgacggcatcagcaagttcgaagtcaacaataccattcttcacccagagatcgttgagtgccgagtgtttaagacggatatggagctggaggttctgcgctataccaataaaatctccagcgaggcccaccgtgaggtaatgaaggctgtaaaagtgggaatgaaagaatatgagttggaaagcctcttcgagcactactgctactcccggggcggcatgcgccacagctcctacacctgcatctgcggcagtggtgagaactcagccgtgctacactacggacacgccggagctcccaacgaccgaacgatccagaatggggatatgtgcctgttcgacatgggcggtgagtattactgcttcgcttccgacatcacctgctcctttcccgccaacggcaagttcactgcagaccagaaggccgtctatgaggcagtgctgcggagctcccgtgccgtcatgggtgccatgaagccaggtgtctggtggcctgacatgcaccgcctggctgaccgcatccacctggaggagctggcccacatgggcatcctgagcggcagcgtggacgccatggtccaggctcacctgggggccgtgtttatgcctcacgggcttggccacttcctgggcattgacgtgcacgacgtgggaggctacccagagggcgtggagcgcatcgacgagcccggcctgcggagcctgcgcactgcacggcacctgcagccaggcatggtgctcaccgtggagccgggcatctacttcatcgaccacctcctggatgaggccctggcggacccggcccgcgcctccttccttaaccgcgaggtcctgcagcgctttcgcggttttggcggggtccgcatcgaggaggacgtcgtggtgactgacagcggcatagagctgctgacctgcgtgccccgcactgtggaagagattgaagcatgcatggcaggctgtgacaaggcctttacccccttctctggccccaagtagagccagccagaaatcccagcgcacctgggggcctggccttgcaacctcttttcgtgatgggcagcctgctggtcagcactccagtagcgagagacggcacccagaatcagatcccagcttcggcatttgatcagaccaaacagtgctgtttcccggggaggaaacacttttttaattacccttttgcaggctcccacctttaatctgttttataccttgcttattaaatgagcgacttaaaatgattgaaaataatgctgttctttagtagcaactaaaatgtgtcttgctgtcatttatattccttttcccaggaaagaagcatttctgatactttctgtcaaaaatcaatatgcagaatggcatttgcaataaaaggtttcctaaaatggtcctttgtgcgtggcttcccctttattcctttgcagatgagcatttgggaccccgtgcaccctgaaaagatggctcacctggtgtcagtatcaagtcagttccaggaagatggtgctggcagcacaggccctctaacggctgcttctgcctcagactggcctggcgggacaagggcagagtcctcccc

SEQ ID NO: 309049 - DNA, 1415 bp, Homo sapiens
cttgcaccttgggcttcgattgacctcctcctctaacagaagttcaggttcgaagtcaacaataccattcttcacccagagatcgttgagtgccgagtgtttaagacggatatggagctggaggttctgcgctataccaataaaatctccagcgaggcccaccgtgaggtaatgaaggctgtaaaagtgggaatgaaagaatatgagttggaaagcctcttcgagcactactgctactcccggggcggcatgcgccacagctcctacacctgcatctgcggcagtggtgagaactcagccgtgctacactacggacacgccggagctcccaacgaccgaacgatccagaatggggatatgtgcctgttcgacatgggcggtgagtattactgcttcgcttccgacatcacctgctcctttcccgccaacggcaagttcactgcagaccagaaggccgtctatgaggcagtgctgcggagctcccgtgccgtcatgggtgccatgaagccaggtgtctggtggcctgacatgcaccgcctggctgaccgcatccacctggaggagctggcccacatgggcatcctgagcggcagcgtggacgccatggtccaggctcacctgggggccgtgtttatgcctcacgggcttggccacttcctgggcattgacgtgcacgacgtgggaggctacccagagggcgtggagcgcatcgacgagcccggcctgcggagcctgcgcactgcacggcacctgcagccaggcatggtgctcaccgtggagccgggcatctacttcatcgaccacctcctggatgaggccctggcggacccggcccgcgcctccttccttaaccgcgaggtcctgcagcgctttcgcggttttggcggggtccgcatcgaggaggacgtcgtggtgactgacagcggcatagagctgctgacctgcgtgccccgcactgtggaagagattgaagcatgcatggcaggctgtgacaaggcctttacccccttctctggccccaagtagagccagccagaaatcccagcgcacctgggggcctggccttgcaacctcttttcgtgatgggcagcctgctggtcagcactccagtagcgagagacggcacccagaatcagatcccagcttcggcatttgatcagaccaaacagtgctgtttcccggggaggaaacacttttttaattacccttttgcaggctcccacctttaatctgttttataccttgcttattaaatgagcgacttaaaatgattgaaaataatgctgttctttagtagcaactaaaatgtgtcttgctgtcatttatattccttttcccaggaaagaagcatttctgatactttctgtcaaaaatcaatatgcagaatggcatttgcaataaaaggtttcctaaaa

SEQ ID NO: 309050 - DNA, 1648 bp, Homo sapiens
tatgttgtcaaatgcttaattctaggtaattaaggctttacctcacatcgttaacatttttgtggtcagagtatgtgacattgtcaatgtttttcaaaaacacaactacattattatgatctgtagtcactatgctgtacaaaaagatctcttaaacttattcctcctattaaactataattatgtattctttgaccaacatcttccaaaaccccccttttttctaaataccttggtgtctgggtgtctgcagggaggcctcctttgacggcatcagcaagttcgaagtcaacaataccattcttcacccagagatcgttgagtgccgagtgtttaagacggatatggagctggaggttctgcgctataccaataaaatctccagcgaggcccaccgtgaggtaatgaaggctgtaaaagtgggaatgaaagaatatgagttggaaagcctcttcgagcactactgctactcccggggcggcatgcgccacagctcctacacctgcatctgcggcagtggtgagaactcagccgtgctacactacggacacgccggagctcccaacgaccgaacgatccagaatggggatatgtgcctgttcgacatgggcggtgagtattactgcttcgcttccgacatcacctgctcctttcccgccaacggcaagttcactgcagaccagaaggccgtctatgaggcagtgctgcggagctcccgtgccgtcatgggtgccatgaagccaggtgtctggtggcctgacatgcaccgcctggctgaccgcatccacctggaggagctggcccacatgggcatcctgagcggcagcgtggacgccatggtccaggctcacctgggggccgtgtttatgcctcacgggcttggccacttcctgggcattgacgtgcacgacgtgggaggctacccagagggcgtggagcgcatcgacgagcccggcctgcggagcctgcgcactgcacggcacctgcagccaggcatggtgctcaccgtggagccgggcatctacttcatcgaccacctcctggatgaggccctggcggacccggcccgcgcctccttccttaaccgcgaggtcctgcagcgctttcgcggttttggcggggtccgcatcgaggaggacgtcgtggtgactgacagcggcatagagctgctgacctgcgtgccccgcactgtggaagagattgaagcatgcatggcaggctgtgacaaggcctttacccccttctctggccccaagtagagccagccagaaatcccagcgcacctgggggcctggccttgcaacctcttttcgtgatgggcagcctgctggtcagcactccagtagcgagagacggcacccagaatcagatcccagcttcggcatttgatcagaccaaacagtgctgtttcccggggaggaaacacttttttaattacccttttgcaggctcccacctttaatctgttttataccttgcttattaaatgagcgacttaaaatgattgaaaataatgctgttctttagtagcaactaaaatgtgtcttgctgtcatttatattccttttcccaggaaagaagcatttctgatactttctgtcaaaaatcaatatgcagaatggcatttgcaataaaaggtttcctaaaa

SEQ ID NO: 309051 - DNA, 1519 bp, Homo sapiens
tgccaccagggctgtttcactgaggcaggagctctggctggtgccccctaccctgcatgccgtgggccttgacatggggccccagcctttgcctccagctgctcccagccgcttccctgtggacagtcttgtctgcattcctggggtccaggttcgaagtcaacaataccattcttcacccagagatcgttgagtgccgagtgtttaagacggatatggagctggaggttctgcgctataccaataaaatctccagcgaggcccaccgtgaggtaatgaaggctgtaaaagtgggaatgaaagaatatgagttggaaagcctcttcgagcactactgctactcccggggcggcatgcgccacagctcctacacctgcatctgcggcagtggtgagaactcagccgtgctacactacggacacgccggagctcccaacgaccgaacgatccagaatggggatatgtgcctgttcgacatgggcggtgagtattactgcttcgcttccgacatcacctgctcctttcccgccaacggcaagttcactgcagaccagaaggccgtctatgaggcagtgctgcggagctcccgtgccgtcatgggtgccatgaagccaggtgtctggtggcctgacatgcaccgcctggctgaccgcatccacctggaggagctggcccacatgggcatcctgagcggcagcgtggacgccatggtccaggctcacctgggggccgtgtttatgcctcacgggcttggccacttcctgggcattgacgtgcacgacgtgggaggctacccagagggcgtggagcgcatcgacgagcccggcctgcggagcctgcgcactgcacggcacctgcagccaggcatggtgctcaccgtggagccgggcatctacttcatcgaccacctcctggatgaggccctggcggacccggcccgcgcctccttccttaaccgcgaggtcctgcagcgctttcgcggttttggcggggtccgcatcgaggaggacgtcgtggtgactgacagcggcatagagctgctgacctgcgtgccccgcactgtggaagagattgaagcatgcatggcaggctgtgacaaggcctttacccccttctctggccccaagtagagccagccagaaatcccagcgcacctgggggcctggccttgcaacctcttttcgtgatgggcagcctgctggtcagcactccagtagcgagagacggcacccagaatcagatcccagcttcggcatttgatcagaccaaacagtgctgtttcccggggaggaaacacttttttaattacccttttgcaggctcccacctttaatctgttttataccttgcttattaaatgagcgacttaaaatgattgaaaataatgctgttctttagtagcaactaaaatgtgtcttgctgtcatttatattccttttcccaggaaagaagcatttctgatactttctgtcaaaaatcaatatgcagaatggcatttgcaataaaaggtttcctaaaa

SEQ ID NO: 309052 - DNA, 1438 bp, Homo sapiens
catcgctttggcatgccgtctgtaggcggatggggtctgtacgggacggctcctttgacggcatcagcaagttcgaagtcaacaataccattcttcacccagagatcgttgagtgccgagtgtttaagacggatatggagctggaggttctgcgctataccaataaaatctccagcgaggcccaccgtgaggtaatgaaggctgtaaaagtgggaatgaaagaatatgagttggaaagcctcttcgagcactactgctactcccggggcggcatgcgccacagctcctacacctgcatctgcggcagtggtgagaactcagccgtgctacactacggacacgccggagctcccaacgaccgaacgatccagaatggggatatgtgcctgttcgacatgggcggtgagtattactgcttcgcttccgacatcacctgctcctttcccgccaacggcaagttcactgcagaccagaaggccgtctatgaggcagtgctgcggagctcccgtgccgtcatgggtgccatgaagccaggtgtctggtggcctgacatgcaccgcctggctgaccgcatccacctggaggagctggcccacatgggcatcctgagcggcagcgtggacgccatggtccaggctcacctgggggccgtgtttatgcctcacgggcttggccacttcctgggcattgacgtgcacgacgtgggaggctacccagagggcgtggagcgcatcgacgagcccggcctgcggagcctgcgcactgcacggcacctgcagccaggcatggtgctcaccgtggagccgggcatctacttcatcgaccacctcctggatgaggccctggcggacccggcccgcgcctccttccttaaccgcgaggtcctgcagcgctttcgcggttttggcggggtccgcatcgaggaggacgtcgtggtgactgacagcggcatagagctgctgacctgcgtgccccgcactgtggaagagattgaagcatgcatggcaggctgtgacaaggcctttacccccttctctggccccaagtagagccagccagaaatcccagcgcacctgggggcctggccttgcaacctcttttcgtgatgggcagcctgctggtcagcactccagtagcgagagacggcacccagaatcagatcccagcttcggcatttgatcagaccaaacagtgctgtttcccggggaggaaacacttttttaattacccttttgcaggctcccacctttaatctgttttataccttgcttattaaatgagcgacttaaaatgattgaaaataatgctgttctttagtagcaactaaaatgtgtcttgctgtcatttatattccttttcccaggaaagaagcatttctgatactttctgtcaaaaatcaatatgcagaatggcatttgcaataaaaggtttcctaaaa

SEQ ID NO: 309053 - DNA, 976 bp, Homo sapiens
gggggcacttcacgtgacgccggtgccgggcgaacatggcggcggccaccggaccctcgttttggctggggaatgaaaccctgaaggtgccgctggcgctctttgccttgaaccggcagcgcctgtgtgagcggctgcggaagaaccctgctgtgcaggccggctccatcgtggtcctgcagggcggggaggagactcagcgctactgcaccgacaccggggtcctcttccgccaggagtccttctttcactgggcgttcggtgtcactgagccaggctgctatggtgtcatcgatgttgacactgggaagtcgaccctgtttgtgcccaggcttcctgccagccatgccacctggatgggaaagatccattccaaggagcacttcaaggagaagtatgccgtggacgacgtccagtacgtagatgagattgccagcgtcctgacgtcacagaagccctctgtcctcctcactttgcgtggcgtcaacacggacagcggcagtgtctgcagggaggcctcctttgacggcatcagcaagttcgaagtcaacaataccattcttcacccagagatcgttgagtgctgggagctctgactcgcctcgtcttagagcttgggaccaaggaggtatcctgaaagatgaatgggcatcggctgtggaaaaagaaggagtaggagagagtgaccctggcaaaaggaccactcgttcacagaaacaagagaaagggtggtggctctgtgtggccagtgcggagccagggagcagagcccgagaacagttggagagacaggcagtggctggccgagtgtttaagacggatatggagctggaggttctgcgctataccaataaaatctccagcgaggcccaccgtgaggtaatgaaggctgtaaaagtgggaatgaaagaatatgagttggaaaggtaagccaccatgtttctccgggtaaaattaaaaggtaaaaaacagtaaa

SEQ ID NO: 309054 - DNA, 692 bp, Homo sapiens
gggggcacttcacgtgacgccggtgccgggcgaacatggcggcggccaccggaccctcgttttggctggggaatgaaaccctgaaggtgccgctggcgctctttgccttgaaccggcagcgcctgtgtgagcggctgcggaagaaccctgctgtgcaggccggctccatcgtggtcctgcagggcggggaggagactcagcgctactgcaccgacaccggggtcctcttccgccaggagtccttctttcactgggcgttcggtgtcactgagccaggctgctatggtgtcatcgatgttgacactgggaagtcgaccctgtttgtgcccaggcttcctgccagccatgccacctggatgggaaaattgccagcgtcctgacgtcacagaagccctctgtcctcctcactttgcgtggcgtcaacacggacagcggcagtgtctgcagggaggcctcctttgacggcatcagcaagttcgaagtcaacaataccattcttcacccagagatcgttgagtgccgagtgtttaagacggatatggagctggaggttctgcgctataccaataaaatctccagcgaggcccaccgtgaggtaatgaaggctgtaaaagtgggaatgaaagaatatgagttggaaaggtaagccaccatgtttctccgggtaaaattaaaaggtaaaaaacagtaaa

SEQ ID NO: 309055 - DNA, 394 bp, Homo sapiens
atgaagctgcttgttcccggcattgtcctttttgacccttttaaatgtctctgcagcaccttgcaccttgggcttcgattgacctcctcctctaacagaagttcaggtttggcctcttggtttgacctgatgggcccccccagctccccttatcccctggcctgcagggaagaggagcttgtggtagacagtggtccccacctgtccacccagcctatacccttgggaccctggtccagctggatggttgggccaggacccctccaggtgtggctactcggggtgcctggcctggggtctgtcccatttgggctcagccttggtctcagacctccctccacctccccagatcagggccaggccgcctgctgcctgcagtaagagtgtgtggggt

SEQ ID NO: 309056 - DNA, 387 bp, Homo sapiens
gtgagtgctgcgcctccctcgctctttcccgctggcgtggagaggggcatgggtgtcccggccggaccgcgggtgagagcgtcagccggggtcgctgaatgccgcgggtaggcgcctcttcccgttggcccggagtcccagcgccggtcggcgagctgcacgctccgagtcagggtcagcgcgggggccgcagctcctctccaccctcctggctggctccggccccacctgcccgcgtctggcggccccaccgtgtgcggctgcggtgggggctggggtcgacacgcatgttcgctgccaagacccccgggtaggagggcggcgttgcgaggaccccagggacccgggcgcttcccggaggaggcggtattcgagacggacttggaa

SEQ ID NO: 309057 - DNA, 1630 bp, Homo sapiens
gggggcggcagcggaggtctctgcgcagcccagcccgccggtccacgccgcgcaccgctccgagggccagcgccacccgctccgcagccggcaccatgcgcgagatcgtgcacatccaggcgggccagtgcggcaaccagatcggcgccaagttttgggaggtcatcagcgatgagcatgggatcgaccccacaggcagttaccatggagacagtgacttgcagctggagagaatcaacgtgtactacaatgaggctgctggtaacaaatatgtacctcgggccatcctggtggatctggagcctggcaccatggactctgtcaggtctggacccttcggccagatcttcagaccagacaacttcgtgttcggccagagtggagccgggaataactgggccaagggccactacacagagggagccgagctggtcgactcggtcctggatgtggtgaggaaggagtcagagagctgtgactgtctccagggcttccagctgacccactctctggggggcggcacggggtccgggatgggcaccctgctcatcagcaagatccgggaagagtacccagaccgcatcatgaacaccttcagcgtcatgccctcacccaaggtgtcagacacggtggtggagccctacaacgccaccctctcggtccaccagctggtggaaaacacagatgaaacctactccattgataacgaggccctgtatgacatctgcttccgcaccctgaagctgaccacccccacctacggggacctcaaccacctggtgtcggccaccatgagcggggtcaccacctgcctgcgcttcccgggccagctgaacgcagacctgcgcaagctggcggtgaacatggtgcccttccctcgcctgcacttcttcatgcccggcttcgcgcccctgaccagccggggcagccagcagtaccgggcgctcacggtgcccgagctcacccagcagatgttcgactccaagaacatgatggccgcctgcgacccgcgccacggccgctacctgacggtggctgccatcttccggggccgcatgtccatgaaggaggtggacgagcagatgctcaacgtgcagaacaagaacagcagctacttcgtggagtggatccccaacaacgtgaagacggccgtgtgcgacatcccgccccgcggcctgaagatgtcggccaccttcatcggcaacagcacggccatccaggagctgttcaagcgcatctccgagcagttcacggccatgttccggcgcaaggccttcctgcactggtacacgggcgagggcatggacgagatggagttcaccgaggccgagagcaacatgaacgacctggtgtccgagtaccagcagtaccaggacgccacggccgacgaacaaggggagttcgaggaggaggagggcgaggacgaggcttaaaaacttctcagatcaatcgtgcatccttagtgaacttctgttgtcctcaagcatggtctttctacttgtaaactatggtgctcagttttgcctctgttagaaattcacactgttgatgtaatgatgtggaactcctctaaaaattacagtattgtctgtgaaggtatctatactaataaaaaagcatgtgtagaaaa

SEQ ID NO: 309058 - DNA, 912 bp, Homo sapiens
  misc_feature (685)..(685): n is a, c, g, or t
  misc_feature (689)..(689): n is a, c, g, or t
  misc_feature (699)..(699): n is a, c, g, or t
  misc_feature (701)..(701): n is a, c, g, or t
  misc_feature (745)..(745): n is a, c, g, or t
  misc_feature (773)..(773): n is a, c, g, or t
  misc_feature (819)..(819): n is a, c, g, or t
  misc_feature (900)..(900): n is a, c, g, or t
gggggcggcagcggaggtctctgcgcagcccagcccgccggtccacgccgcgcaccgctccgagggccagcgccacccgctccgcagccggcaccatgcgcgagatcgtgcacatccaggcgggccagtgcggcaaccagatcggcgccaagttttgggaggtcatcagcgatgagcatgggatcgaccccacaggcagttaccatggagacagtgacttgcagctggagagaatcaacgtgtactacaatgaggctgctggtaacaaatatgtacctcgggccatcctggtggatctggagcctggcaccatggactctgtcaggtctggacccttcggccagatcttcagaccagacaacttcgtgttcggccagagtggagccgggaataactgggccaagggccactacacagagggagccgagctggtcgactcggtcctggatgtggtgaggaaggagtcagagagctgtgactgtctccagggcttccagctgacccactctctggggggcggcacggggtccgggatgggcaccctgctcatcagcaagatccgggaagagtacccagaccgcatcatgaacaccttcagcgtcatgccctcacccaaggtgtcagacacggtggtggagccctacaacgccaccctctcggtccacacactgtgaacacagatganctantcattatacnangcctgatacactctcgcacctgagctacacccactacgggactnacactgttggcacatacggtacactctncttcggcactacaactccacgcgtaatgtctcccgctatttatcgntcgcctacacgggacaaacgcctagtcacacacaattataaatatcctacccagccattaggtattgggattataggtganattattaaaaaa

SEQ ID NO: 309059 - DNA, 587 bp, Homo sapiens
ttaattaaatatcccaacccatgcaggcggctcctgttgccccattccaattcaaaggcacatttaattccatgtggtaacatggtgtattatctacacctctcatgaacagcagccatggaccaggtcctcccagaaaggagagcgatgagggtccagggatatccattacccaggaagcaagacatggccagagaggaagggaaggagtgctgtgctgcagccagacagctggagctcatgaacagccccaaaatggaaaagttaatgaaagtcacagtgttgtctcttataaaaattttaaatgggctgggagcggtggcttacacctgtaatcccagcactttacaaggggagttcgaggaggaggagggcgaggacgaggcttaaaaacttctcagatcaatcgtgcatccttagtgaacttctgttgtcctcaagcatggtctttctacttgtaaactatggtgctcagttttgcctctgttagaaattcacactgttgatgtaatgatgtggaactcctctaaaaattacagtattgtctgtgaaggtatctatactaataaaaaagcatgtgtagaaaa

SEQ ID NO: 309060 - DNA, 1722 bp, Homo sapiens
gggggcggcagcggaggtctctgcgcagcccagcccgccggtccacgccgcgcaccgctccgagggccagcgccacccgctccgcagccggcaccatgcgcgagatcgtgcacatccaggcgggccagtgcggcaaccagatcggcgccaagttttgggaggtcatcagcgatgagcatgggatcgaccccacaggcagttaccatggagacagtgacttgcagctggagagaatcaacgtgtactacaatgaggctgctggtaacaaatatgtacctcgggccatcctggtggatctggagcctggcaccatggactctgtcaggtctggacccttcggccagatcttcagaccagacaacttcgtgttcggccagagtggagccgggaataactgggccaagggccactacacagagggagccgagctggtcgactcggtcctggatgtggtgaggaaggagtcagagagctgtgactgtctccagggcttccagctgacccactctctggggggcggcacggggtccgggatgggcaccctgctcatcagcaagatccgggaagagtacccagaccgcatcatgaacaccttcagcgtcatgccctcacccaaggtgtcagacacggtggtggagccctacaacgccaccctctcggtccaccagctggtggaaaacacagatgaaacctactccattgataacgaggccctgtatgacatctgcttccgcaccctgaagctgaccacccccacctacggggacctcaaccacctggtgtcggccaccatgagcggggtcaccacctgcctgcgcttcccgggccagctgaacgcagacctgcgcaagctggcggtgaacatggtgcccttccctcgcctgcacttcttcatgcccggcttcgcgcccctgaccagccggggcagccagcagtaccgggcgctcacggtgcccgagctcacccagcagatgttcgactccaagaacatgatggccgcctgcgacccgcgccacggccgctacctgacggtggctgccatcttccggggccgcatgtccatgaaggaggtggacgagcagatgctcaacgtgcagaacaagaacagcagctacttcgtggagtggatccccaacaacgtgaagacggccgtgtgcgacatcccgccccgcggcctgaagatgtcggccaccttcatcggcaacagcacggccatccaggagctgttcaagcgcatctccgagcagttcacggccatgttccggcgcaaggccttcctgcactggtacacgggcgagggcatggacgagatggagttcaccgaggccgagagcaacatgaacgacctggtgtccgagtaccagcagtaccaggacgccacggccgacgaacaaggggagttcgaggaggaggagggcgaggacgaggcttaaaaacttctcagatcaatcgtgcatccttagtgaacttctgttgtcctcaagcatggtctttctacttgtaaactatggtgctcagttttgcctctgttagaaattcacactgttgatgtaatgatgtggaactcctctaaaaattacagtattgtctgtgaaggtatctatactaataaaaaagcatgtgtagaaaaaaaacacaccccacaacccacacaccacacacccccgccgccacccccgcggccgcaacaggccaccacgcccccgggccaagggcccccag

SEQ ID NO: 309061 - DNA, 1908 bp, Homo sapiens
  misc_feature (1908)..(1908): n is a, c, g, or t
gggggcggcagcggaggtctctgcgcagcccagcccgccggtccacgccgcgcaccgctccgagggccagcgccacccgctccgcagccggcaccatgcgcgagatcgtgcacatccaggcgggccagtgcggcaaccagatcggcgccaagttttgggaggtcatcagcgatgagcatgggatcgaccccacaggcagttaccatggagacagtgacttgcagctggagagaatcaacgtgtactacaatgaggctgctggtaacaaatatgtacctcgggccatcctggtggatctggagcctggcaccatggactctgtcaggtctggacccttcggccagatcttcagaccagacaacttcgtgttcggccagagtggagccgggaataactgggccaagggccactacacagagggagccgagctggtcgactcggtcctggatgtggtgaggaaggagtcagagagctgtgactgtctccagggcttccagctgacccactctctggggggcggcacggggtccgggatgggcaccctgctcatcagcaagatccgggaagagtacccagaccgcatcatgaacaccttcagcgtcatgccctcacccaaggtgtcagacacggtggtggagccctacaacgccaccctctcggtccaccagctggtggaaaacacagatgaaacctactccattgataacgaggccctgtatgacatctgcttccgcaccctgaagctgaccacccccacctacggggacctcaaccacctggtgtcggccaccatgagcggggtcaccacctgcctgcgcttcccgggccagctgaacgcagacctgcgcaagctggcggtgaacatggtgcccttccctcgcctgcacttcttcatgcccggcttcgcgcccctgaccagccggggcagccagcagtaccgggcgctcacggtgcccgagctcacccagcagatgttcgactccaagaacatgatggccgcctgcgacccgcgccacggccgctacctgacggtggctgccatcttccggggccgcatgtccatgaaggaggtggacgagcagatgctcaacgtgcagaacaagaacagcagctacttcgtggagtggatccccaacaacgtgaagacggccgtgtgcgacatcccgccccgcggcctgaagatgtcggccaccttcatcggcaacagcacggccatccaggagctgttcaagcgcatctccgagcagttcacggccatgttccggcgcaaggccttcctgcactggtacacgggcgagggcatggacgagatggagttcaccgaggccgagagcaacatgaacgacctggtgtccgagtaccagcagtaccaggacgccacggccgacgaacaaggggagttcgaggaggaggagggcgaggacgaggtagatgcccccgcgagacgggttagggaaagcggaggaggaaagcgagggggtggggggcttcccgggacgataacctggcagtggaaggaaagaagcatggtctactttaggtgtgcgctgggtccctggtgctcttcactgttgcctgtcacttttttttccttttttgtaatattgatgacatcaatgtaacatttgagatatttctgaattactgttgtaatggctaaaatcacataaacgtttgtgtcggaatggtgtcctctctttctcttcctttttctctttattaacgatttaaatgtaactttctgaacacattgcattgaattcttcctttaacaaaaagcaaaggcgtaggtaaaagctcaaatgaatttattctttcggtatggtaaaattgaaccaatcacagttaagatgagagatcaacctgagttttaaaatacctttaataaatattagttgaaaaaatgtn

SEQ ID NO: 309062 - DNA, 1616 bp, Homo sapiens
  misc_feature (1532)..(1532): n is a, c, g, or t
  misc_feature (1534)..(1534): n is a, c, g, or t
  misc_feature (1536)..(1537): n is a, c, g, or t
  misc_feature (1540)..(1540): n is a, c, g, or t
  misc_feature (1614)..(1614): n is a, c, g, or t
gggggcggcagcggaggtctctgcgcagcccagcccgccggtccacgccgcgcaccgctccgagggccagcgccacccgctccgcagccggcaccatgcgcgagatcgtgcacatccaggcgggccagtgcggcaaccagatcggcgccaagttttgggaggtcatcagcgatgagcatgggatcgaccccacaggcagttaccatggagacagtgacttgcagctggagagaatcaacgtgtactacaatgaggctgctggtaacaaatatgtacctcgggccatcctggtggatctggagcctggcaccatggactctgtcaggtctggacccttcggccagatcttcagaccagacaacttcgtgttcggccagagtggagccgggaataactgggccaagggccactacacagagggagccgagctggtcgactcggtcctggatgtggtgaggaaggagtcagagagctgtgactgtctccagggcttccagctgacccactctctggggggcggcacggggtccgggatgggcaccctgctcatcagcaagatccgggaagagtacccagaccgcatcatgaacaccttcagcgtcatgccctcacccaaggtgtcagacacggtggtggagccctacaacgccaccctctcggtccaccagctggtggaaaacacagatgaaacctactccattgataacgaggccctgtatgacatctgcttccgcaccctgaagctgaccacccccacctacggggacctcaaccacctggtgtcggccaccatgagcggggtcaccacctgcctgcgcttcccgggccagctgaacgcagacctgcgcaagctggcggtgaacatggtgcccttccctcgcctgcacttcttcatgcccggcttcgcgcccctgaccagccggggcagccagcagtaccgggcgctcacggtgcccgagctcacccagcagatgttcgactccaagaacatgatggccgcctgcgacccgcgccacggccgctacctgacggtggctgccatcttccggggccgcatgtccatgaaggaggtggacgagcagatgctcaacgtgcagaacaagaacagcagctacttcgtggagtggatccccaacaacgtgaagacggccgtgtgcgacatcccgccccgcggcctgaagatgtcggccaccttcatcggcaacagcacggccatccaggagctgttcaagcgcatctccgagcagttcacggccatgttccggcgcaaggccttcctgcactggtacacgggcgagggcatggacgagatggagttcaccgaggccgagagcaacatgaacgacctggtgtccgagtaccagcagtaccaggacgccacggccgacgaacaaggggagttcgaggaggaggagggcgaggacgaggcttaaaaacttctcagatcaatcgtgcatccttagtgaacttctgttgtcctcaagcatggtctttctacttgtaaactatggtgacatacaagatatattacntntnntanaaatacacaactattagaatataatagaatagaaaaacaccaaataaaaataaacaatattaaaataataaaanta

SEQ ID NO: 309063 - DNA, 1559 bp, Homo sapiens
  misc_feature (1444)..(1444): n is a, c, g, or t
  misc_feature (1455)..(1455): n is a, c, g, or t
  misc_feature (1474)..(1474): n is a, c, g, or t
  misc_feature (1479)..(1479): n is a, c, g, or t
  misc_feature (1509)..(1509): n is a, c, g, or t
gggggcggcagcggaggtctctgcgcagcccagcccgccggtccacgccgcgcaccgctccgagggccagcgccacccgctccgcagccggcaccatgcgcgagatcgtgcacatccaggcgggccagtgcggcaaccagatcggcgccaagttttgggaggtcatcagcgatgagcatgggatcgaccccacaggcagttaccatggagacagtgacttgcagctggagagaatcaacgtgtactacaatgaggctgctggtaacaaatatgtacctcgggccatcctggtggatctggagcctggcaccatggactctgtcaggtctggacccttcggccagatcttcagaccagacaacttcgtgttcggccagagtggagccgggaataactgggccaagggccactacacagagggagccgagctggtcgactcggtcctggatgtggtgaggaaggagtcagagagctgtgactgtctccagggcttccagctgacccactctctggggggcggcacggggtccgggatgggcaccctgctcatcagcaagatccgggaagagtacccagaccgcatcatgaacaccttcagcgtcatgccctcacccaaggtgtcagacacggtggtggagccctacaacgccaccctctcggtccaccagctggtggaaaacacagatgaaacctactccattgataacgaggccctgtatgacatctgcttccgcaccctgaagctgaccacccccacctacggggacctcaaccacctggtgtcggccaccatgagcggggtcaccacctgcctgcgcttcccgggccagctgaacgcagacctgcgcaagctggcggtgaacatggtgcccttccctcgcctgcacttcttcatgcccggcttcgcgcccctgaccagccggggcagccagcagtaccgggcgctcacggtgcccgagctcacccagcagatgttcgactccaagaacatgatggccgcctgcgacccgcgccacggccgctacctgacggtggctgccatcttccggggccgcatgtccatgaaggaggtggacgagcagatgctcaacgtgcagaacaagaacagcagctacttcgtggagtggatccccaacaacgtgaagacggccgtgtgcgacatcccgccccgcggcctgaagatgtcggccaccttcatcggcaacagcacggccatccaggagctgttcaagcgcatctccgagcagttcacggccatgttccggcgcaaggccttcctgcactggtacacgggcgagggcatggacgagatggagttcaccgaggccgagagcaacatgaacgacctggtgtccgagtaccagcagtaccaggacgccacggccgacgaacaaggggagttcgaggaggaggagggcgaggacgagaacacaaaacaaacaancaaccaaaganacaacataaaaaccacaancaaanacaacatacatagaaaacaaaaaaacacanaaaaccacaaaaaaaaaaacacacagaagaaaaaagaaaaaaacaccaca

SEQ ID NO: 309064 - DNA, 1597 bp, Homo sapiens
gggggcggcagcggaggtctctgcgcagcccagcccgccggtccacgccgcgcaccgctccgagggccagcgccacccgctccgcagccggcaccatgcgcgagatcgtgcacatccaggcgggccagtgcggcaaccagatcggcgccaagttttgggaggtcatcagcgatgagcatgggatcgaccccacaggcagttaccatggagacagtgacttgcagctggagagaatcaacgtgtactacaatgaggctgctggtaacaaatatgtacctcgggccatcctggtggatctggagcctggcaccatggactctgtcaggtctggacccttcggccagatcttcagaccagacaacttcgtgttcggccagagtggagccgggaataactgggccaagggccactacacagagggagccgagctggtcgactcggtcctggatgtggtgaggaaggagtcagagagctgtgactgtctccagggcttccagctgacccactctctggggggcggcacggggtccgggatgggcaccctgctcatcagcaagatccgggaagagtacccagaccgcatcatgaacaccttcagcgtcatgccctcacccaaggtgtcagacacggtggtggagccctacaacgccaccctctcggtccaccagctggtggaaaacacagatgaaacctactccattgataacgaggccctgtatgacatctgcttccgcaccctgaagctgaccacccccacctacggggacctcaaccacctggtgtcggccaccatgagcggggtcaccacctgcctgcgcttcccgggccagctgaacgcagacctgcgcaagctggcggtgaacatggtgcccttccctcgcctgcacttcttcatgcccggcttcgcgcccctgaccagccggggcagccagcagtaccgggcgctcacggtgcccgagctcacccagcagatgttcgactccaagaacatgatggccgcctgcgacccgcgccacggccgctacctgacggtggctgccatcttccggggccgcatgtccatgaaggaggtggacgagcagatgctcaacgtgcagaacaagaacagcagctacttcgtggagtggatccccaacaacgtgaagacggccgtgtgcgacatcccgccccgcggcctgaagatgtcggccaccttcatcggcaacagcacggccatccaggagctgttcaagcgcatctccgagcagttcacggccatgttccggcgcaaggccttcctgcactggtacacgggcgagggcatggacgagatggagttcaccgaggccgagagcaacatgaacgacctggtgtccgagtaccagcagtaccaggacgccacggccgacgaacaaggggagttcgaggaggaggagggcgaggacgagaggaggtggcctagagccttcagtcactggggaaagcagggaagcagtgtgaactctttattcactcccagcctgtcctgtggcctgtcccactgtgtgcacttgctgttttccctgtccacatccatgctgtacagacaccaccattaaagcattttcatagtgaaaaa

SEQ ID NO: 309065 - DNA, 1891 bp, Homo sapiens
gggggcggcagcggaggtctctgcgcagcccagcccgccggtccacgccgcgcaccgctccgagggccagcgccacccgctccgcagccggcaccatgcgcgagatcgtgcacatccaggcgggccagtgcggcaaccagatcggcgccaagttttgggaggtcatcagcgatgagcatgggatcgaccccacaggcagttaccatggagacagtgacttgcagctggagagaatcaacgtgtactacaatgaggctgctggtaacaaatatgtacctcgggccatcctggtggatctggagcctggcaccatggactctgtcaggtctggacccttcggccagatcttcagaccagacaacttcgtgttcggccagagtggagccgggaataactgggccaagggccactacacagagggagccgagctggtcgactcggtcctggatgtggtgaggaaggagtcagagagctgtgactgtctccagggcttccagctgacccactctctggggggcggcacggggtccgggatgggcaccctgctcatcagcaagatccgggaagagtacccagaccgcatcatgaacaccttcagcgtcatgccctcacccaaggtgtcagacacggtggtggagccctacaacgccaccctctcggtccaccagctggtggaaaacacagatgaaacctactccattgataacgaggccctgtatgacatctgcttccgcaccctgaagctgaccacccccacctacggggacctcaaccacctggtgtcggccaccatgagcggggtcaccacctgcctgcgcttcccgggccagctgaacgcagacctgcgcaagctggcggtgaacatggtgcccttccctcgcctgcacttcttcatgcccggcttcgcgcccctgaccagccggggcagccagcagtaccgggcgctcacggtgcccgagctcacccagcagatgttcgactccaagaacatgatggccgcctgcgacccgcgccacggccgctacctgacggtggctgccatcttccggggccgcatgtccatgaaggaggtggacgagcagatgctcaacgtgcagaacaagaacagcagctacttcgtggagtggatccccaacaacgtgaagacggccgtgtgcgacatcccgccccgcggcctgaagatgtcggccaccttcatcggcaacagcacggccatccaggagctgttcaagcgcatctccgagcagttcacggccatgttccggcgcaaggccttcctgcactggtacacgggcgagggcatggacgagatggagttcaccgaggccgagagcaacatgaacgacctggtgtccgagtaccagcagtaccaggacgccacggccgacgaaatgacggggaggaagcttttgaggatgaggaagaggagatcgatggatagtcggaatagagccgccccaactcagatcctacaacacgcaattccttcttgaaccctggtgcctcctaccctatggccctgaatggtgcactggtttaattgtgttggtgtcggcccctcacaaatgcagccaagtcatgtaattagtcatctggaacaaagactaaaaacagcagagaattgcggggttctacccagtcagaagatcacaccatggagactttctactagaggacttgaaagagaactgaggggccacaaaataaacttcaccttccattaagtgttcaagcatgtctgcaaattaggagggagttagaaacagtctttttcatcctttgtgatgaagcctgaaattgtgccgtgttgccttatatgaatatgcagtatgggactttgaaataatgattcataataaaatactaaacgtgtgtcttcatctctctaaaa

SEQ ID NO: 309066 - DNA, 1504 bp, Homo sapiens
gggggcggcagcggaggtctctgcgcagcccagcccgccggtccacgccgcgcaccgctccgagggccagcgccacccgctccgcagccggcaccatgcgcgagatcgtgcacatccaggcgggccagtgcggcaaccagatcggcgccaagttttgggaggtcatcagcgatgagcatgggatcgaccccacaggcagttaccatggagacagtgacttgcagctggagagaatcaacgtgtactacaatgaggctgctggtaacaaatatgtacctcgggccatcctggtggatctggagcctggcaccatggactctgtcaggtctggacccttcggccagatcttcagaccagacaacttcgtgttcggccagagtggagccgggaataactgggccaagggccactacacagagggagccgagctggtcgactcggtcctggatgtggtgaggaaggagtcagagagctgtgactgtctccagggcttccagctgacccactctctggggggcggcacggggtccgggatgggcaccctgctcatcagcaagatccgggaagagtacccagaccgcatcatgaacaccttcagcgtcatgccctcacccaaggtgtcagacacggtggtggagccctacaacgccaccctctcggtccaccagctggtggaaaacacagatgaaacctactccattgataacgaggccctgtatgacatctgcttccgcaccctgaagctgaccacccccacctacggggacctcaaccacctggtgtcggccaccatgagcggggtcaccacctgcctgcgcttcccgggccagctgaacgcagacctgcgcaagctggcggtgaacatggtgcccttccctcgcctgcacttcttcatgcccggcttcgcgcccctgaccagccggggcagccagcagtaccgggcgctcacggtgcccgagctcacccagcagatgttcgactccaagaacatgatggccgcctgcgacccgcgccacggccgctacctgacggtggctgccatcttccggggccgcatgtccatgaaggaggtggacgagcagatgctcaacgtgcagaacaagaacagcagctacttcgtggagtggatccccaacaacgtgaagacggccgtgtgcgacatcccgccccgcggcctgaagatgtcggccaccttcatcggcaacagcacggccatccaggagctgttcaagcgcatctccgagcagttcacggccatgttccggcgcaaggccttcctgcactggtacacgggcgagggcatggacgagatggagttcaccgaggccgagagcaggaggtggcctagagccttcagtcactggggaaagcagggaagcagtgtgaactctttattcactcccagcctgtcctgtggcctgtcccactgtgtgcacttgctgttttccctgtccacatccatgctgtacagacaccaccattaaagcattttcatagtgaaaaa

SEQ ID NO: 309067 - DNA, 1596 bp, Homo sapiens
gggggcggcagcggaggtctctgcgcagcccagcccgccggtccacgccgcgcaccgctccgagggccagcgccacccgctccgcagccggcaccatgcgcgagatcgtgcacatccaggcgggccagtgcggcaaccagatcggcgccaagttttgggaggtcatcagcgatgagcatgggatcgaccccacaggcagttaccatggagacagtgacttgcagctggagagaatcaacgtgtactacaatgaggctgctggtaacaaatatgtacctcgggccatcctggtggatctggagcctggcaccatggactctgtcaggtctggacccttcggccagatcttcagaccagacaacttcgtgttcggccagagtggagccgggaataactgggccaagggccactacacagagggagccgagctggtcgactcggtcctggatgtggtgaggaaggagtcagagagctgtgactgtctccagggcttccagctgacccactctctggggggcggcacggggtccgggatgggcaccctgctcatcagcaagatccgggaagagtacccagaccgcatcatgaacaccttcagcgtcatgccctcacccaaggtgtcagacacggtggtggagccctacaacgccaccctctcggtccaccagctggtggaaaacacagatgaaacctactccattgataacgaggccctgtatgacatctgcttccgcaccctgaagctgaccacccccacctacggggacctcaaccacctggtgtcggccaccatgagcggggtcaccacctgcctgcgcttcccgggccagctgaacgcagacctgcgcaagctggcggtgaacatggtgcccttccctcgcctgcacttcttcatgcccggcttcgcgcccctgaccagccggggcagccagcagtaccgggcgctcacggtgcccgagctcacccagcagatgttcgactccaagaacatgatggccgcctgcgacccgcgccacggccgatgtccatgaaggaggtggacgagcagatgctcaacgtgcagaacaagaacagcagctacttcgtggagtggatccccaacaacgtgaagacggccgtgtgcgacatcccgccccgcggcctgaagatgtcggccaccttcatcggcaacagcacggccatccaggagctgttcaagcgcatctccgagcagttcacggccatgttccggcgcaaggccttcctgcactggtacacgggcgagggcatggacgagatggagttcaccgaggccgagagcaacatgaacgacctggtgtccgagtaccagcagtaccaggacgccacggccgacgaacaaggggagttcgaggaggaggagggcgaggacgaggcttaaaaacttctcagatcaatcgtgcatccttagtgaacttctgttgtcctcaagcatggtctttctacttgtaaactatggtgctcagttttgcctctgttagaaattcacactgttgatgtaatgatgtggaactcctctaaaaattacagtattgtctgtgaaggtatctatactaataaaaaagcatgtgtagaaaa

SEQ ID NO: 309068 - DNA, 1563 bp, Homo sapiens
gggggcggcagcggaggtctctgcgcagcccagcccgccggtccacgccgcgcaccgctccgagggccagcgccacccgctccgcagccggcaccatgcgcgagatcgtgcacatccaggcgggccagtgcggcaaccagatcggcgccaagttttgggaggtcatcagcgatgagcatgggatcgaccccacaggcagttaccatggagacagtgacttgcagctggagagaatcaacgtgtactacaatgaggctgctggtaacaaatatgtacctcgggccatcctggtggatctggagcctggcaccatggactctgtcaggtctggacccttcggccagatcttcagaccagacaacttcgtgttcggccagagtggagccgggaataactgggccaagggccactacacagagggagccgagctggtcgactcggtcctggatgtggtgaggaaggagtcagagagctgtgactgtctccagggcttccagctgacccactctctggggggcggcacggggtccgggatgggcaccctgctcatcagcaagatccgggaagagtacccagaccgcatcatgaacaccttcagcgtcatgccctcacccaaggtgtcagacacggtggtggagccctacaacgccaccctctcggtccaccagctggtggaaaacacagatgaaacctactccattgataacgaggccctgtatgacatctgcttccgcaccctgaagctgaccacccccacctacggggacctcaaccacctggtgtcggccaccatgagcggggtcaccacctgcctgcgcttcccgggccagctgaacgcagacctgcgcaagctggcggtgaacatggtgcccttccctcgcctgcacttcttcatgcccggcttcgcgcccctgaccagccggggcagccagcagtaccgggcgctcacggtgcccgagctcacccagcagatgttcgactccaagaacatgatggccgcctgcgacccgcgccacggccgatgtccatgaaggaggtggacgagcagatgctcaacgtgcagaacaagaacagcagctacttcgtggagtggatccccaacaacgtgaagacggccgtgtgcgacatcccgccccgcggcctgaagatgtcggccaccttcatcggcaacagcacggccatccaggagctgttcaagcgcatctccgagcagttcacggccatgttccggcgcaaggccttcctgcactggtacacgggcgagggcatggacgagatggagttcaccgaggccgagagcaacatgaacgacctggtgtccgagtaccagcagtaccaggacgccacggccgacgaacaaggggagttcgaggaggaggagggcgaggacgagaggaggtggcctagagccttcagtcactggggaaagcagggaagcagtgtgaactctttattcactcccagcctgtcctgtggcctgtcccactgtgtgcacttgctgttttccctgtccacatccatgctgtacagacaccaccattaaagcattttcatagtgaaaaa

SEQ ID NO: 309069 - DNA, 1762 bp, Homo sapiens
gggggcggcagcggaggtctctgcgcagcccagcccgccggtccacgccgcgcaccgctccgagggccagcgccacccgctccgcagccggcaccatgcgcgagatcgtgcacatccaggcgggccagtgcggcaaccagatcggcgccaagttttgggaggtcatcagcgatgagcatgggatcgaccccacaggcagttaccatggagacagtgacttgcagctggagagaatcaacgtgtactacaatgaggctgctggtaacaaatatgtacctcgggccatcctggtggatctggagcctggcaccatggactctgtcaggtctggacccttcggccagatcttcagaccagacaacttcgtgttcggtaaaagaagagtattcaaaagagaagaatctgccagtctaagaccagtcctaccttctcctccatagtcaaaatgacagattttgaaattccttatgttttagtgtctaatgttcactttccctctggcaggccagagtggagccgggaataactgggccaagggccactacacagagggagccgagctggtcgactcggtcctggatgtggtgaggaaggagtcagagagctgtgactgtctccagggcttccagctgacccactctctggggggcggcacggggtccgggatgggcaccctgctcatcagcaagatccgggaagagtacccagaccgcatcatgaacaccttcagcgtcatgccctcacccaaggtgtcagacacggtggtggagccctacaacgccaccctctcggtccaccagctggtggaaaacacagatgaaacctactccattgataacgaggccctgtatgacatctgcttccgcaccctgaagctgaccacccccacctacggggacctcaaccacctggtgtcggccaccatgagcggggtcaccacctgcctgcgcttcccgggccagctgaacgcagacctgcgcaagctggcggtgaacatggtgcccttccctcgcctgcacttcttcatgcccggcttcgcgcccctgaccagccggggcagccagcagtaccgggcgctcacggtgcccgagctcacccagcagatgttcgactccaagaacatgatggccgcctgcgacccgcgccacggccgctacctgacggtggctgccatcttccggggccgcatgtccatgaaggaggtggacgagcagatgctcaacgtgcagaacaagaacagcagctacttcgtggagtggatccccaacaacgtgaagacggccgtgtgcgacatcccgccccgcggcctgaagatgtcggccaccttcatcggcaacagcacggccatccaggagctgttcaagcgcatctccgagcagttcacggccatgttccggcgcaaggccttcctgcactggtacacgggcgagggcatggacgagatggagttcaccgaggccgagagcaacatgaacgacctggtgtccgagtaccagcagtaccaggacgccacggccgacgaacaaggggagttcgaggaggaggagggcgaggacgaggcttaaaaacttctcagatcaatcgtgcatccttagtgaacttctgttgtcctcaagcatggtctttctacttgtaaactatggtgctcagttttgcctctgttagaaattcacactgttgatgtaatgatgtggaactcctctaaaaattacagtattgtctgtgaaggtatctatactaataaaaaagcatgtgtagaaaa

SEQ ID NO: 309070 - DNA, 2331 bp, Homo sapiens
gggggcggcagcggaggtctctgcgcagcccagcccgccggtccacgccgcgcaccgctccgagggccagcgccacccgctccgcagccggcaccatgcgcgagatcgtgcacatccaggcgggccagtgcggcaaccagatcggcgccaagttttgggaggtcatcagcgatgagcatgggatcgaccccacaggcagttaccatggagacagtgacttgcagctggagagaatcaacgtgtactacaatgaggctgctggtaacaaatatgtacctcgggccatcctggtggatctggagcctggcaccatggactctgtcaggtctggacccttcggccagatcttcagaccagacaacttcgtgttcggtatgtagtcatgatcactgggaactggccaaatgacacaccttcttcctaacagccctgcaaagcacagttcttagtgttcagtgccaaggtgacactgtgtccacggcagccctgagtcctggcctagctccatgcagtccatgggtggtcatggctcacagatcaacgccagcctgcagagggctgctgcagccctcccattgcagagcagcctcagactggaaggaagaaagagcaaggaaaagcttcaagccaggcttcataggctataggcaacttgaaaggacttcaaagagccaggggccaaaagcacaggttatgaccagagctagacagatgctgaggccaccttctctgctggtcacactgccttcaccttgcctgtttaattgtagttgagtataaagagaatgcctcttaaaaatgtatgtatttcagaaccaattaagttttctaaccctatcctcttcctcaatcaatagcctcagatgagctaaacttacttcttactttattatgatccccagtgtttttgaggtcactgacatagaaaaatatttcttcaggtaaaagaagagtattcaaaagagaagaatctgccagtctaagaccagtcctaccttctcctccatagtcaaaatgacagattttgaaattccttatgttttagtgtctaatgttcactttccctctggcaggccagagtggagccgggaataactgggccaagggccactacacagagggagccgagctggtcgactcggtcctggatgtggtgaggaaggagtcagagagctgtgactgtctccagggcttccagctgacccactctctggggggcggcacggggtccgggatgggcaccctgctcatcagcaagatccgggaagagtacccagaccgcatcatgaacaccttcagcgtcatgccctcacccaaggtgtcagacacggtggtggagccctacaacgccaccctctcggtccaccagctggtggaaaacacagatgaaacctactccattgataacgaggccctgtatgacatctgcttccgcaccctgaagctgaccacccccacctacggggacctcaaccacctggtgtcggccaccatgagcggggtcaccacctgcctgcgcttcccgggccagctgaacgcagacctgcgcaagctggcggtgaacatggtgcccttccctcgcctgcacttcttcatgcccggcttcgcgcccctgaccagccggggcagccagcagtaccgggcgctcacggtgcccgagctcacccagcagatgttcgactccaagaacatgatggccgcctgcgacccgcgccacggccgctacctgacggtggctgccatcttccggggccgcatgtccatgaaggaggtggacgagcagatgctcaacgtgcagaacaagaacagcagctacttcgtggagtggatccccaacaacgtgaagacggccgtgtgcgacatcccgccccgcggcctgaagatgtcggccaccttcatcggcaacagcacggccatccaggagctgttcaagcgcatctccgagcagttcacggccatgttccggcgcaaggccttcctgcactggtacacgggcgagggcatggacgagatggagttcaccgaggccgagagcaacatgaacgacctggtgtccgagtaccagcagtaccaggacgccacggccgacgaacaaggggagttcgaggaggaggagggcgaggacgaggcttaaaaacttctcagatcaatcgtgcatccttagtgaacttctgttgtcctcaagcatggtctttctacttgtaaactatggtgctcagttttgcctctgttagaaattcacactgttgatgtaatgatgtggaactcctctaaaaattacagtattgtctgtgaaggtatctatactaataaaaaagcatgtgtagaaaa

SEQ ID NO: 309071 - DNA, 1268 bp, Homo sapiens
  misc_feature (109)..(109): n is a, c, g, or t
aatagactccctcctaaagggccttccatgtaagcagaacgaaccttggcacacaattcagtgtggatatttgggaaacagttccaagtggaatatataatatcagtcnggaaaagatttcattaggatagctttttgtgtatgtatatgtatatttatttttaggaatagatctatagttgtacatgaattcctgttaggaatactctgaatgagcttaacccacttgccaaatatccttgtcccttccatcattttatttttgagatggggtcttgcagtgttgcccaggctggactcaaactctggggcttaatcatccttctgagtagctgggactacataaaggccaaagtataattgcttttgatttttaaaatcttcttgcccatcatttttataaaaataaagctgtttgtccaacacggtgaaacctcatctctactaaaaatacaaaaaattagctgggcatggtggcacacgcctgtaatcccagctacttgggagactgaggcaggagaattgcttgaacctgggagatgggggttgcagtgagcctagatcacgccactgcactccagtgtgggcggcagagtgagactctgtctcacccaaaaaaaaaaaaaaaaagctattgacactgttaatattttggatgacttaaatttagcagctctagaatgcaaagggtatattaaggagcattacaatagtgaaccttcatcgtcagcttttattcaattaagagctccagaaatgcagaaattatgggttaacttctaagaataccatcaaatccctgtgaattctggttgccaacagtaataaccagtaatgggcacctttaccggacagctcctttaccataaccagtagtgggcagttctgcggtcagcacttaactacaagggcggtctctgtttcttcaccagagagagaagattttcctgtgtaatttgtgccatttccctgaagttggttcttgagcggaaagatgtgcttggtaaccagacagcagctttacataggttatagattttgctcattgatgctgttaagaattatttccactcatacctgttcagggctccagacagccaatagccttcatcccacagtttgggcttcagctattaacacataaagataaccagttgcagctaccgtgcctggctgacaattttttattattttattttattttattttattttattttatttgagacagactccagcctgggcaacaagagcaaaactctgtctcaa

SEQ ID NO: 309072 - DNA, 1308 bp, Homo sapiens
  misc_feature (149)..(149): n is a, c, g, or t
gtatccacactgaattgtgtgccaaggttcgttctgcttacatggaaggccctttagagggagtctattgtcatcagaacgaaccttggcacacaattcagtgtggatatttgggaaacagttccaagtggaatatataatatcagtcnggaaaagatttcattaggatagctttttgtgtatgtatatgtatatttatttttaggaatagatctatagttgtacatgaattcctgttaggaatactctgaatgagcttaacccacttgccaaatatccttgtcccttccatcattttatttttgagatggggtcttgcagtgttgcccaggctggactcaaactctggggcttaatcatccttctgagtagctgggactacataaaggccaaagtataattgcttttgatttttaaaatcttcttgcccatcatttttataaaaataaagctgtttgtccaacacggtgaaacctcatctctactaaaaatacaaaaaattagctgggcatggtggcacacgcctgtaatcccagctacttgggagactgaggcaggagaattgcttgaacctgggagatgggggttgcagtgagcctagatcacgccactgcactccagtgtgggcggcagagtgagactctgtctcacccaaaaaaaaaaaaaaaaagctattgacactgttaatattttggatgacttaaatttagcagctctagaatgcaaagggtatattaaggagcattacaatagtgaaccttcatcgtcagcttttattcaattaagagctccagaaatgcagaaattatgggttaacttctaagaataccatcaaatccctgtgaattctggttgccaacagtaataaccagtaatgggcacctttaccggacagctcctttaccataaccagtagtgggcagttctgcggtcagcacttaactacaagggcggtctctgtttcttcaccagagagagaagattttcctgtgtaatttgtgccatttccctgaagttggttcttgagcggaaagatgtgcttggtaaccagacagcagctttacataggttatagattttgctcattgatgctgttaagaattatttccactcatacctgttcagggctccagacagccaatagccttcatcccacagtttgggcttcagctattaacacataaagataaccagttgcagctaccgtgcctggctgacaattttttattattttattttattttattttattttattttatttgagacagactccagcctgggcaacaagagcaaaactctgtctcaa

SEQ ID NO: 309073 - DNA, 591 bp, Homo sapiens
agctcctttaccataaccagtagtgggcagttctgcggtcagcacttaactacaagggcggtctctgtttcttcaccagagagagaagattttcctgtgtaatttgtgccatttccctgaagttggttcttgagcggaaagatgtgcttggtaaccagacagcagctttacataggttatagattttgctcattgatgctgttaagaattatttccactcatacctgttcagggctccagacagccaatagccttcatcccacagtttgggcttcagctattaacacataaagataaccagttgcagctaggctcggtggctcacacctgtaatcccagcactttgggaggccaaggcgggtggatcacctgagggcaggagtttgagacaggcctggccaacatggtgaaactccatctctactaaaaatacaaaaattagccgggtgtggtggcccatgcctgtaattccagctactcgggaggctgaggcaggagaatcacttaaacctgggaggcggaggttgtggtgagcagagatcacgccattgcactccagcctgggcaacaagagcaaaactctgtctcaaa

SEQ ID NO: 309074 - DNA, 1120 bp, Homo sapiens
gtttgtgtctggagccgtagcggcaagtgggcttgcggctaagggattttcctgggatgagagcgggtcttctgccttcattttggatgcacatcccgctttagccccggcagcctttggtccggctcgtgtccctggggattctcggatctccgaggacaccggacgggagcgcttggccatcctctctccggcagaggagcagacgtttgctttccaagtgcaaaactacagacacgcgcgcgcacacacgcaagcacacgcggagagagaggaaccttgccggtccgaggcagctctgcgcgtcccctcctgcgcttagcatcctcggcccagcgcggcccgcaccgccatggaggtgctggagagcggggagcagggcgtgctgcagtgggaccgcaagctgagcgagctgtcagagcccggggacggcgaggccctcatgtaccacacgcacttctcagaacttctggatgagttttcccagaacgtcttgggtcagctcctgaatgatcctttcctctcagagaagagtgtgtcaatggaggtggaaccttccccgacgtccccggcgcctctcatccaggctgagcacagctactccctgtgcgaggagcctcgggcccagtcgcccttcacccacattaccaccagtgacagcttcaatgacgatgaggtggaaagtgagaaatggtacctgtctacagacttcccttcaacatccatcaagacagagccaattacagacgaaccacccccaggactcgttccgtctgtcactctgaccatcacagccatctccaccccgttggaaaaggaggaacctcctctggaaatgaacactggggttgattcctcgtgccagaccattattcctaaaattaagctggagcctcatgaagtggatcagtttctaaacttctctcctaaagaaggtctgtctgccctccctgtgtccctttgggttatggatatggtctctgggtctacagagagggaatatggcgagagagctgggatgagtttgtaccacagatgttgtagctggctttatgaaatagctctgttcttaaaaaataaaaattttgcttccaaataaaaattttgcaagctaactatt

SEQ ID NO: 309075 - DNA, 1013 bp, Homo sapiens
cgaagtatttgtggtggctgagagtggcttgtttaaaaaaaatgcagagtgcagggctgagagggagtggtagttcatgctggggcaaaagccagatgttcagtgtgatcttctgggctttgcttgctgagcttgtcatggggacactatgtgggcagcacggaggttggggtaccagatgtgcttcctgtcctcagtaaagaacttggagtatgttgttcctcaaatatcttttgatgaatgggtgctccaggagtttctactgacaggctacattttatccatatgcagaggggcagcccttctcttttgttcttgaagtattctttcgctgtgacagtgtctcatccagcagctgcaatgccacagctagggggttgtctttcagctggtgggatgaattacgcacaggcatctaccttgctgttctttggccctgtagcttgcatttgtgagttcacagggaaaggtgcgagatgctacccgtgactgtggcattcactctgggaagaactgcttggactggctctaactaacaccttatgcacactttcagggagtagaggccttacatttgctttgatattaacagcccagtttttctgtcattgtgataaagcaggaatgtgtgattatttttcttttatttctatttttaaaaaatgcttattatgtcctccacttaggtacatgtctgttgtgaacagctcattcctgtaaaatgctgctcatcattgctgcaagtcagtgcaacaaactgtgcatatgaattactgttgaaagaggtattggtttagcagcacaaatgattgggttatatttctctcaaactaagggacgtttgggagaggtggggagataattttcccatctgtttcctgaactctgttagatatccaggggcagagctgtttgttactctagctgaatctttatgtagaaaaaggatggcctgattattcattcagtcagagagatatttgttctttcgattaatatttgtggaatatata

SEQ ID NO: 309076 - DNA, 781 bp, Homo sapiens
gtttgtgtctggagccgtagcggcaagtgggcttgcggctaagggattttcctgggatgagagcgggtcttctgccttcattttggatgcacatcccgctttagccccggcagcctttggtccggctcgtgtccctggggattctcggatctccgaggacaccggacgggagcgcttggccatcctctctccggcagaggagcagacgtttgctttccaagtgcaaaactacagacacgcgcgcgcacacacgcaagcacacgcggagagagaggaaccttgccggtccgaggcagctctgcgcgtcccctcctgcgcttagcatcctcggcccagcgcggcccgcaccgccatggaggtgctggagagcggggagcagggcgtgctgcagtgggaccgcaagctgagcgagctgtcagagcccggggacggcgaggccctcatgtaccacacggtacatgtctgttgtgaacagctcattcctgtaaaatgctgctcatcattgctgcaagtcagtgcaacaaactgtgcatatgaattactgttgaaagaggtattggtttagcagcacaaatgattgggttatatttctctcaaactaagggacgtttgggagaggtggggagataattttcccatctgtttcctgaactctgttagatatccaggggcagagctgtttgttactctagctgaatctttatgtagaaaaaggatggcctgattattcattcagtcagagagatatttgttctttcgattaatatttgtggaatatata

SEQ ID NO: 309077 - DNA, 404 bp, Homo sapiens
agggacttaactgtaaagtggcgtagggagaggactgttgagtggaaatggagccagtgattgagaaactgagcacttctcagaacttctggatgagttttcccagaacgtcttgggtcagctcctgaatgatcctttcctctcagagaagagtgtgtcaatggaggtggaaccttccccgacgtccccggcgcctctcatccaggctgagcacagctactccctgtgcgaggagcctcgggcccagtcgcccttcacccacattaccaccagtgacagcttcaatgacggtaaactcagaggaggaggaagacctggaccttagcgcctttggttctgagctcttgagggtgtggagtgtgtattatattaaagagggtgtcagcacccttattagtgagata

SEQ ID NO: 309078 - DNA, 1210 bp, Homo sapiens
gtttgtgtctggagccgtagcggcaagtgggcttgcggctaagggattttcctgggatgagagcgggtcttctgccttcattttggatgcacatcccgctttagccccggcagcctttggtccggctcgtgtccctggggattctcggatctccgaggacaccggacgggagcgcttggccatcctctctccggcagaggagcagacgtttgctttccaagtgcaaaactacagacacgcgcgcgcacacacgcaagcacacgcggagagagaggaaccttgccggtccgaggcagctctgcgcgtcccctcctgcgcttagcatcctcggcccagcgcggcccgcaccgccatggaggtgctggagagcggggagcagggcgtgctgcagtgggaccgcaagctgagcgagctgtcagagcccggggacggcgaggccctcatgtaccacacgcacttctcagaacttctggatgagttttcccagaacgtcttgggtcagctcctgaatgatcctttcctctcagagaagagtgtgtcaatggaggtggaaccttccccgacgtccccggcgcctctcatccaggctgagcacagctactccctgtgcgaggagcctcgggcccagtcgcccttcacccacattaccaccagtgacagcttcaatgacgatgaggtggaaagtgagaaatggtacctgtctacagacttcccttcaacatccatcaagacagagccaattacagacgaaccacccccaggactcgttccgtctgtcactctgaccatcacagccatctccaccccgttggaaaaggaggaacctcctctggaaatgaacactggggttgattcctcgtgccagaccattattcctaaaattaagctggagcctcatgaagtggatcagtttctaaacttctctcctaaagaagccccagtggaccacctgcatttgccgcccacccctccgagcagtcacggcagtgactcagagggcagcctgagtcccaacccacgcctgcaccccttcagcctgcctcagacccacagcccctccagagctgcaccccgggccccctccgccctctccagctcccctctcctcacggctcctcataaactgcagggatcaggccctctggtcctgacagaggaggagaagaggaccctgatcgctgagggctatcccatccccaccaaattgccc

SEQ ID NO: 309079 - DNA, 1298 bp, Homo sapiens
gtttgtgtctggagccgtagcggcaagtgggcttgcggctaagggattttcctgggatgagagcgggtcttctgccttcattttggatgcacatcccgctttagccccggcagcctttggtccggctcgtgtccctggggattctcggatctccgaggacaccggacgggagcgcttggccatcctctctccggcagaggagcagacgtttgctttccaagtgcaaaactacagacacgcgcgcgcacacacgcaagcacacgcggagagagaggaaccttgccggtccgaggcagctctgcgcgtcccctcctgcgcttagcatcctcggcccagcgcggcccgcaccgccatggaggtgctggagagcggggagcagggcgtgctgcagtgggaccgcaagctgagcgagctgtcagagcccggggacggcgaggccctcatgtaccacacgcacttctcagaacttctggatgagttttcccagaacgtcttgggtcagctcctgaatgatcctttcctctcagagaagagtgtgtcaatggaggtggaaccttccccgacgtccccggcgcctctcatccaggctgagcacagctactccctgtgcgaggagcctcgggcccagtcgcccttcacccacattaccaccagtgacagcttcaatgacgatatgttacataaatagtaaatggatgtacggtccgccctccctgtgcttgggttttgcatcctatgaatactgtattttcaatccacgtttatttgaaaaaaatctgcttgtgagtggacccgcatggttcaaaacccgtgttgttcaaggaccaactgcgtatgtgtttttctcatatgaggtggaaagtgagaaatggtacctgtctacagacttcccttcaacatccatcaagacagagccaattacagacgaaccacccccaggactcgttccgtctgtcactctgaccatcacagccatctccaccccgttggaaaaggaggaacctcctctggaaatgaacactggggttgattcctcgtgccagaccattattcctaaaattaagctggagcctcatgaagtggatcagtttctaaacttctctcctaaagaaggtctgtctgccctccctgtgtccctttgggttatggatatggtctctgggtctacagagagggaatatggcgagagagctgggatgagtttgtaccacagatgttgtagctggctttatgaaatagctctgttcttaaaaaataaaaattttgcttccaaataaaaattttgcaagctaactatt

SEQ ID NO: 309080 - DNA, 902 bp, Homo sapiens
agtgacctgaaaactcaaagcgtaaatgcttcagagccgagagtgtggtctgtggagtcacagcgttacctgggagctgatgaaaaatgcagaatctcgggcctgcttagacctgtgagtcagaagcgacggcttaggagccccagcacttctcagaacttctggatgagttttcccagaacgtcttgggtcagctcctgaatgatcctttcctctcagagaagagtgtgtcaatggaggtggaaccttccccgacgtccccggcgcctctcatccaggctgagcacagctactccctgtgcgaggagcctcgggcccagtcgcccttcacccacattaccaccagtgacagcttcaatgacgatgaggtggaaagtgagaaatggtacctgtctacagacttcccttcaacatccatcaagacagagccaattacagacgaaccacccccaggactcgttccgtctgtcactctgaccatcacagccatctccaccccgttggaaaaggaggaacctcctctggaaatgaacactggggttgattcctcgtgccagaccattattcctaaaattaagctggagcctcatgaagtggatcagtttctaaacttctctcctaaagaagccccagtggaccacctgcatttgccgcccacccctccgagcagtcacggcagtgactcagagggcagcctgagtcccaacccacgcctgcaccccttcagcctgcctcagacccacagcccctccagagctgcaccccgggccccctccgccctctccagctcccctctcctcacggctcctcataaactgcagggatcaggccctctggtcctgacagaggaggagaagaggaccctgatcgctgagggctatcccatccccaccaaattgccc

SEQ ID NO: 309081 - DNA, 866 bp, Homo sapiens
atattttgtaataaaatgcctttatagtactataaaaacatagaaaagaatattgatatagttttgggcttgagcatttggctttcaactttagagttctgagtgtttttctttttctttttttttcttttttctttttttttttttttgagatagggtctcactctgttacctaggctggagtgcaatggtatgatcacagctcgctgcagcctcaaattcctgggttcaagtgattctcctgcctcagcctcccaagtagctgggactgcaggtgcacgccatcacaactggctaatttttgtatttttttggggagacggtgtctcactatgttacccagggtggtctcaaggaagttctgaaggtcctgtcagctgtaatgccaagtttggcaatgagaaaaaggttaagaactaaaatgactccctgtcagggaagttgcctacactcagctattctccaggataggcagggctgtcccgagaggaagacacaggtgacaaatagctctcctgcatgtgtcttcaaggctgtgattggtttttaaaaattgtgtttgaaattcttcctccaggttgattcctcgtgccgttgattcctcgtgccagaccattattcctaaaattaagctggagcctcatgaagtggatcagtttctaaacttctctcctaaagaaggtctgtctgccctccctgtgtccctttgggttatggatatggtctctgggtctacagagagggaatatggcgagagagctgggatgagtttgtaccacagatgttgtagctggctttatgaaatagctctgttcttaaaaaataaaaattttgcttccaaataaaaattttgcaagctaactatt

SEQ ID NO: 309082 - DNA, 451 bp, Homo sapiens
gaagctgcaattacaggcgtgcaccaccacacccagctaattttggtatttttagtagagacgaggttttgccacattggtcaggctggtcttgaactctcagccttaggcaatccgcctgcttcggcctcctgaagtcctgggattacaggcataagccaccacgcctggccaagccccagtggaccacctgcatttgccgcccacccctccgagcagtcacggcagtgactcagagggcagcctgagtcccaacccacgcctgcaccccttcagcctgcctcagacccacagcccctccagagctgcaccccgggccccctccgccctctccagctcccctctcctcacggctcctcataaactgcagggatcaggccctctggtcctgacagaggaggagaagaggaccctgatcgctgagggctatcccatccccaccaaattgccc

SEQ ID NO: 309083 - DNA, 561 bp, Homo sapiens
gagcagcaaaaggggagaagatcccactactctcccaccacctgccctttctctgagggacgtttaccacgaggcctcaggctggggatggagagagttgctctgggagttggggtaccacccccagggcaggatggggacaggatcacctgcccgggacaccaccattatcattctcctctagtgacgcagcagctggttctgggagttaaaggagcattggaaggcccaaaccctctcccttgagtggccaccccagcctggttggctggttttccccttttctcttgtttcaattgggtctttaccttgaactctcctctctggctttgcggtgggctgtggaggctggttttgaccaaaagttagtggggcataagaagtgtatttatgtacctgctttgtaaaggttttatgtggatttgaaaagttattgtgtttatatagtagttatgtatgttattactgatttgtagcatttttcatctcttattaagcgttttatattattttttctgtgtcttatttttaatccttcttttttttgttgacgtgttgttt

SEQ ID NO: 309084 - DNA, 516 bp, Homo sapiens
gagcagcaaaaggggagaagatcccactactctcccaccacctgccctttctctgagggacgtttaccacgaggcctcaggctggggatggagagagttgctctgggagttggggtaccacccccagggcaggatggggacaggatcacctgcccgggacaccaccattatcattctcctctagtgacgcagcagctggttctgggagttaaaggagcattggaaggcccaaaccctctcccttgagtggccaccccagcctggttggctggttttccccttttctcttgtttcaattgggtctttaccttgaactctcctctctggctttgcggtgggctgtggaggctggttttgaccaaaagttagtggggctttattatctatatcttctagtttattcatttctcttgttttattttatatgtgtttactcttagctttcctttattattcttctatctcttcttccacttcctctttttcgatcttcttatagtttctcctttgactctt

SEQ ID NO: 309085 - DNA, 3011 bp, Homo sapiens
gagcagcaaaaggggagaagatcccactactctcccaccacctgccctttctctgagggacgtttaccacgaggcctcaggctggggatggagagagttgctctgggagttggggtaccacccccagggcaggatggggacaggatcacctgcccgggacaccaccattatcattctcctctagtgacgcagcagctggttctgggagttaaaggagcattggaaggcccaaaccctctcccttgagtggccaccccagcctggttggctggttttccccttttctcttgtttcaattgggtctttaccttgaactctcctctctggctttgcggtgggctgtggaggctggttttgaccaaaagttagtggggcgggaggaaggggcaggaggaagggttgaggttacttggggcgagtcccttccccttcagagaggcttctatccttcccagggaggaggcgccgctgagacccttctgctgagagctctgccctcccctcatcacctggcctgtgcagaaacgctcatgcacacctggctgcacaggtgtgcacgcattacccttcgcgtgtacgttcccatgtgccccgtgaaagcatgtgtggctgcagacgtgtccacatgggccttgcgaacctgggttagaaaccctggccaggcgaacgtggggtgattcacagcacaaaagacctcaccaccacacctgcactcaccccaccttgcatgcaccttgctacctgcttgcggctttcagcggagggcaggggtctggcacaggtgcgatggcaccccatgctccaggcatacagatgtggtttctcggctgcaccgggccaggctgcgggtgtgcaggcgtctgctaagttgtgtgatgtatcagcacaggctttgagacgtctggaccctgtccttcctcccgtgaggggttcttgttctttctgactcaggtgacttttcagcccttccaattcccctctttttctgccctcccctccaactcagccaacccaggtgtgggcagtcagggagggagggagtgtcccaccacgttctcagggcagcccttgactcctaagccccttcctccttccattctgcatcccctccccatccaacctaaatgccacagctggggctgagctgtattcctgtggagggacctctgccgtgcctctctgaggtcaggctgtgctgtgtgatgggcaggctttgccccagcccacccctggcaaggtgcacttgttttctggtttgtacaaggtgtcctgggggcccgtggcttccctgccagtgaggagtgacttctccctctcttccagtcctgtaggggagacaaaaccagattggggggcccaaggggagcatggaaaaggccggctcccctgtctttccttggctgtcagagtcagggtaacacacaccaagagtggagtgcggccagcaagtttgagacctgcccgccctcctcgcagctctgctctgtgtcctcaggaagtcacagagtctactgaggcaaggagagggtgattctttccccaaatcccttcttccctggttcccaaaccaaagacagcctgcagccctttctgcatggggtgctctgttgacaggcttcccagatccctgagtctctctttccttcctcctcgatctttagttgtccacggtcaattcagtgcttccattgggggacagtcccctccgggatgacctgattcacctccagcccagggaatggaatctagaggaatacgtggggtgggtctggacaaggagcggcaggaatcaccacccatctccagctgtggagccctgtggaggggaaggggaagcttggggttcagagggaactcttccaggagaggggtgcccagtggaggtaaagatgatagagggttgtggggggtctctagttgaatgttttggcccatgactttggaacatggctggcagcttccagcagaagtcacgctccccatcccccaggggacatgggacctttttcctgcttcctggtcactttcaaagaactatttgcgcaatctgtgggtctgtggattcacggggctttctgtgtgggtgctgcagttgcttttgtctgcagcagcaggacacatctttcctcttactcagccctttatggcccatggggaactccgtggctcagggagagctgaactccaggggtgtgacctgggacaggtgggcctgaggtgcccagctcagggcagccaggtggctcatgggctgtagtgagccagctccctgggggaaaaggctgtgggccgttaggaccatcctccaggacaggtgacctctatgaggtcacctacggctgtggccgtgcaggcctccttccagcccagagtggcccagtagagcaaggcagacagtgacctccacccccgcagccctcttaaaaggccagtactcttgggggtggggggagggtttagaaagcatttgcccatctgcctttctttcccccagcccccacccgctttgaatgtagagacccgtgggcacttttccttttgtggtggggggtgcggaggaggtacccccacccctggcacagccgcctggaatgcaggactgtcactgctgttcgggtgatgacctcgttgccaagctcctcctgtccccttgttctgggggcaggcgctgtgcttctgtgaggtggtttagcttttgctttcgaagtggccagctgcggccaccaggtctcagcacaagagcgcttcctttgcacagaatgagcttcgagctttgttcagactaaatgaatgtatctgggaggggtcgggggcacgagttgattccaagcacatgcctttgctgagtgtgtgtgtgctgggagagtcagagtggatgtagagcgcggttttatttttgtactgacattggtaagagactgtatagcatctatttatttagatgatttatctggtaaatgaggcaaaaaaattattaaaaatacattaaagatgatttaaaaaaaaaaaaa

SEQ ID NO: 309086 - DNA, 3375 bp, Homo sapiens
gagcagcaaaaggggagaagatcccactactctcccaccacctgccctttctctgagggacgtttaccacgaggcctcaggctggggatggagagagttgctctgggagttggggtaccacccccagggcaggatggggacaggatcacctgcccgggacaccaccattatcattctcctctagtgacgcagcagctggttctgggagttaaaggagcattggaaggcccaaaccctctcccttgagtggccaccccagcctggttggctggttttccccttttctcttgtttcaattgggtctttaccttgaactctcctctctggctttgcggtgggctgtggaggctggttttgaccaaaagttagtggggcgggaggaaggggcaggaggaagggttgaggttacttggggcgagtcccttccccttcagagaggcttctatccttcccagggaggaggcgccgctgagacccttctgctgagagctctgccctcccctcatcacctggcctgtgcagaaacgctcatgcacacctggctgcacaggtgtgcacgcattacccttcgcgtgtacgttcccatgtgccccgtgaaagcatgtgtggctgcagacgtgtccacatgggccttgcgaacctgggttagaaaccctggccaggcgaacgtggggtgattcacagcacaaaagacctcaccaccacacctgcactcaccccaccttgcatgcaccttgctacctgcttgcggctttcagcggagggcaggggtctggcacaggtgcgatggcaccccatgctccaggcatacagatgtggtttctcggctgcaccgggccaggctgcgggtgtgcaggcgtctgctaagttgtgtgatgtatcagcacaggctttgagacgtctggaccctgtccttcctcccgtgaggggttcttgttctttctgactcaggtgacttttcagcccttccaattcccctctttttctgccctcccctccaactcagccaacccaggtgtgggcagtcagggagggagggagtgtcccaccacgttctcagggcagcccttgactcctaagccccttcctccttccattctgcatcccctccccatccaacctaaatgccacagctggggctgagctgtattcctgtggagggacctctgccgtgcctctctgaggtcaggctgtgctgtgtgatgggcaggctttgccccagcccacccctggcaaggtgcacttgttttctggtttgtacaaggtgtcctgggggcccgtggcttccctgccagtgaggagtgacttctccctctcttccagtcctgtaggggagacaaaaccagattggggggcccaaggggagcatggaaaaggccggctcccctgtctttccttggctgtcagagtcagggtaacacacaccaagagtggagtgcggccagcaagtttgagacctgcccgccctcctcgcagctctgctctgtgtcctcaggaagtcacagagtctactgaggcaaggagagggtgattctttccccaaatcccttcttccctggttcccaaaccaaagacagcctgcagccctttctgcatggggtgctctgttgacaggcttcccagatccctgagtctctctttccttcctcctcgatctttagttgtccacggtcaattcagtgcttccattgggggacagtcccctccgggatgacctgattcacctccagcccagggaatggaatctagaggaatacgtggggtgggtctggacaaggagcggcaggaatcaccacccatctccagctgtggagccctgtggaggggaaggggaagcttggggttcagagggaactcttccaggagaggggtgcccagtggaggtaaagatgatagagggttgtggggggtctctagttgaatgttttggcccatgactttggaacatggctggcagcttccagcagaagtcacgctccccatcccccaggggacatgggacctttttcctgcttcctggtcactttcaaagaactatttgcgcaatctgtgggtctgtggattcacggggctttctgtgtgggtgctgcagttgcttttgtctgcagcagcaggacacatctttcctcttactcagccctttatggcccatggggaactccgtggctcagggagagctgaactccaggggtgtgacctgggacaggtgggcctgaggtgcccagctcagggcagccaggtggctcatgggctgtagtgagccagctccctgggggaaaaggctgtgggccgttaggaccatcctccaggacaggtgacctctatgaggtcacctacggctgtggccgtgcaggcctccttccagcccagagtggcccagtagagcaaggcagacagtgacctccacccccgcagccctcttaaaaggccagtactcttgggggtggggggagggtttagaaagcatttgcccatctgcctttctttcccccagcccccacccgctttgaatgtagagacccgtgggcacttttccttttgtggtggggggtgcggaggaggtacccccacccctggcacagccgcctggaatgcaggactgtcactgctgttcgggtgatgacctcgttgccaagctcctcctgtccccttgttctgggggcaggcgctgtgcttctgtgaggtggtttagcttttgctttcgaagtggccagctgcggccaccaggtctcagcacaagagcgcttcctttgcacagaatgagcttcgagctttgttcagactaaatgaatgtatctgggaggggtcgggggcacgagttgattccaagcacatgcctttgctgagtgtgtgtgtgctgggagagtcagagtggatgtagagcgcggttttatttttgtactgacattggtaagagactgtatagcatctatttatttagatgatttatctggtaaatgaggcaaaaaaattattaaaaatacattaaagatgatttaaaaaaaaaaaaaaaaaaaaaaaaaaaaaaaaaaaaaaaagaaaagaaacaaacaaaaagaaaacaaaacaaagagacaacaaaacagacacgaccaagcaaagacgaagaaagacagaaggacccaagcgacgacgaagcaagaaacaacaagacaaaatgaaagaagacaatcagaaagaaacgaatacccaaaacaacaagagaaaagagacagaacaaaaggaacaacacatgaaacaaaaagaaacaaaagaaagaacaaacacaagaaaagagtaatgaataggaacactgacaagaagaaagaaagaacacgaagagagaaaagaccacagaaaagcaaataacaaaaaaagctgataataagaaacaaa

SEQ ID NO: 309087 - DNA, 2837 bp, Homo sapiens
gagcagcaaaaggggagaagatcccactactctcccaccacctgccctttctctgagggacgtttaccacgaggcctcaggctggggatggagagagttgctctgggagttggggtaccacccccagggcaggatggggacaggatcacctgcccgggacaccaccattatcattctcctctagtgacgcagcagctggttctgggagttaaaggagcattggaaggcccaaaccctctcccttgagtggccaccccagcctggttggctggttttccccttttctcttgtttcaattgggtctttaccttgaactctcctctctggctttgcggtgggctgtggaggctggttttgaccaaaagttagtggggcgggaggaaggggcaggaggaagggttgaggttacttggggcgagtcccttccccttcagagaggcttctatccttcccagggaggaggcgccgctgagacccttctgctgagagctctgccctcccctcatcacctggcctgtgcagaaacgctcatgcacacctggctgcacaggtgtgcacgcattacccttcgcgtgtacgttcccatgtgccccgtgaaagcatgtgtggctgcagacgtgtccacatgggccttgcgaacctgggttagaaaccctggccaggcgaacgtggggtgattcacagcacaaaagacctcaccaccacacctgcactcaccccaccttgcatgcaccttgctacctgcttgcggctttcagcggagggcaggggtctggcacaggtgcgatggcaccccatgctccaggcatacagatgtggtttctcggctgcaccgggccaggctgcgggtgtgcaggcgtctgctaagttgtgtgatgtatcagcacaggctttgagacgtctggaccctgtccttcctcccgtgaggggttcttgttctttctgactcaggtgacttttcagcccttccaattcccctctttttctgccctcccctccaactcagccaacccaggtgtgggcagtcagggagggagggagtgtcccaccacgttctcagggcagcccttgactcctaagccccttcctccttccattctgcatcccctccccatccaacctaaatgccacagctggggctgagctgtattcctgtggagggacctctgccgtgcctctctgaggtcaggctgtgctgtgtgatgggcaggctttgccccagcccacccctggcaaggtgcacttgttttctggtttgtacaaggtgtcctgggggcccgtggcttccctgccagtgaggagtgacttctccctctcttccagtcctgtaggggagacaaaaccagattggggggcccaaggggagcatggaaaaggccggctcccctgtctttccttggctgtcagagtcagggtaacacacaccaagagtggagtgcggccagcaagtttgagacctgcccgccctcctcgcagctctgctctgtgtcctcaggaagtcacagagtctactgaggcaaggagagggtgattctttccccaaatcccttcttccctggttcccaaaccaaagacagcctgcagccctttctgcatggggtgctctgttgacaggcttcccagatccctgagtctctctttccttcctcctcgatctttagttgtccacggtcaattcagtgcttccattgggggacagtcccctccgggatgacctgattcacctccagcccagggaatggaatctagaggaatacgtggggtgggtctggacaaggagcggcaggaatcaccacccatctccagctgtggagccctgtggaggggaaggggaagcttggggttcagagggaactcttccaggagaggggtgcccagtggaggtaaagatgatagagggttgtggggggtctctagttgaatgttttggcccatgactttggaacatggctggcagcttccagcagaagtcacgctccccatcccccaggggacatgggacctttttcctgcttcctggtcactttcaaagaactatttgcgcaatctgtgggtctgtggattcacggggctttctgtgtgggtgctgcagttgcttttgtctgcagcagcaggacacatctttcctcttactcagccctttatggcccatggggaactccgtggctcagggagagctgaactccaggggtgtgacctgggacaggtgggcctgaggtgcccagctcagggcagccaggtggctcatgggctgtagtgagccagctccctgggggaaaaggctgtgggccgttaggaccatcctccaggacaggtgacctctatgaggtcacctacggctgtggccgtgcaggcctccttccagcccagagtggcccagtagagcaaggcagacagtgacctccacccccgcagccctcttaaaaggccagtactcttgggggtggggggagggtttagaaagcatttgcccatctgcctttctttcccccagcccccacccgctttgaatgtagagacccgtgggcacttttccttttgtggtggggggtgcggaggaggtacccccacccctggcacagccgcctggaatgcaggactgtcactgctgttcgggtgatgacctcgttgccaagctcctcctgtccccttgttctgggggcaggcgctgtgcttctgtgaggtggtttagcttttgctttcgaagtggccagctgcggccaccaggtctcagcacaagagcgcttcctttgcacagaatgagcttcgagctttgttcagactaaatgaatgtatctgggagggggggggtcctggctgggggggggtaccgagct

SEQ ID NO: 309088 - DNA, 1390 bp, Homo sapiens
gagcagcaaaaggggagaagatcccactactctcccaccacctgccctttctctgagggacgtttaccacgaggcctcaggctggggatggagagagttgctctgggagttggggtaccacccccagggcaggatggggacaggatcacctgcccgggacaccaccattatcattctcctctagtgacgcagcagctggttctgggagttaaaggagcattggaaggcccaaaccctctcccttgagtggccaccccagcctggttggctggttttccccttttctcttgtttcaattgggtctttaccttgaactctcctctctggctttgcggtgggctgtggaggctggttttgaccaaaagttagtggggcgggaggaaggggcaggaggaagggttgaggttacttggggcgagtcccttccccttcagagaggcttctatccttcccagggaggaggcgccgctgagacccttctgctgagagctctgccctcccctcatcacctggcctgtgcagaaacgctcatgcacacctggctgcacaggtgtgcacgcattacccttcgcgtgtacgttcccatgtgccccgtgaaagcatgtgtggctgcagacgtgtccacatgggccttgcgaacctgggttagaaaccctggccaggcgaacgtggggtgattcacagcacaaaagacctcaccaccacacctgcactcaccccaccttgcatgcaccttgctacctgcttgcggctttcagcggagggcaggggtctggcacaggtgcgatggcaccccatgctccaggcatacagatgtggtttctcggctgcaccgggccaggctgcgggtgtgcaggcgtctgctaagttgtgtgatgtatcagcacaggctttgagacgtctggaccctgtccttcctcccgtgaggggttcttgttctttctgactcaggtgacttttcagcccttccaattcccctctttttctgccctcccctccaactcagccaacccaggtgtgggcagtcagggagggagggagtgtcccaccacgttctcagggcaggaggaagggttgaggttacttggggcgagtcccttccccttcagagaggcttctatcgcttcctttgcacagaatgagcttcgagctttgttcagactaaatgaatgtatctgggaggggtcgggggcacgagttgattccaagcacatgcctttgctgagtgtgtgtgtgctgggagagtcagagtggatgtagagcgcggttttatttttgtactgacattggtaagagactgtatagcatctatttatttagatgatttatctggtaaatgaggcaaaaaaattattaaaaatacattaaagatgatttaaaaaaaaaaaaa

SEQ ID NO: 309089 - DNA, 640 bp, Homo sapiens
cagactacaattgtgagtcctgaactgtagctgcctcaaagcgccttcatgatactattctgaagtgactactctgaaatgtggacagtgaagtttggtgaatttggtcatttagtttcttcaaagataatgagattgtgtttcccctaaggatgtatttacagctagtcagtggaaactgaatccattcccagttttaatgcttttccagttcaaacgtgatatgcatgtatgtgtctctttctaacccttcgagcttctctctgtgtacgatttagggttacattccgaaaagcaaatgggagatggacacatctgaggcaaagctagacaagttggatggcttgaggactggtactaaaaggaaacgtgactgggaggccattgccagcagaatggaggattatcttcagctccccgatgattatgatactcgtgcttctgagcctgggaagaagagggtcagatgggcagacctggaagagaataatgactccgttcaaaaactaagtctcatatatatttggttcgattgagggctttttcagccaggtgaccactttcatctgtgatcttctcccaatcagtctgtccgaccacaaaacctatggcccttttcctatctgcatccttcgtcgac

SEQ ID NO: 309090 - DNA, 719 bp, Homo sapiens
tgctctagaggatcccagcaacattggactcgagagagtggaccacagtggaaaggccccaaaccagcttttggacagcagcatcagcagcaacctaagtcacaagcagaacctctttcaggaaacaaagaaccattagcagacaccagtagtaaccagcagaagaattttaaaatgcaatcagctgcattttccattgctgcagatgtaaaggatgtcaaggcggctcagtcaaatgagaatctaagcgactctcaacaagagccacctaaaagtgaagtctcggaagggcccgtagagccctctaattgggaccagaatgttcaaagtatggagactcaaatcgacaaagcccaagctgttactcagcctgtaccccttgcgaataagcctgtacctgctcaatctacttttccttcaaaaacaggggggatggagggaggaacagcagtagcaacatcatcattaacagcagataatgattttaaacctgtgggtattggtctaccccattcagaaaacaaccaagataaaggcctgcctcggccagataatagagataatagattagaaggcaatagaggcaacagctcatcttacagaggtcctgggcaaagcagaatggaagacacacgggataaaggtctagtaaacagaggtcgcggccaggcaatcatcgagtccaatgttgctgggatcctctagatacctcgcgacac

SEQ ID NO: 309091 - DNA, 2094 bp, Homo sapiens
  misc_feature (4)..(4): n is a, c, g, or t
  misc_feature (17)..(17): n is a, c, g, or t
cagnatgaatctggagngggtgagtacagacaggaagactaggtagagattagtgctttgctttcaggtgaaaaaaaaatgaggtcagtgaattattaaataaaaaggaatggcagaggagaaagagaggacaggattgagctgaactgttcaggagctggaatggttaggacttggattgtccagagagttttctctttgtgacttaaaatatatggcttttcccagttttcctgggttagtttttaattttttaaacttgcggtttcaaatgagtcattctaccccttagactgtccagagagggagggggctctttgcatatttatttttcctaaagctcagcctaatgctatgttctttttaggtcagatgggcagacctggaagagaagaaggatgcagataggaaaagggccataggttttgtggtcggacagactgattgggagaagatcacagatgaaagtggtcacctggctgaaaaagccctcaatcgaaccaaatatatatgagacttagtttttgaacggagtcattattcctctaaggtggttcgctttgaggtggtctgaagccaaggcctcgcggagcttctttgtgtgtcaccttgcttccacgtttcagttcttgttttgtttctactgctttagttttttttaaagttctccagtgtccccaagaggtattagaatcttgctgtacccaagcaagacgttaatttttcttttaactgttttggggagggagggagtgatagcttaactgctgaagccaggcgggggtctgctggaggattccaacagagagtatttcctccactgtacaatgtcacagactatctctatcatcattgctttgtggctgtttctgttttttactgtatgtaactggtagctgattgtactaggattaaaaacaataaactttcatgataaagccgatgagattcatgggctatacagcatgggcccttttctcttgttttcttaattttatttttaattgctttttaaatatggtatgtcctaattaaatgctagctgaacatcccaaaacctttttttcattgaatattatatggctcaatgattccgtagcacatgttgtaaaacacagggttcaaatgatgttcaaaacactcatctttgttttatagctgatttctctatctttgtgtcttgaagactgaccaagttcaaatattcatcagttccctggagcatatccattctgtaacatgatgctttatttaaaaattttttttgatcctctctctgttcttccctctcttctttccttccttcttcttttcactttctgcctttatgctgttaggtttttattttttcctgatctggctttgaattctggtagacagaactgatgtattctgtggaactcaagcttgttgccttcatttgaacttgaattgtggatttttaaatgaagattgcagggaaagagtataaagatgcagagcactctggcatgtaacctttaagcctgtcaggttttcaagttcttgccagattgttcattactggaaagcatggccttctgcacagaatttcctctcttgtggttaataccaggtggaacccagaaacatacagagataaaacccaaatattatttctatgtaaacacagaaaagggactcttccctttttcatcctgcaaagaaaaaagtcatcttttagcatgaaagaagatgagagagccttcttcctcaagcataatttgcattttgtaatccaactcagtaatttgtaaatgtgttcactgaagacttcaatattttgaaatattctctttcaggcccacagatgaaaatcctttacttttatgacctacattaaagactgtatgaatagagcctaatagttactagcatttgaatagtatcactttgggttcaacaaattgatattatagtactgaatacccctaatttaatggaaattctaacaactttctgtacttttatcttccctgaaaatctgaatttttaagcaagtgactttaagttcattaagtcaatattgaatgtataaattgctacattaaataacttctgctgtttgtaaaaaaa

SEQ ID NO: 309092 - DNA, 5011 bp, Homo sapiens
gctacacctcctccaggaatacctccccctggagttccacaagggatacctcctcagttaacagcagccccagttccaccagcctccagttcacagagctcgcaagttccagagaaacctagaccagcactgcttcctactcctgtgtcttttggttctgccccaccgacaacttaccatcctccgttgcaatcagctggtccatcagaacaagtgaattcaaaagctcctttgagcaagtctgctctgccatacagttcattctcatctgatcaaggacttggggagtcttcagctgctccatctcagccaatcactgcagtgaaggacatgccagtgagatcaggtggcctgcttccagatcctcctagaagtagttacttggaaagtccaagaggcccaagatttgatggtcctcgaagatttgaggatttagggtcaaggtgtgaaggaccgagacccaaagggcctcgttttgaaggaaatcgccccgatgggccaagacccagatatgaaggtcacccagcagagggcactaaaagcaagtggggaatgattccccgggggccagcatctcaattttatattacccccagtacatccctaagtcctcgacagagtggaccacagtggaaaggccccaaaccagcttttggacagcagcatcagcagcaacctaagtcacaagcagaacctctttcaggaaacaaagaaccattagcagacaccagtagtaaccagcagaagaattttaaaatgcaatcagctgcattttccattgctgcagatgtaaaggatgtcaaggcggctcagtcaaatgagaatctaagcgactctcaacaagagccacctaaaagtgaagtctcggaagggcccgtagagccctctaattgggaccagaatgttcaaagtatggagactcaaatcgacaaagcccaagctgttactcagcctgtaccccttgcgaataagcctgtacctgctcaatctacttttccttcaaaaacaggggggatggagggaggaacagcagtagcaacatcatcattaacagcagataatgattttaaacctgtgggtattggtctaccccattcagaaaacaaccaagataaaggcctgcctcggccagataatagagataatagattagaaggcaatagaggcaacagctcatcttacagaggtcctgggcaaagcagaatggaagacacacgggataaaggtctagtaaacagaggtcgcggccaggcaatcatcgaggcccaggattggtcaagcaagaagactttcgggataagatgatgggtagaagagaagatagtcgagagaagatgaacagaggagaaggtagccgggacagagggttggtgaggcctggaagcagtcgggagaaagtgccaggtggtcttcaagggagccaggacaggggtgcagctggcagccgagaaaggggaccacctcggagggctggcagtcaggagaggggacctcttcgaagggctgggagtagagagagaataccaccccgaagagctgggagcagggagagaggaccacctcgagggcctggcagtcgagaaaggggactgggaagatcagattttggtcgtgatagaggtccattcagaccagaaccaggagatggtggggaaaaaatgtatccatatcaccgggatgagcctcctagggctccatggaaccatggagaagagcgagggcatgaagagtttccattagatggtagaaatgctccaatggaacgagaaagactcgatgactgggatagagagagatactggagagaatgtgaacgtgactatcaagatgatacactagagctctataacagagaggacaggttctcagcaccaccatctcggtctcatgatggagataggcgaggcccttggtgggatgattgggagagagaccaggatatggatgaggactacaatagggaaatggaaagggacatggacagggatgtggatcggatttcaagacctatggatatgtatgatagaagtttggataatgagtgggacagagattatgggagaccactggatgaacaagaatcacagtttcgtgaacgggatattccatctcttccacctttaccgcccctcccacctcttccacctttggatagatatcgggatgatagatggagagaagaaagaaatcgagagcatgggtatgatcgagatttccgtgataggggtgagttgaggattcgagagtatccagaaagaggagatacatggcgggaaaagcgagattatgttcctgacagaatggactgggaaagagaacggttgtcagacagatggtacccatctgatgtggatagacattcccccatggcggaacatatgccctcctcacatcattcctcagaaatgatggggtccgatgcaagcttagactctgaccaaggccttggaggggtaatggttctcagtcagaggcagcatgaaatcattttgaaagctgcacaagaactgaaaatgcttcgggaacagaaagaacagcttcaaaagatgaaagacttcgggtctgagccacagatggctgaccatctaccacctcaggaatcaagattgcagaatacatcttcaagacctggaatgtatccgcctccagggtcgtatagacctccccctcctatgggcaaaccaccaggttcaattgtaagaccctctgctccaccagcaagatcatctgttcctgtgaccaggccacctgtcccaataccaccacctccacctcctccacctctacctcctcctcctccagtgataaagccacaaacttcagctgtagaacaggaacgatgggatgaagattctttctatgggctctgggatacaaatgatgaacaaggactgaattcagaatttaagtcagaaactgcagcaattccatctgctccagtattaccacccccacctgttcactcttccattccccctcctggcccagtgcctatgggtatgccaccaatgtccaagccaccaccagtacaacagactgttgattatggccatggccgagatatatccactaataaagttgaacagataccttatggagaaagaataactctacgcccagatccactacctgaaagatcaacttttgagacagagcatgcaggccaacgtgatcgttatgatagagaaagagatcgtgagccttattttgatcgtcaaagtaatgtcatagcagatcatcgagattttaaaagggatcgtgagacacatagagatcgagaccgggatcgtggtgttattgactatgaccgggatcgatttgacagagaacgccgaccccgagatgatagagctcagtcatatcgagacaaaaaagaccattcctcatccagaagagggggttttgataggccatcctatgaccggaagtctgaccgaccagtctatgaaggaccatccatgtttggaggagaacgaaggacttatcctgaggagcgaatgcctctgccagctccttcactgagccaccagcctcctccagctccacgagtcgagaagaagcctgaatcaaagaatgtggacgatattttgaaaccaccgggccgggagagcagacctgagagaattgttgttataatgagaggattacctggcagtggaaagacacatgttgcaaaacttattcgagataaggaggtagaatttggaggacctgcacccagagttctaagcctggatgattacttcatcactgaagtggaaaaagaagaaaaagatccagattctggaaagaaagtgaaaaagaaggtaatggaatatgaatatgaagctgagatggaggagacttaccgcaccagcatgttcaaaactttcaaaaagactctggatgatggcttttttcccttcatcatcctggatgccatcaatgacagagttaggcattttgaccagttttggagtgcagcaaaaaccaagggatttgaggtatatttggctgaaatgagtgcagataaccagacttgtggcaagagaaatattcatggaagaaagcttaaagaaataaataagatggctgatcactgggaaactgcacctcgtcacatgatgcgtctagatattcgttctttgctgcaagatgctgctattgaagaggtagagatggaagattttgatgcaaatatcgaagaacagaaagaagaaaagaaagatgcagaggaagaggaaagcgaactgggttacattccgaaaagcaaatgggagatggacacatctgaggcaaagctagacaagttggatggcttgaggactggtactaaaaggaaacgtgactgggaggccattgccagcagaatggaggattatcttcagctccccgatgattatgatactcgtgcttctgagcctgggaagaagagggtcagatgggcagacctggaagagaagaaggatgcagataggaaaagggccataggttttgtggtcggacagactgattgggagaagatcacagatgaaagtggtcacctggctgaaaaagccctcaatcgaaccaaatatatatgagacttagtttttgaacggagtcattattcctctaaggtggttcgctttgaggtggtctgaagccaaggcctcgcggagcttctttgtgtgtcaccttgcttccacgtttcagttcttgttttgtttctactgctttagttttttttaaagttctccagtgtccccaagaggtattagaatcttgctgtacccaagcaagacgttaatttttcttttaactgttttggggagggagggagtgatagcttaactgctgaagccaggcgggggtctgctggaggattccaacagagagtatttcctccactgtacaatgtcacagactatctctatcatcattgctttgtggctgtttctgttttttactgtatgtaactggtagctgattgtactaggattaaaaacaataaactttcatgataaagccgatgagattcatgggctataca

SEQ ID NO: 309093 - DNA, 4429 bp, Homo sapiens
tgctctagaggatcccagcaacattggactcgagagagtggaccacagtggaaaggccccaaaccagcttttggacagcagcatcagcagcaacctaagtcacaagcagaacctctttcaggaaacaaagaaccattagcagacaccagtagtaaccagcagaagaattttaaaatgcaatcagctgcattttccattgctgcagatgtaaaggatgtcaaggcggctcagtcaaatgagaatctaagcgactctcaacaagagccacctaaaagtgaagtctcggaagggcccgtagagccctctaattgggaccagaatgttcaaagtatggagactcaaatcgacaaagcccaagctgttactcagcctgtaccccttgcgaataagcctgtacctgctcaatctacttttccttcaaaaacaggggggatggagggaggaacagcagtagcaacatcatcattaacagcagataatgattttaaacctgtgggtattggtctaccccattcagaaaacaaccaagataaaggcctgcctcggccagataatagagataatagattagaaggcaatagaggcaacagctcatcttacagaggtcctgggcaaagcagaatggaagacacacgggataaaggtctagtaaacagaggtcgcggccaggcaatcatcgaggcccaggattggtcaagcaagaagactttcgggataagatgatgggtagaagagaagatagtcgagagaagatgaacagaggagaaggtagccgggacagagggttggtgaggcctggaagcagtcgggagaaagtgccaggtggtcttcaagggagccaggacaggggtgcagctggcagccgagaaaggggaccacctcggagggctggcagtcaggagaggggacctcttcgaagggctgggagtagagagagaataccaccccgaagagctgggagcagggagagaggaccacctcgagggcctggcagtcgagaaaggggactgggaagatcagattttggtcgtgatagaggtccattcagaccagaaccaggagatggtggggaaaaaatgtatccatatcaccgggatgagcctcctagggctccatggaaccatggagaagagcgagggcatgaagagtttccattagatggtagaaatgctccaatggaacgagaaagactcgatgactgggatagagagagatactggagagaatgtgaacgtgactatcaagatgatacactagagctctataacagagaggacaggttctcagcaccaccatctcggtctcatgatggagataggcgaggcccttggtgggatgattgggagagagaccaggatatggatgaggactacaatagggaaatggaaagggacatggacagggatgtggatcggatttcaagacctatggatatgtatgatagaagtttggataatgagtgggacagagattatgggagaccactggatgaacaagaatcacagtttcgtgaacgggatattccatctcttccacctttaccgcccctcccacctcttccacctttggatagatatcgggatgatagatggagagaagaaagaaatcgagagcatgggtatgatcgagatttccgtgataggggtgagttgaggattcgagagtatccagaaagaggagatacatggcgggaaaagcgagattatgttcctgacagaatggactgggaaagagaacggttgtcagacagatggtacccatctgatgtggatagacattcccccatggcggaacatatgccctcctcacatcattcctcagaaatgatggggtccgatgcaagcttagactctgaccaaggccttggaggggtaatggttctcagtcagaggcagcatgaaatcattttgaaagctgcacaagaactgaaaatgcttcgggaacagaaagaacagcttcaaaagatgaaagacttcgggtctgagccacagatggctgaccatctaccacctcaggaatcaagattgcagaatacatcttcaagacctggaatgtatccgcctccagggtcgtatagacctccccctcctatgggcaaaccaccaggttcaattgtaagaccctctgctccaccagcaagatcatctgttcctgtgaccaggccacctgtcccaataccaccacctccacctcctccacctctacctcctcctcctccagtgataaagccacaaacttcagctgtagaacaggaacgatgggatgaagattctttctatgggctctgggatacaaatgatgaacaaggactgaattcagaatttaagtcagaaactgcagcaattccatctgctccagtattaccacccccacctgttcactcttccattccccctcctggcccagtgcctatgggtatgccaccaatgtccaagccaccaccagtacaacagactgttgattatggccatggccgagatatatccactaataaagttgaacagataccttatggagaaagaataactctacgcccagatccactacctgaaagatcaacttttgagacagagcatgcaggccaacgtgatcgttatgatagagaaagagatcgtgagccttattttgatcgtcaaagtaatgtcatagcagatcatcgagattttaaaagggatcgtgagacacatagagatcgagaccgggatcgtggtgttattgactatgaccgggatcgatttgacagagaacgccgaccccgagatgatagagctcagtcatatcgagacaaaaaagaccattcctcatccagaagagggggttttgataggccatcctatgaccggaagtctgaccgaccagtctatgaaggaccatccatgtttggaggagaacgaaggacttatcctgaggagcgaatgcctctgccagctccttcactgagccaccagcctcctccagctccacgagtcgagaagaagcctgaatcaaagaatgtggacgatattttgaaaccaccgggccgggagagcagacctgagagaattgttgttataatgagaggattacctggcagtggaaagacacatgttgcaaaacttattcgagataaggaggtagaatttggaggacctgcacccagagttctaagcctggatgattacttcatcactgaagtggaaaaagaagaaaaagatccagattctggaaagaaagtgaaaaagaaggtaatggaatatgaatatgaagctgagatggaggagacttaccgcaccagcatgttcaaaactttcaaaaagactctggatgatggcttttttcccttcatcatcctggatgccatcaatgacagagttaggcattttgaccagttttggagtgcagcaaaaaccaagggatttgaggtatatttggctgaaatgagtgcagataaccagacttgtggcaagagaaatattcatggaagaaagcttaaagaaataaataagatggctgatcactgggaaactgcacctcgtcacatgatgcgtctagatattcgttctttgctgcaagatgctgctattgaagaggtagagatggaagattttgatgcaaatatcgaagaacagaaagaagaaaagaaagatgcagaggaagaggaaagcgaactgggttacattccgaaaagcaaatgggagatggacacatctgaggcaaagctagacaagttggatggcttgaggactggtactaaaaggaaacgtgactgggaggccattgccagcagaatggaggattatcttcagctccccgatgattatgatactcgtgcttctgagcctgggaagaagagggtcagatgggcagacctggaagagaagaaggatgcagataggaaaagggccataggttttgtggtcggacagactgattgggagaagatcacagatgaaagtggtcacctggctgaaaaagccctcaatcgaaccaaatatatatgagacttagtttttgaacggagtcattattcctctaaggtggttcgctttgaggtggtctgaagccaaggcctcgcggagcttctttgtgtgtcaccttgcttccacgtttcagttcttgttttgtttctactgctttagttttttttaaagttctccagtgtccccaagaggtattagaatcttgctgtacccaagcaagacgttaatttttcttttaactgttttggggagggagggagtgatagcttaactgctgaagccaggcgggggtctgctggaggattccaacagagagtatttcctccactgtacaatgtcacagactatctctatcatcattgctttgtggctgtttctgttttttactgtatgtaactggtagctgattgtactaggattaaaaacaataaactttcatgataaagccgatgagattcatgggctataca

SEQ ID NO: 309094 - DNA, 6142 bp, Homo sapiens
gctacacctcctccaggaatacctccccctggagttccacaagggatacctcctcagttaacagcagccccagttccaccagcctccagttcacagagctcgcaagttccagagaaacctagaccagcactgcttcctactcctgtgtcttttggttctgccccaccgacaacttaccatcctccgttgcaatcagctggtccatcagaacaagtgaattcaaaagctcctttgagcaagtctgctctgccatacagttcattctcatctgatcaaggacttggggagtcttcagctgctccatctcagccaatcactgcagtgaaggacatgccagtgagatcaggtggcctgcttccagatcctcctagaagtagttacttggaaagtccaagaggcccaagatttgatggtcctcgaagatttgaggatttagggtcaaggtgtgaaggaccgagacccaaagggcctcgttttgaaggaaatcgccccgatgggccaagacccagatatgaaggtcacccagcagagggcactaaaagcaagtggggaatgattccccgggggccagcatctcaattttatattacccccagtacatccctaagtcctcgacagagtggaccacagtggaaaggccccaaaccagcttttggacagcagcatcagcagcaacctaagtcacaagcagaacctctttcaggaaacaaagaaccattagcagacaccagtagtaaccagcagaagaattttaaaatgcaatcagctgcattttccattgctgcagatgtaaaggatgtcaaggcggctcagtcaaatgagaatctaagcgactctcaacaagagccacctaaaagtgaagtctcggaagggcccgtagagccctctaattgggaccagaatgttcaaagtatggagactcaaatcgacaaagcccaagctgttactcagcctgtaccccttgcgaataagcctgtacctgctcaatctacttttccttcaaaaacaggggggatggagggaggaacagcagtagcaacatcatcattaacagcagataatgattttaaacctgtgggtattggtctaccccattcagaaaacaaccaagataaaggcctgcctcggccagataatagagataatagattagaaggcaatagaggcaacagctcatcttacagaggtcctgggcaaagcagaatggaagacacacgggataaaggtctagtaaacagaggtcgcggccaggcaatcatcgaggcccaggattggtcaagcaagaagactttcgggataagatgatgggtagaagagaagatagtcgagagaagatgaacagaggagaaggtagccgggacagagggttggtgaggcctggaagcagtcgggagaaagtgccaggtggtcttcaagggagccaggacaggggtgcagctggcagccgagaaaggggaccacctcggagggctggcagtcaggagaggggacctcttcgaagggctgggagtagagagagaataccaccccgaagagctgggagcagggagagaggaccacctcgagggcctggcagtcgagaaaggggactgggaagatcagattttggtcgtgatagaggtccattcagaccagaaccaggagatggtggggaaaaaatgtatccatatcaccgggatgagcctcctagggctccatggaaccatggagaagagcgagggcatgaagagtttccattagatggtagaaatgctccaatggaacgagaaagactcgatgactgggatagagagagatactggagagaatgtgaacgtgactatcaagatgatacactagagctctataacagagaggacaggttctcagcaccaccatctcggtctcatgatggagataggcgaggcccttggtgggatgattgggagagagaccaggatatggatgaggactacaatagggaaatggaaagggacatggacagggatgtggatcggatttcaagacctatggatatgtatgatagaagtttggataatgagtgggacagagattatgggagaccactggatgaacaagaatcacagtttcgtgaacgggatattccatctcttccacctttaccgcccctcccacctcttccacctttggatagatatcgggatgatagatggagagaagaaagaaatcgagagcatgggtatgatcgagatttccgtgataggggtgagttgaggattcgagagtatccagaaagaggagatacatggcgggaaaagcgagattatgttcctgacagaatggactgggaaagagaacggttgtcagacagatggtacccatctgatgtggatagacattcccccatggcggaacatatgccctcctcacatcattcctcagaaatgatggggtccgatgcaagcttagactctgaccaaggccttggaggggtaatggttctcagtcagaggcagcatgaaatcattttgaaagctgcacaagaactgaaaatgcttcgggaacagaaagaacagcttcaaaagatgaaagacttcgggtctgagccacagatggctgaccatctaccacctcaggaatcaagattgcagaatacatcttcaagacctggaatgtatccgcctccagggtcgtatagacctccccctcctatgggcaaaccaccaggttcaattgtaagaccctctgctccaccagcaagatcatctgttcctgtgaccaggccacctgtcccaataccaccacctccacctcctccacctctacctcctcctcctccagtgataaagccacaaacttcagctgtagaacaggaacgatgggatgaagattctttctatgggctctgggatacaaatgatgaacaaggactgaattcagaatttaagtcagaaactgcagcaattccatctgctccagtattaccacccccacctgttcactcttccattccccctcctggcccagtgcctatgggtatgccaccaatgtccaagccaccaccagtacaacagactgttgattatggccatggccgagatatatccactaataaagttgaacagataccttatggagaaagaataactctacgcccagatccactacctgaaagatcaacttttgagacagagcatgcaggccaacgtgatcgttatgatagagaaagagatcgtgagccttattttgatcgtcaaagtaatgtcatagcagatcatcgagattttaaaagggatcgtgagacacatagagatcgagaccgggatcgtggtgttattgactatgaccgggatcgatttgacagagaacgccgaccccgagatgatagagctcagtcatatcgagacaaaaaagaccattcctcatccagaagagggggttttgataggccatcctatgaccggaagtctgaccgaccagtctatgaaggaccatccatgtttggaggagaacgaaggacttatcctgaggagcgaatgcctctgccagctccttcactgagccaccagcctcctccagctccacgagtcgagaagaagcctgaatcaaagaatgtggacgatattttgaaaccaccgggccgggagagcagacctgagagaattgttgttataatgagaggattacctggcagtggaaagacacatgttgcaaaacttattcgagataaggaggtagaatttggaggacctgcacccagagttctaagcctggatgattacttcatcactgaagtggaaaaagaagaaaaagatccagattctggaaagaaagtgaaaaagaaggtaatggaatatgaatatgaagctgagatggaggagacttaccgcaccagcatgttcaaaactttcaaaaagactctggatgatggcttttttcccttcatcatcctggatgccatcaatgacagagttaggcattttgaccagttttggagtgcagcaaaaaccaagggatttgaggtatatttggctgaaatgagtgcagataaccagacttgtggcaagagaaatattcatggaagaaagcttaaagaaataaataagatggctgatcactgggaaactgcacctcgtcacatgatgcgtctagatattcgttctttgctgcaagatgctgctattgaagaggtagagatggaagattttgatgcaaatatcgaagaacagaaagaagaaaagaaagatgcagaggaagaggaaagcgaactgggttacattccgaaaagcaaatgggagatggacacatctgaggcaaagctagacaagttggatggcttgaggactggtactaaaaggaaacgtgactgggaggccattgccagcagaatggaggattatcttcagctccccgatgattatgatactcgtgcttctgagcctgggaagaagagggtcagatgggcagacctggaagagaagaaggatgcagataggaaaagggccataggttttgtggtcggacagactgattgggagaagatcacagatgaaagtggtcacctggctgaaaaagccctcaatcgaaccaaatatatatgagacttagtttttgaacggagtcattattcctctaaggtggttcgctttgaggtggtctgaagccaaggcctcgcggagcttctttgtgtgtcaccttgcttccacgtttcagttcttgttttgtttctactgctttagttttttttaaagttctccagtgtccccaagaggtattagaatcttgctgtacccaagcaagacgttaatttttcttttaactgttttggggagggagggagtgatagcttaactgctgaagccaggcgggggtctgctggaggattccaacagagagtatttcctccactgtacaatgtcacagactatctctatcatcattgctttgtggctgtttctgttttttactgtatgtaactggtagctgattgtactaggattaaaaacaataaactttcatgataaagccgatgagattcatgggctatacagcatgggcccttttctcttgttttcttaattttatttttaattgctttttaaatatggtatgtcctaattaaatgctagctgaacatcccaaaacctttttttcattgaatattatatggctcaatgattccgtagcacatgttgtaaaacacagggttcaaatgatgttcaaaacactcatctttgttttatagctgatttctctatctttgtgtcttgaagactgaccaagttcaaatattcatcagttccctggagcatatccattctgtaacatgatgctttatttaaaaattttttttgatcctctctctgttcttccctctcttctttccttccttcttcttttcactttctgcctttatgctgttaggtttttattttttcctgatctggctttgaattctggtagacagaactgatgtattctgtggaactcaagcttgttgccttcatttgaacttgaattgtggatttttaaatgaagattgcagggaaagagtataaagatgcagagcactctggcatgtaacctttaagcctgtcaggttttcaagttcttgccagattgttcattactggaaagcatggccttctgcacagaatttcctctcttgtggttaataccaggtggaacccagaaacatacagagataaaacccaaatattatttctatgtaaacacagaaaagggactcttccctttttcatcctgcaaagaaaaaagtcatcttttagcatgaaagaagatgagagagccttcttcctcaagcataatttgcattttgtaatccaactcagtaatttgtaaatgtgttcactgaagacttcaatattttgaaatattctctttcaggcccacagatgaaaatcctttacttttatgacctacattaaagactgtatgaatagagcctaatagttactagcatttgaatagtatcactttgggttcaacaaattgatattatagtactgaatacccctaatttaatggaaattctaacaactttctgtacttttatcttccctgaaaatctgaatttttaagcaagtgactttaagttcattaagtcaatattgaatgtataaattgctacattaaataacttctgctgtttgtaaaaaaa

SEQ ID NO: 309095 - DNA, 5218 bp, Homo sapiens
  misc_feature (4287)..(4287): n is a, c, g, or t
gctacacctcctccaggaatacctccccctggagttccacaagggatacctcctcagttaacagcagccccagttccaccagcctccagttcacagagctcgcaagttccagagaaacctagaccagcactgcttcctactcctgtgtcttttggttctgccccaccgacaacttaccatcctccgttgcaatcagctggtccatcagaacaagtgaattcaaaagctcctttgagcaagtctgctctgccatacagttcattctcatctgatcaaggacttggggagtcttcagctgctccatctcagccaatcactgcagtgaaggacatgccagtgagatcaggtggcctgcttccagatcctcctagaagtagttacttggaaagtccaagaggcccaagatttgatggtcctcgaagatttgaggatttagggtcaaggtgtgaaggaccgagacccaaagggcctcgttttgaaggaaatcgccccgatgggccaagacccagatatgaaggtcacccagcagagggcactaaaagcaagtggggaatgattccccgggggccagcatctcaattttatattacccccagtacatccctaagtcctcgacagagtggaccacagtggaaaggccccaaaccagcttttggacagcagcatcagcagcaacctaagtcacaagcagaacctctttcaggaaacaaagaaccattagcagacaccagtagtaaccagcagaagaattttaaaatgcaatcagctgcattttccattgctgcagatgtaaaggatgtcaaggcggctcagtcaaatgagaatctaagcgactctcaacaagagccacctaaaagtgaagtctcggaagggcccgtagagccctctaattgggaccagaatgttcaaagtatggagactcaaatcgacaaagcccaagctgttactcagcctgtaccccttgcgaataagcctgtacctgctcaatctacttttccttcaaaaacaggggggatggagggaggaacagcagtagcaacatcatcattaacagcagataatgattttaaacctgtgggtattggtctaccccattcagaaaacaaccaagataaaggcctgcctcggccagataatagagataatagattagaaggcaatagaggcaacagctcatcttacagaggtcctgggcaaagcagaatggaagacacacgggataaaggtctagtaaacagaggtcgcggccaggcaatcatcgaggcccaggattggtcaagcaagaagactttcgggataagatgatgggtagaagagaagatagtcgagagaagatgaacagaggagaaggtagccgggacagagggttggtgaggcctggaagcagtcgggagaaagtgccaggtggtcttcaagggagccaggacaggggtgcagctggcagccgagaaaggggaccacctcggagggctggcagtcaggagaggggacctcttcgaagggctgggagtagagagagaataccaccccgaagagctgggagcagggagagaggaccacctcgagggcctggcagtcgagaaaggggactgggaagatcagattttggtcgtgatagaggtccattcagaccagaaccaggagatggtggggaaaaaatgtatccatatcaccgggatgagcctcctagggctccatggaaccatggagaagagcgagggcatgaagagtttccattagatggtagaaatgctccaatggaacgagaaagactcgatgactgggatagagagagatactggagagaatgtgaacgtgactatcaagatgatacactagagctctataacagagaggacaggttctcagcaccaccatctcggtctcatgatggagataggcgaggcccttggtgggatgattgggagagagaccaggatatggatgaggactacaatagggaaatggaaagggacatggacagggatgtggatcggatttcaagacctatggatatgtatgatagaagtttggataatgagtgggacagagattatgggagaccactggatgaacaagaatcacagtttcgtgaacgggatattccatctcttccacctttaccgcccctcccacctcttccacctttggatagatatcgggatgatagatggagagaagaaagaaatcgagagcatgggtatgatcgagatttccgtgataggggtgagttgaggattcgagagtatccagaaagaggagatacatggcgggaaaagcgagattatgttcctgacagaatggactgggaaagagaacggttgtcagacagatggtacccatctgatgtggatagacattcccccatggcggaacatatgccctcctcacatcattcctcagaaatgatggggtccgatgcaagcttagactctgaccaaggccttggaggggtaatggttctcagtcagaggcagcatgaaatcattttgaaagctgcacaagaactgaaaatgcttcgggaacagaaagaacagcttcaaaagatgaaagacttcgggtctgagccacagatggctgaccatctaccacctcaggaatcaagattgcagaatacatcttcaagacctggaatgtatccgcctccagggtcgtatagacctccccctcctatgggcaaaccaccaggttcaattgtaagaccctctgctccaccagcaagatcatctgttcctgtgaccaggccacctgtcccaataccaccacctccacctcctccacctctacctcctcctcctccagtgataaagccacaaacttcagctgtagaacaggaacgatgggatgaagattctttctatgggctctgggatacaaatgatgaacaaggactgaattcagaatttaagtcagaaactgcagcaattccatctgctccagtattaccacccccacctgttcactcttccattccccctcctggcccagtgcctatgggtatgccaccaatgtccaagccaccaccagtacaacagactgttgattatggccatggccgagatatatccactaataaagttgaacagataccttatggagaaagaataactctacgcccagatccactacctgaaagatcaacttttgagacagagcatgcaggccaacgtgatcgttatgatagagaaagagatcgtgagccttattttgatcgtcaaagtaatgtcatagcagatcatcgagattttaaaagggatcgtgagacacatagagatcgagaccgggatcgtggtgttattgactatgaccgggatcgatttgacagagaacgccgaccccgagatgatagagctcagtcatatcgagacaaaaaagaccattcctcatccagaagagggggttttgataggccatcctatgaccggaagtctgaccgaccagtctatgaaggaccatccatgtttggaggagaacgaaggacttatcctgaggagcgaatgcctctgccagctccttcactgagccaccagcctcctccagctccacgagtcgagaagaagcctgaatcaaagaatgtggacgatattttgaaaccaccgggccgggagagcagacctgagagaattgttgttataatgagaggattacctggcagtggaaagacacatgttgcaaaacttattcgagataaggaggtagaatttggaggacctgcacccagagttctaagcctggatgattacttcatcactgaagtggaaaaagaagaaaaagatccagattctggaaagaaagtgaaaaagaaggtaatggaatatgaatatgaagctgagatggaggagacttaccgcaccagcatgttcaaaactttcaaaaagactctggatgatggcttttttcccttcatcatcctggatgccatcaatgacagagttaggcattttgaccagttttggagtgcagcaaaaaccaagggatttgaggtatatttggctgaaatgagtgcagataaccagacttgtggcaagagaaatattcatggaagaaagcttaaagaaataaataagatggctgatcactgggaaactgcacctcgtcacatgatgcgtctagatattcgttctttgctgcaagatgctgctattgaagaggtagagatggaagattttgatgcaaatatcgaagaacagaaagaagaaaagaaagatgcagaggaagaggaaagcgaactggtaggagacagaccaaccactttgaacagtgtctctttattaaaattcttaaagnaggtttaaattcagatctgtggttagacaactactgttgatatacactttagtggtaaaagtttccataatcatcttcaaggagacttttggatactctttatttttcccccagacccaaaagaaccctctaatgtggtgttaagagaaagttttaacagagtgctaagaaacttacccttgtactcatctatttgtgggtggttttaggggagtataccttttaagaaaatcaattacatatgaaagggcattcttacattccagcagatatgtggcacagcctacccaacatatgcataattgtctcttctttgctacaagatctccaaatttgagtttctgtcaacagaggcagaagaacttattgaatggggaggcagagggttgccactggctgctagatttgttcttctgcattttatcctaagtgacggggaaaaattaaatgactgtgtaggcaatggattttgctcaggctgattagaggcttacatagtgtgagtttaaagtttctgtgtacctaatgtaaaatgctttcgatcacacctctgtagagatgtttgcctttccctgtcattcaagaatatgcgacctatagagttacgttgacttttcagtgtttgctgaagtacagagattagcaatgccttggaatagtgttgctttttaaatccagaatattactcggtttatttaatacttgagcccttgctaaagttgctcctcatattcttttgaaaatgtacaaaatgagaactctgattcctaccccctagagtatacagaatctccagggagtggtcccatcgaacccgtgtgtgatatagaggactcttgataaaaactgtgtttatataaagatggtgtcaacctctacattccaagatttcaaatgtggattaaaaaataagttttaaagttaatggcat

SEQ ID NO: 309096 - DNA, 5763 bp, Homo sapiens
gctacacctcctccaggaatacctccccctggagttccacaagggatacctcctcagttaacagcagccccagttccaccagcctccagttcacagagctcgcaagttccagagaaacctagaccagcactgcttcctactcctgtgtcttttggttctgccccaccgacaacttaccatcctccgttgcaatcagctggtccatcagaacaagtgaattcaaaagctcctttgagcaagtctgctctgccatacagttcattctcatctgatcaaggacttggggagtcttcagctgctccatctcagccaatcactgcagtgaaggacatgccagtgagatcaggtggcctgcttccagatcctcctagaagtagttacttggaaagtccaagaggcccaagatttgatggtcctcgaagatttgaggatttagggtcaaggtgtgaaggaccgagacccaaagggcctcgttttgaaggaaatcgccccgatgggccaagacccagatatgaaggtcacccagcagagggcactaaaagcaagtggggaatgattccccgggggccagcatctcaattttatattacccccagtacatccctaagtcctcgacagagtggaccacagtggaaaggccccaaaccagcttttggacagcagcatcagcagcaacctaagtcacaagcagaacctctttcaggaaacaaagaaccattagcagacaccagtagtaaccagcagaagaattttaaaatgcaatcagctgcattttccattgctgcagatgtaaaggatgtcaaggcggctcagtcaaatgagaatctaagcgactctcaacaagagccacctaaaagtgaagtctcggaagggcccgtagagccctctaattgggaccagaatgttcaaagtatggagactcaaatcgacaaagcccaagctgttactcagcctgtaccccttgcgaataagcctgtacctgctcaatctacttttccttcaaaaacaggggggatggagggaggaacagcagtagcaacatcatcattaacagcagataatgattttaaacctgtgggtattggtctaccccattcagaaaacaaccaagataaaggcctgcctcggccagataatagagataatagattagaaggcaatagaggcaacagctcatcttacagaggtcctgggcaaagcagaatggaagacacacgggataaaggtctagtaaacagaggtcgcggccaggcaatcatcgaggcccaggattggtcaagcaagaagactttcgggataagatgatgggtagaagagaagatagtcgagagaagatgaacagaggagaaggtagccgggacagagggttggtgaggcctggaagcagtcgggagaaagtgccaggtggtcttcaagggagccaggacaggggtgcagctggcagccgagaaaggggaccacctcggagggctggcagtcaggagaggggacctcttcgaagggctgggagtagagagagaataccaccccgaagagctgggagcagggagagaggaccacctcgagggcctggcagtcgagaaaggggactgggaagatcagattttggtcgtgatagaggtccattcagaccagaaccaggagatggtggggaaaaaatgtatccatatcaccgggatgagcctcctagggctccatggaaccatggagaagagcgagggcatgaagagtttccattagatggtagaaatgctccaatggaacgagaaagactcgatgactgggatagagagagatactggagagaatgtgaacgtgactatcaagatgatacactagagctctataacagagaggacaggttctcagcaccaccatctcggtctcatgatggagataggcgaggcccttggtgggatgattgggagagagaccaggatatggatgaggactacaatagggaaatggaaagggacatggacagggatgtggatcggatttcaagacctatggatatgtatgatagaagtttggataatgagtgggacagagattatgggagaccactggatgaacaagaatcacagtttcgtgaacgggatattccatctcttccacctttaccgcccctcccacctcttccacctttggatagatatcgggatgatagatggagagaagaaagaaatcgagagcatgggtatgatcgagatttccgtgataggggtgagttgaggattcgagagtatccagaaagaggagatacatggcgggaaaagcgagattatgttcctgacagaatggactgggaaagagaacggttgtcagacagatggtacccatctgatgtggatagacattcccccatggcggaacatatgccctcctcacatcattcctcagaaatgatggggtccgatgcaagcttagactctgaccaaggccttggaggggtaatggttctcagtcagaggcagcatgaaatcattttgaaagctgcacaagaactgaaaatgcttcgggaacagaaagaacagcttcaaaagatgaaagacttcgggtctgagccacagatggctgaccatctaccacctcaggaatcaagattgcagaatacatcttcaagacctggaatgtatccgcctccagggtcgtatagacctccccctcctatgggcaaaccaccaggttcaattgtaagaccctctgctccaccagcaagatcatctgttcctgtgaccaggccacctgtcccaataccaccacctccacctcctccacctctacctcctcctcctccagtgataaagccacaaacttcagctgtagaacaggaacgatgggatgaagattctttctatgggctctgggatacaaatgatgaacaaggactgaattcagaatttaagtcagaaactgcagcaattccatctgctccagtattaccacccccacctgttcactcttccattccccctcctggcccagtgcctatgggtatgccaccaatgtccaagccaccaccagtacaacagactgttgattatggccatggccgagatatatccactaataaagttgaacagataccttatggagaaagaataactctacgcccagatccactacctgaaagatcaacttttgagacagagcatgcaggccaacgtgatcgttatgatagagaaagagatcgtgagccttattttgatcgtcaaagtaatgtcatagcagatcatcgagattttaaaagggatcgtgagacacatagagatcgagaccgggatcgtggtgttattgactatgaccgggatcgatttgacagagaacgccgaccccgagatgatagagctcagtcatatcgagacaaaaaagaccattcctcatccagaagagggggttttgataggccatcctatgaccggaagtctgaccgaccagtctatgaaggaccatccatgtttggaggagaacgaaggacttatcctgaggagcgaatgcctctgccagctccttcactgagccaccagcctcctccagctccacgagtcgagaagaagcctgaatcaaagaatgtggacgatattttgaaaccaccgggccgggagagcagacctgagagaattgttgttataatgagaggattacctggcagtggaaagacacatgttgcaaaacttattcgagataaggaggtagaatttggaggacctgcacccagagttctaagcctggatgattacttcatcactgaagtggaaaaagaagaaaaagatccagattctggaaagaaagtgaaaaagaaggtaatggaatatgaatatgaagctgagatggaggagacttaccgcaccagcatgttcaaaactttcaaaaagactctggatgatggcttttttcccttcatcatcctggatgccatcaatgacagagttaggcattttgaccagttttggagtgcagcaaaaaccaagggatttgaggtatatttggctgaaatgagtgcagataaccagacttgtggcaagagaaatattcatggaagaaagcttaaagaaataaataagatggctgatcactgggaaactgcacctcgtcacatgatgcgtctagatattcgttctttgctgcaagatgctgctattgaagaggtagagatggaagattttgatgcaaatatcgaagaacagaaagaagaaaagaaagatgcagaggaagaggaaagcgaactgggttacattccgaaaagcaaatgggagatggacacatctgaggcaaagctagtatgccatgtggaagaggtgtgagcctttcttcagcccaagaaggaaactttaaacatatttgcacaataaaatttcaaattaaacatttcaaaaagggtgctcagactagaaatacatgctcttctgaaattccatgttgcaactgtaactcctgtcatatatacccagtgtatgaggaaaagttcttgcagttttcacactgcccttctgtattgctgcctggctgtgctctgttgttggaactgaaatatgaaatttttactttgaagtatgttaatgtcaaagttgatcgtattaagtttggaaatcctttgaggtttatctaataagtgtgttggagcttctgtctcttctggtaatactgtaccctgttgaaccaagaacagttttattgtttgtgggacttcgttggttttctaataccataacctgtgtccctgtgcagtcagggggtcacttctttaagatcatgtataatacggcccgtcatatacacgtagatagagccatgtgattccagaaattagaagactggatctgtggaatccatacatgttaaaattttgccaaaatgagatgattaaaatttttgtgagttttataaactgttgcagttcgccttactgatttttcaatgataatcacttttatgggaagggggcttaggaacaaaaaactttgccaagaatgcaaaatcttactggtttttaaagcttgtaacagttgtgtgtaaaacttttatatttgaaacgtaaactcaccctttctgccactgctttcattgcacttttcataccaagttctctccaacgtggtgtctgaaagatttttattatatacactctttatggaattcaatgaagtgtggttatgctgtgtttctgaagtttttaggcttttcttcattggcctgcctaatactagtgtgtttctataacttcagatgattcaaaagtttagtgcttcattgtagcaaaaaatgtatataactcataatatcctacatgtagtattcaaaatcaattattaataaccaataaaagactcaacacattttcattgcgtgttcttctttaagacacctaaactcatatctcataatttctgaatccgcaatccctattcattaattgattacagtttttgagttgttggaaagcctagccctctcagattcagggttcagaaagaattaccaggtctggtaaaattgtctgactagcccttagcctcagaatggtcaacttcatagtataagcaaagaaagtggtgatctcatatagtcagctttttcatgaacattaattcatggtgaatgcactcacagcaaccaaaatccaaaaaaaaaaaatgttcatctaaaaccttaaacattagcttggctcattgagttcttggtacaacctgcttttcatatgacacagtatcaaacatgatttcagatgaaatgggtggtgttaatattgtgttaaagaaa

SEQ ID NO: 309097 - DNA, 1301 bp, Homo sapiens
gctacacctcctccaggaatacctccccctggagttccacaagggatacctcctcagttaacagcagccccagttccaccagcctccagttcacagagctcgcaagttccagagaaacctagaccagcactgcttcctactcctgtgtcttttggttctgccccaccgacaacttaccatcctccgttgcaatcagctggtccatcagaacaagtgaattcaaaagctcctttgagcaagtctgctctgccatacagttcattctcatctgatcaaggacttggggagtcttcagctgctccatctcagccaatcactgcagtgaaggacatgccagtgagatcaggtggcctgcttccagatcctcctagaagtagttacttggaaagtccaagaggcccaagatttgatggtcctcgaagatttgaggatttagggtcaaggtgtgaaggaccgagacccaaagggcctcgttttgaaggaaatcgccccgatgggccaagacccagatatgaaggtcacccagcagagggcactaaaagcaagtggggaatgattccccgggggccagcatctcaattttatattacccccagtacatccctaagtcctcgacagagtggaccacagtggaaaggccccaaaccagcttttggacagcagcatcagcagcaacctaagtcacaagcagaacctctttcaggaaacaaagaaccattagcagacaccagtagtaaccagcagaagaattttaaaatgcaatcagctgcattttccattgctgcagatgtaaaggatgtcaaggcggctcagtcaaatgagaatctaagcgactctcaacaagagccacctaaaagtgaagtctcggaagggcccgtagagccctctaattgggaccagaatgttcaaagtatggagactcaaatcgacaaagcccaagctgttactcagcctgtaccccttgcgaataagcctgtacctgctcaatctacttttccttcaaaaacaggggggatggagggaggaacagcagtagcaacatcatcattaacagcagataatgattttaaacctgtgggtattggtctaccccattcagaaaacaaccaagataaaggcctgcctcggccagataatagagataatagattagaaggcaatagaggcaacagctcatcttacagaggtcctgggcaaagcagaatggaagacacacgggataaaggtctagtaaacagaggtcgcggccaggcaatcatcgagtccaatgttgctgggatcctctagatacctcgcgacac

SEQ ID NO: 309098 - DNA, 2908 bp, Homo sapiens
gctacacctcctccaggaatacctccccctggagttccacaagggatacctcctcagttaacagcagccccagttccaccagcctccagttcacagagctcgcaagttccagagaaacctagaccagcactgcttcctactcctgtgtcttttggttctgccccaccgacaacttaccatcctccgttgcaatcagctggtccatcagaacaagtgaattcaaaagctcctttgagcaagtctgctctgccatacagttcattctcatctgatcaaggacttggggagtcttcagctgctccatctcagccaatcactgcagtgaaggacatgccagtgagatcaggtggcctgcttccagatcctcctagaagtagttacttggaaagtccaagaggcccaagatttgatggtcctcgaagatttgaggatttagggtcaaggtgtgaaggaccgagacccaaagggcctcgttttgaaggaaatcgccccgatgggccaagacccagatatgaaggtcacccagcagagggcactaaaagcaagtggggaatgattccccgggggccagcatctcaattttatattacccccagtacatccctaagtcctcgacagagtggaccacagtggaaaggccccaaaccagcttttggacagcagcatcagcagcaacctaagtcacaagcagaacctctttcaggaaacaaagaaccattagcagacaccagtagtaaccagcagaagaattttaaaatgcaatcagctgcattttccattgctgcagatgtaaaggatgtcaaggcggctcagtcaaatgagaatctaagcgactctcaacaagagccacctaaaagtgaagtctcggaagggcccgtagagccctctaattgggaccagaatgttcaaagtatggagactcaaatcgacaaagcccaagctgttactcagcctgtaccccttgcgaataagcctgtacctgctcaatctacttttccttcaaaaacaggggggatggagggaggaacagcagtagcaacatcatcattaacagcagataatgattttaaacctgtgggtattggtctaccccattcagaaaacaaccaagataaaggcctgcctcggccagataatagagataatagattagaaggcaatagaggcaacagctcatcttacagaggtcctgggcaaagcagaatggaagacacacgggataaaggtctagtaaacagaggtcgcggccaggcaatcatcgaggcccaggattggtcaagcaagaagactttcgggataagatgatgggtagaagagaagatagtcgagagaagatgaacagaggagaaggtagccgggacagagggttggtgaggcctggaagcagtcgggagaaagtgccaggtggtcttcaagggagccaggacaggggtgcagctggcagccgagaaaggggaccacctcggagggctggcagtcaggagaggggacctcttcgaagggctgggagtagagagagaataccaccccgaagagctgggagcagggagagaggaccacctcgagggcctggcagtcgagaaaggggactgggaagatcagattttggtcgtgatagaggtccattcagaccagaaccaggagatggtggggaaaaaatgtatccatatcaccgggatgagcctcctagggctccatggaaccatggagaagagcgagggcatgaagagtttccattagatggtagaaatgctccaatggaacgagaaagactcgatgactgggatagagagagatactggagagaatgtgaacgtgactatcaagatgatacactagagctctataacagagaggacaggttctcagcaccaccatctcggtctcatgatggagataggcgaggcccttggtgggatgattgggagagagaccaggatatggatgaggactacaatagggaaatggaaagggacatggacagggatgtggatcggatttcaagacctatggatatgtatgatagaagtttggataatgagtgggacagagattatgggagaccactggatgaacaagaatcacagtttcgtgaacgggatattccatctcttccacctttaccgcccctcccacctcttccacctttggatagatatcgggatgatagatggagagaagaaagaaatcgagagcatgggtatgatcgagatttccgtgataggggtgagttgaggattcgagagtatccagaaagaggagatacatggcgggaaaagcgagattatgttcctgacagaatggactgggaaagagaacggttgtcagacagatggtacccatctgatgtggatagacattcccccatggcggaacatatgccctcctcacatcattcctcagaaatgatggggtccgatgcaagcttagactctgaccaaggccttggaggggtaatggttctcagtcagaggcagcatgaaatcattttgaaagctgcacaagaactgaaaatgcttcgggaacagaaagaacagcttcaaaagatgaaagacttcgggtctgagccacagatggctgaccatctaccacctcaggaatcaagattgcagaatacatcttcaagacctggaatgtatccgcctccagggtcgtatagacctccccctcctatgggcaaaccaccaggttcaattgtaagaccctctgctccaccagcaggagttcctcaagccgtcggattccttctctgccggggagccccgtgtgctgggcctggccatggtacccggacaccacatcgtttccattgaggtgcagagggagagtctgaccgggcctccgtatctctgaccacgatggcgcttacctttcagacttcattaaacttatgaccgaaaaaaaaaaa

SEQ ID NO: 309099 - DNA, 3069 bp, Homo sapiens
gctacacctcctccaggaatacctccccctggagttccacaagggatacctcctcagttaacagcagccccagttccaccagcctccagttcacagagctcgcaagttccagagaaacctagaccagcactgcttcctactcctgtgtcttttggttctgccccaccgacaacttaccatcctccgttgcaatcagctggtccatcagaacaagtgaattcaaaagctcctttgagcaagtctgctctgccatacagttcattctcatctgatcaaggacttggggagtcttcagctgctccatctcagccaatcactgcagtgaaggacatgccagtgagatcaggtggcctgcttccagatcctcctagaagtagttacttggaaagtccaagaggcccaagatttgatggtcctcgaagatttgaggatttagggtcaaggtgtgaaggaccgagacccaaagggcctcgttttgaaggaaatcgccccgatgggccaagacccagatatgaaggtcacccagcagagggcactaaaagcaagtggggaatgattccccgggggccagcatctcaattttatattacccccagtacatccctaagtcctcgacagagtggaccacagtggaaaggccccaaaccagcttttggacagcagcatcagcagcaacctaagtcacaagcagaacctctttcaggaaacaaagaaccattagcagacaccagtagtaaccagcagaagaattttaaaatgcaatcagctgcattttccattgctgcagatgtaaaggatgtcaaggcggctcagtcaaatgagaatctaagcgactctcaacaagagccacctaaaagtgaagtctcggaagggcccgtagagccctctaattgggaccagaatgttcaaagtatggagactcaaatcgacaaagcccaagctgttactcagcctgtaccccttgcgaataagcctgtacctgctcaatctacttttccttcaaaaacaggggggatggagggaggaacagcagtagcaacatcatcattaacagcagataatgattttaaacctgtgggtattggtctaccccattcagaaaacaaccaagataaaggcctgcctcggccagataatagagataatagattagaaggcaatagaggcaacagctcatcttacagaggtcctgggcaaagcagaatggaagacacacgggataaaggtctagtaaacagaggtcgcggccaggcaatcatcgaggcccaggattggtcaagcaagaagactttcgggataagatgatgggtagaagagaagatagtcgagagaagatgaacagaggagaaggtagccgggacagagggttggtgaggcctggaagcagtcgggagaaagtgccaggtggtcttcaagggagccaggacaggggtgcagctggcagccgagaaaggggaccacctcggagggctggcagtcaggagaggggacctcttcgaagggctgggagtagagagagaataccaccccgaagagctgggagcagggagagaggaccacctcgagggcctggcagtcgagaaaggggactgggaagatcagattttggtcgtgatagaggtccattcagaccagaaccaggagatggtggggaaaaaatgtatccatatcaccgggatgagcctcctagggctccatggaaccatggagaagagcgagggcatgaagagtttccattagatggtagaaatgctccaatggaacgagaaagactcgatgactgggatagagagagatactggagagaatgtgaacgtgactatcaagatgatacactagagctctataacagagaggacaggttctcagcaccaccatctcggtctcatgatggagataggcgaggcccttggtgggatgattgggagagagaccaggatatggatgaggactacaatagggaaatggaaagggacatggacagggatgtggatcggatttcaagacctatggatatgtatgatagaagtttggataatgagtgggacagagattatgggagaccactggatgaacaagaatcacagtttcgtgaacgggatattccatctcttccacctttaccgcccctcccacctcttccacctttggatagatatcgggatgatagatggagagaagaaagaaatcgagagcatgggtatgatcgagatttccgtgataggggtgagttgaggattcgagagtatccagaaagaggagatacatggcgggaaaagcgagattatgttcctgacagaatggactgggaaagagaacggttgtcagacagatggtacccatctgatgtggatagacattcccccatggcggaacatatgccctcctcacatcattcctcagaaatgatggggtccgatgcaagcttagactctgaccaaggccttggaggggtaatggttctcagtcagaggcagcatgaaatcattttgaaagctgcacaagaactgaaaatgcttcgggaacagaaagaacagcttcaaaagatgaaagacttcgggtctgagccacagatggctgaccatctaccacctcaggaatcaagattgcagaatacatcttcaagacctggaatgtatccggtatgggagaatgtgtgctcagaaaatgaaatggtttctactttgtatgtttctatgttgtttgattttttttagaagttgaataaataacaaatttcctctataaaatgtaaattttggaaacttaaaagtttatggtaattgaactttgaacaccttaaaagcatgttcaaaagtgtggtagagatgctccttttccccagattttgataagtacaccaagtacacctgaactacatagcttctgttcacaaaatggtagaatttttctaataatttttatgttaaaatagtcctgttggctgggcatagtggctcacacctgtaattctagcactttgggaggctaaggcaagaggattgcttgagcccaggagtttgacaccagccttcgcaaaatggtgagacccctatctctaccaaaaaa

SEQ ID NO: 309100 - DNA, 2894 bp, Homo sapiens
gctacacctcctccaggaatacctccccctggagttccacaagggatacctcctcagttaacagcagccccagttccaccagcctccagttcacagagctcgcaagttccagagaaacctagaccagcactgcttcctactcctgtgtcttttggttctgccccaccgacaacttaccatcctccgttgcaatcagctggtccatcagaacaagtgaattcaaaagctcctttgagcaagtctgctctgccatacagttcattctcatctgatcaaggacttggggagtcttcagctgctccatctcagccaatcactgcagtgaaggacatgccagtgagatcaggtggcctgcttccagatcctcctagaagtagttacttggaaagtccaagaggcccaagggaacagaaagaacagcttcaaaagatgaaagacttcgggtctgagccacagatggctgaccatctaccacctcaggaatcaagattgcagaatacatcttcaagacctggaatgtatccgcctccagggtcgtatagacctccccctcctatgggcaaaccaccaggttcaattgtaagaccctctgctccaccagcaagatcatctgttcctgtgaccaggccacctgtcccaataccaccacctccacctcctccacctctacctcctcctcctccagtgataaagccacaaacttcagctgtagaacaggaacgatgggatgaagattctttctatgggctctgggatacaaatgatgaacaaggactgaattcagaatttaagtcagaaactgcagcaattccatctgctccagtattaccacccccacctgttcactcttccattccccctcctggcccagtgcctatgggtatgccaccaatgtccaagccaccaccagtacaacagactgttgattatggccatggccgagatatatccactaataaagttgaacagataccttatggagaaagaataactctacgcccagatccactacctgaaagatcaacttttgagacagagcatgcaggccaacgtgatcgttatgatagagaaagagatcgtgagccttattttgatcgtcaaagtaatgtcatagcagatcatcgagattttaaaagggatcgtgagacacatagagatcgagaccgggatcgtggtgttattgactatgaccgggatcgatttgacagagaacgccgaccccgagatgatagagctcagtcatatcgagacaaaaaagaccattcctcatccagaagagggggttttgataggccatcctatgaccggaagtctgaccgaccagtctatgaaggaccatccatgtttggaggagaacgaaggacttatcctgaggagcgaatgcctctgccagctccttcactgagccaccagcctcctccagctccacgagtcgagaagaagcctgaatcaaagaatgtggacgatattttgaaaccaccgggccgggagagcagacctgagagaattgttgttataatgagaggattacctggcagtggaaagacacatgttgcaaaacttattcgagataaggaggtagaatttggaggacctgcacccagagttctaagcctggatgattacttcatcactgaagtggaaaaagaagaaaaagatccagattctggaaagaaagtgaaaaagaaggtaatggaatatgaatatgaagctgagatggaggagacttaccgcaccagcatgttcaaaactttcaaaaagactctggatgatggcttttttcccttcatcatcctggatgccatcaatgacagagttaggcattttgaccagttttggagtgcagcaaaaaccaagggatttgaggtatatttggctgaaatgagtgcagataaccagacttgtggcaagagaaatattcatggaagaaagcttaaagaaataaataagatggctgatcactgggaaactgcacctcgtcacatgatgcgtctagatattcgttctttgctgcaagatgctgctattgaagaggtagagatggaagattttgatgcaaatatcgaagaacagaaagaagaaaagaaagatgcagaggaagaggaaagcgaactgggttacattccgaaaagcaaatgggagatggacacatctgaggcaaagctagacaagttggatggcttgaggactggtactaaaaggaaacgtgactgggaggccattgccagcagaatggaggattatcttcagctccccgatgattatgatactcgtgcttctgagcctgggaagaagagggtcagatgggcagacctggaagagaagaaggatgcagataggaaaagggccataggttttgtggtcggacagactgattgggagaagatcacagatgaaagtggtcacctggctgaaaaagccctcaatcgaaccaaatatatatgagacttagtttttgaacggagtcattattcctctaaggtggttcgctttgaggtggtctgaagccaaggcctcgcggagcttctttgtgtgtcaccttgcttccacgtttcagttcttgttttgtttctactgctttagttttttttaaagttctccagtgtccccaagaggtattagaatcttgctgtacccaagcaagacgttaatttttcttttaactgttttggggagggagggagtgatagcttaactgctgaagccaggcgggggtctgctggaggattccaacagagagtatttcctccactgtacaatgtcacagactatctctatcatcattgctttgtggctgtttctgttttttactgtatgtaactggtagctgattgtactaggattaaaaacaataaactttcatgataaagccgatgagattcatgggctataca

SEQ ID NO: 309101 - DNA, 2750 bp, Homo sapiens
ccatgttggccaggctggtctctaactcctgacctcaagtgatccactcgcctccgcgtcccaaagtgctgggattacaggcgtgagccaccgtgcctggcctcaatttattttttaaagcctgtgttactctgatgccaaaagcagacaaagacaaaaaaggaaaactacaaaatgtttataaatgtggaaaaagcatttgacaaaattcaacacccatttataatttttaaaaaatcttagaaagctaggaatagaggggaacagaaagaacagcttcaaaagatgaaagacttcgggtctgagccacagatggctgaccatctaccacctcaggaatcaagattgcagaatacatcttcaagacctggaatgtatccgcctccagggtcgtatagacctccccctcctatgggcaaaccaccaggttcaattgtaagaccctctgctccaccagcaagatcatctgttcctgtgaccaggccacctgtcccaataccaccacctccacctcctccacctctacctcctcctcctccagtgataaagccacaaacttcagctgtagaacaggaacgatgggatgaagattctttctatgggctctgggatacaaatgatgaacaaggactgaattcagaatttaagtcagaaactgcagcaattccatctgctccagtattaccacccccacctgttcactcttccattccccctcctggcccagtgcctatgggtatgccaccaatgtccaagccaccaccagtacaacagactgttgattatggccatggccgagatatatccactaataaagttgaacagataccttatggagaaagaataactctacgcccagatccactacctgaaagatcaacttttgagacagagcatgcaggccaacgtgatcgttatgatagagaaagagatcgtgagccttattttgatcgtcaaagtaatgtcatagcagatcatcgagattttaaaagggatcgtgagacacatagagatcgagaccgggatcgtggtgttattgactatgaccgggatcgatttgacagagaacgccgaccccgagatgatagagctcagtcatatcgagacaaaaaagaccattcctcatccagaagagggggttttgataggccatcctatgaccggaagtctgaccgaccagtctatgaaggaccatccatgtttggaggagaacgaaggacttatcctgaggagcgaatgcctctgccagctccttcactgagccaccagcctcctccagctccacgagtcgagaagaagcctgaatcaaagaatgtggacgatattttgaaaccaccgggccgggagagcagacctgagagaattgttgttataatgagaggattacctggcagtggaaagacacatgttgcaaaacttattcgagataaggaggtagaatttggaggacctgcacccagagttctaagcctggatgattacttcatcactgaagtggaaaaagaagaaaaagatccagattctggaaagaaagtgaaaaagaaggtaatggaatatgaatatgaagctgagatggaggagacttaccgcaccagcatgttcaaaactttcaaaaagactctggatgatggcttttttcccttcatcatcctggatgccatcaatgacagagttaggcattttgaccagttttggagtgcagcaaaaaccaagggatttgaggtatatttggctgaaatgagtgcagataaccagacttgtggcaagagaaatattcatggaagaaagcttaaagaaataaataagatggctgatcactgggaaactgcacctcgtcacatgatgcgtctagatattcgttctttgctgcaagatgctgctattgaagaggtagagatggaagattttgatgcaaatatcgaagaacagaaagaagaaaagaaagatgcagaggaagaggaaagcgaactgggttacattccgaaaagcaaatgggagatggacacatctgaggcaaagctagacaagttggatggcttgaggactggtactaaaaggaaacgtgactgggaggccattgccagcagaatggaggattatcttcagctccccgatgattatgatactcgtgcttctgagcctgggaagaagagggtcagatgggcagacctggaagagaagaaggatgcagataggaaaagggccataggttttgtggtcggacagactgattgggagaagatcacagatgaaagtggtcacctggctgaaaaagccctcaatcgaaccaaatatatatgagacttagtttttgaacggagtcattattcctctaaggtggttcgctttgaggtggtctgaagccaaggcctcgcggagcttctttgtgtgtcaccttgcttccacgtttcagttcttgttttgtttctactgctttagttttttttaaagttctccagtgtccccaagaggtattagaatcttgctgtacccaagcaagacgttaatttttcttttaactgttttggggagggagggagtgatagcttaactgctgaagccaggcgggggtctgctggaggattccaacagagagtatttcctccactgtacaatgtcacagactatctctatcatcattgctttgtggctgtttctgttttttactgtatgtaactggtagctgattgtactaggattaaaaacaataaactttcatgataaagccgatgagattcatgggctataca

SEQ ID NO: 309102 - DNA, 819 bp, Homo sapiens
tgctctagaggatcccagcaacattggactcgagagagtggaccacagtggaaaggccccaaaccagcttttggacagcagcatcagcagcaacctaagtcacaagcagaacctctttcaggaaacaaagaaccattagcagacaccagtagtaaccagcagaagaattttaaaatgcaatcagctgcattttccattgctgcagatgtaaaggatgtcaaggcggctcagtcaaatgagaatctaagcgactctcaacaagagccacctaaaagtgaagtctcggaagggcccgtagagccctctaattgggaccagaatgttcaaagtatggagactcaaatcgacaaagcccaagctgttactcagcctgtaccccttgcgaataagcctgtacctgctcaatctacttttccttcaaaaacaggggggatggagggaggaacagcagtagcaacatcatcattaacagcagataatgattttaaacctgtgggtattggtctaccccattcagaaaacaaccaagataaaggcctgcctcggccagataatagagataatagattagaaggcaatagaggcaacagctcatcttacagaggtcctgggcaaagcagaatggaagaccacctggcactttctcccgactgcttccaggcctcaccaaccctctgtcccggctaccttctcctctgttcatcttctctcgactatcttctcttctacccatcatcttatcccgaaagtcttcttgcttgaccaatcctgggcctcgactgattgcctggccgcgacctctgtttactagacctttat

SEQ ID NO: 309103 - DNA, 1057 bp, Homo sapiens
cagactacaattgtgagtcctgaactgtagctgcctcaaagcgccttcatgatactattctgaagtgactactctgaaatgtggacagtgaagtttggtgaatttggtcatttagtttcttcaaagataatgagattgtgtttcccctaaggatgtatttacagctagtcagtggaaactgaatccattcccagttttaatgcttttccagttcaaacgtgatatgcatgtatgtgtctctttctaacccttcgagcttctctctgtgtacgatttagggttacattccgaaaagcaaatgggagatggacacatctgaggcaaagctagacaagttggatggcttgaggactggtactaaaaggaaacgtgactgggaggccattgccagcagaatggaggattatcttcagctccccgatgattatgatactcgtgcttctgagcctgggaagaagagggtcagatgggcagacctggaagagaagaaggatgcagataggaaaagggccataggttttgtggtcggacagactgattgggagaagatcacagatgaaagtggtcacctggctgaaaaagccctcaatcgaaccaaatatatatgagacttagtttttgaacggagtcattattcctctaaggtggttcgctttgaggtggtctgaagccaaggcctcgcggagcttctttgtgtgtcaccttgcttccacgtttcagttcttgttttgtttctactgctttagttttttttaaagttctccagtgtccccaagaggtattagaatcttgctgtacccaagcaagacgttaatttttcttttaactgttttggggagggagggagtgatagcttaactgctgaagccaggcgggggtctgctggaggattccaacagagagtatttcctccactgtacaatgtcacagactatctctatcatcattgctttgtggctgtttctgttttttactgtatgtaactggtagctgattgtactaggattaaaaacaataaactttcatgataaagccgatgagattcatgggctataca

SEQ ID NO: 309104 - DNA, 903 bp, Homo sapiens
  misc_feature (4)..(4): n is a, c, g, or t
  misc_feature (17)..(17): n is a, c, g, or t
cagnatgaatctggagngggtgagtacagacaggaagactaggtagagattagtgctttgctttcaggtgacaggattgagctgaactgttcaggagctggaatggttaggacttggattgtccagagagttttctctttgtgacttaaaatatatggcttttcccagttttcctgggttagtttttaattttttaaacttgcggtttcaaatgagtcattctaccccttagactgtccagagagggagggggctctttgcatatttatttttcctaaagctcagcctaatgctatgttctttttaggtcagatgggcagacctggaagagaagaaggatgcagataggaaaagggccataggttttgtggtcggacagactgattgggagaagatcacagatgaaagtggtcacctggctgaaaaagccctcaatcgaaccaaatatatatgagacttagtttttgaacggagtcattattcctctaaggtggttcgctttgaggtggtctgaagccaaggcctcgcggagcttctttgtgtgtcaccttgcttccacgtttcagttcttgttttgtttctactgctttagttttttttaaagttctccagtgtccccaagaggtattagaatcttgctgtacccaagcaagacgttaatttttcttttaactgttttggggagggagggagtgatagcttaactgctgaagccaggcgggggtctgctggaggattccaacagagagtatttcctccactgtacaatgtcacagactatctctatcatcattgctttgtggctgtttctgttttttactgtatgtaactggtagctgattgtactaggattaaaaacaataaactttcatgataaagccgatgagattcatgggctataca

SEQ ID NO: 309105 - DNA, 1163 bp, Homo sapiens
gctacacctcctccaggaatacctccccctggagttccacaagggatacctcctcagttaacagcagccccagttccaccagcctccagttcacagagctcgcaagttccagagaaacctagaccagcactgcttcctactcctgtgtcttttggttctgccccaccgacaacttaccatcctccgttgcaatcagctggtccatcagaacaagtgaattcaaaagctcctttgagcaagtctgctctgccatacagttcattctcatctgatcaaggacttggggagtcttcagctgctccatctcagccaatcactgcagtgaaggacatgccagtgagatcaggtggcctgcttccagatcctcctagaagtagttacttggaaagtccaagaggcccaagatttgatggtcctcgaagatttgaggatttagggtcaaggtgtgaaggaccgagacccaaagggcctcgttttgaaggaaatcgccccgatgggccaagacccagatatgaaggtcacccagcagagggcactaaaagcaagtggggaatgattccccgggggccagcatctcaattttatattacccccagtacatccctaagtcctcgacagagtggaccacagtggaaaggccccaaaccagcttttggacagcagcatcagcagcaacctaagtcacaagcagaacctctttcaggaaacaaagaaccattagcagacaccagtagtaaccagcagaagaattttaaaatgcaatcagctgcattttccattgctgcagatgtaaaggatgtcaaggcggctcagtcaaatgagaatctaagcgactctcaacaagagccacctaaaagtgaagtctcggaagggcccgtagagccctctaattgggaccagaatgttcaaagtatggagactcaaatcgacaaagcccaagctgttactcagcctgtaccccttgcgaataagcctgtacctgctcaatctacttttcccaggaccgctgtaagatgagctgttgcctctattgccttctaatctattatctctattatctggccgaggcaggcctttatcttggttgttttctgaatggggtagaccaatacccacaggtttaaaatcattatctgctgttaatgatgatgttgctactgctg

SEQ ID NO: 309106 - DNA, 346 bp, Homo sapiens
tatgatcgagatttccgtgataggggtgagttgaggattcgagagtatccagaaagaggagatacatggcgggaaaagcgagattatgttcctgacagaatggactgggaaagagaacggttgtcagacagatggtacccatctgatgtggatagacattcccccatggcggaacatatgccctcctcacatcattcctcagaaatgatggggtccgatgcaagcttagactctgaccaaggccttggaggggtaatggttctcagtcagaggcagcatgaaatcattttgaaagctgcacaagaactgaaaatgcttcggtaagttgactccttcagatcctttc

SEQ ID NO: 309107 - DNA, 928 bp, Homo sapiens
aggagtacgctacacccggaagtgtcttcagggagaggaagccggcggcctcactgctatgggccgcaacaagaagaagaagcgagatggtgacgaccggcggccgaggctcgttcttagcttcgacgaggagaagaggcgggagtacctgacaggcttccacaagcggaaggtcgagcgaaagaaggcagccattgaggagattaagcagcggctgaaagaggagcagaggaagcttcgggaggagcgccaccaggaatacttgaagatgctggcagagagagaagaggctctggaggaggcagatgagctggaccggttggtgacagcaaagacggagtcggtgcagtatgaccaccccaaccacacagtcaccgtgaccaccatcagtgacctggacctctcgggggcccggctgctcgggctgaccccacctgagggaggggctggagacaggtctgaggaggaggcgtcatccacggagaaaccaaccaaagccttgcccaggaagtccagagaccccctgctctctcagcggatctcctccctcacagcatcactacatgcacacagccgcaaaaaggtcaagaggaaacatccccgacgggcccaggactccaaaaagcccccaagggcccctcgtaccagcaaggcccagcgccgccgtctcacaggcaaagcacggcacagcggggagtgagaccgagaacgaagcggtgccccagtctaggctgcggggacctgtccttgctcagcttggctgtccctgtagcccagcctgcacctaggtgtgcctaccgcatgttgccgctgctgtttctgctgggacgtctgactccagttccttctcccctctccagtgacaaggtcatttacaacttacatttacaatttatagtgtttaccagtattaaattctcagccactc

SEQ ID NO: 309108 - DNA, 1296 bp, Homo sapiens
aggagtacgctacacccggaagtgtcttcagggagaggaagccggcggcctcactgctatgggccgcaacaagaagaagaagcgagatggtgacgaccggcggccgaggctcgttcttagcttcgacgaggagaagaggcgggagtacctgacaggcttccacaagcggaaggtcgagcgaaagaaggcagccattgaggagattaagcagcggctgaaagaggagcagaggaagcttcgggaggagcgccaccaggaatacttgaagatgctggcagagagagaagaggctctggaggaggcagatgagctggaccggttggtgacagcaaagacggagtcggtgcagtatgaccaccccaaccacacagtcaccgtgaccaccatcagtgacctggacctctcgggggcccggctgctcgggctgaccccacctgagggaggggctggagacaggtctgaggaggaggcgtcatccacggagaaaccaaccaaagccttgcccaggaagtccagagaccccctgctctctcagcggatctcctccctcacagcatcactacatgcacacagccgcaaaaaggtcaagaggaaacatccccgacgggcccaggactccaaaaagcccccaagggcccctcgtaccagcaaggcccagcgccgccgtctcacaggcaaagcacggcacagcggggagtgagaccgagaacgaagcggtgccccagtctaggctgcggggacctgtccttgctcagcttggctgtccctgtagcccagcctgcacctaggtgtgcctaccgcatgttgccgctgctgtttctgctgggacgtctgactccagttccttctcccctctccagtgacaaggtcatttacaacttacatttacaatttatagtgtttaccagtattaaattctcagccactcaaaaaaaaaaaaaaaaaaaaccggaaaatagttcttccccctcgggcgattcgcgcgcggggtttcgcaaaaggtgtgtcccttttttacacatgaagcgtggtctcaggtcccagggaggtgatactaaggcctacccccagggcgagggccggcgtcgggacgcatacaggggggggaacccccggagtgagagtgcagtcattggaacggaagccccctcaagtttgtgagacccttgcgaactcacgatttggtgcaatctgaaactgttgcaaacacaatcatgaaccacaacacggtgttgagctcggagaacaacggaagggagcatggaacacattatatgagcacgaaacgaccaatga

SEQ ID NO: 309109 - DNA, 369 bp, Homo sapiens
acccagaaacagcttcagaagcctggctgcagatggagtgccctctgctggacattggagaacacgtcccccaggctgccctgccttgtcctcagttcacccacattgattctcccctacactggctgacactcacaggacactaggactggggccacaaccgggcagaggaaagtcctggggcagtaaaatgtggattgtacctcaaaagagatcatcataagccaggcacagtggtgggcacctgtggttccagctactcctgaagctgaatggggaggatcgcttgagcccaggagtttgagaccagcttgggcaacatagtgagaccctcatctctataaataaataaataaataaataataaaa

SEQ ID NO: 309110 - DNA, 2835 bp, Homo sapiens
aggagtacgctacacccggaagtgtcttcagggagaggaagccggcggcctcactgctatgggccgcaacaagaagaagaagcgagatggtgacgaccggcggccgaggctcgttcttagcttcgacgaggagaagaggcgggagtacctgacaggcttccacaagcggaaggtcgagcgaaagaaggcagccattgaggagattaagcagcggctgaaagaggagcagaggaagcttcgggaggagcgccaccaggaatacttgaagatgctggcagagagagaagaggctctggaggaggcagatgagctggaccggttggtgacagcaaagacggagtcggtgcagtatgaccaccccaaccacacagtcaccgtgaccaccatcagtgacctggacctctcgggggcccggctgctcgggctgaccccacctgagggaggggctggagacaggtctgaggaggaggcgtcatccacggagaaaccaaccaaagccttgcccaggaagtccagagaccccctgctctctcagcggatctcctccctcacagcatcactacatgcacacagccgcaaaaaggtcaagaggaaacatccccgacgggcccaggactccaaaaagcccccaagggcccctcgtaccagcaaggcccagcgccgccgtctcacaggcaaagcacggcacagcggggagtgagaccgagaacgaagcggtgccccagtctaggctgcggggacctgtccttgctcagcttggctgtccctgtagcccagcctgcacctaggtaatgactgcacagctcaaggttgggaagccaggacctctctggcctggggccagctgcctttgcctggggtcagctgcctttgcctggggtttgaattcccgaaggagcaggcagctgagagcaggcctcccccaggaagagccttcagagccacgtgggggcatcttcccaaatgtgcaccccacctggcactcatcagatttgtgcgcttgtgatttgtttgtccttgataccacgcacaagggcaggtttttggggtggtggaaatggccagggcccatgggtctgtctccagcagttagccctgtggctgcaataaagtacagttctccctgtgttaagatcctaaccagggttaaggatcagtgtgtccgttgctagaatccagagcccacctgctgctctgaaaagcaggctcctgaggccagtgggggagcagtgccccccatgcccttcaccgaggagcctctgtgcctgtcccttgtcctcggccccaggagtctcctcaactgacactgaagtggtggaagcagttgagtgccaggtcatcccccatcaccacactggggcagcgtccccaggcttccagcagctcccaggtgggtcccaacgtggaaggattaattaattctttctaaagcagttgcagccgggcttggtggctcacgcctgtaatcccagcactttgggaggcccaggcgggcagatcacttaaggtcgggagctcgagaccagcctggccaacatggtgaaaccctgtctctactaaaaatgcaaaaattagccaggtgtggtggcacacgcgtgtaatcccagctacttgggaggctgaggtggaagaatcacttgaaccctggaggcggaggctgcagtgagccgagatcacgccattgcactccagcctgggcaacgttgtgaccttgtctcaaaaaaaaactaaaaaataaagcagttgcatcttgactcgtacaaaagtagcccccaccagagtagaccctgcgggtgccagctagaactccacaaggggccatgtcttcacactccttccagatggatgagttgatggaaaccctgtcccttccttgtcccagcttgtcagtcctgggcaggagagaatttcaggttgtgccttggttagaggagctgtgttgggtcctaaacactaggaccacaaaggggagtgaactgtgttcccagggcttgctgacgcccgtggactatggagtcaggatgacaggacagtgcggtgaggggcatctgcgacaggactgcgggctctacccgccctgatgtgggagctcctggagtgggggtgagcagtgagccagggtctgcagggctgtcctctctccacagccaacagccaggccttacagtggggcaggcttagtgactgtgcctcagttatgctgtacctgggagtgggcaggccctctcccatgtcaccatcaaaacccactgatgaaggctggtgggagtctgagggctgcacccgggtatggtgagttcccctcagggattgtgctgagcgccttggcctggcttcttggctccgcccacctgctctccctgccaccaagttgtcttccccgggtggcatgtgccacttggctgcctcgtgcctgggcacagtggtgcctattatgggccctccaggtggctctggtgctcagcctgctgtgagcaggaacagctgagtcccaggggttcttgcacacagcagggctcgggtttgaatccaggctctgctgcttggtcgctgcatgagcttctgctgtgctgacctctctggtttgtctcgtcatgtgtaaggtgacaccagatacctacctcttagggctgccccgagactaaaataagaccatgtgcatgaaccacttaccaaagtgcctgttgctctccaggtgtgcctaccgcatgttgccgctgctgtttctgctgggacgtctgactccagttccttctcccctctccagtgacaaggtcatttacaacttacatttacaatttatagtgtttaccagtattaaattctcagccactc

SEQ ID NO: 309111 - DNA, 2815 bp, Homo sapiens
aggagtacgctacacccggaagtgtcttcagggagaggaagccggcggcctcactgctatgggccgcaacaagaagaagaagcgagatggtgacgaccggcggccgaggctcgttcttagcttcgacgaggagaagaggcgggagtacctgacaggcttccacaagcggaaggtcgagcgaaagaaggcagccattgaggagattaagcagcggctgaaagaggagcagaggaagcttcgggaggagcgccaccaggaatacttgaagatgctggcagagagagaagaggctctggaggaggcagatgagctggaccggttggtgacagcaaagacggagtcggtgcagtatgaccaccccaaccacacagtcaccgtgaccaccatcagtgacctggacctctcgggggcccggctgctcgggctgaccccacctgagggaggggctggagacaggtctgaggaggaggcgtcatccacggagaaaccaaccaaagccttgcccaggaagtccagagaccccctgctctctcagcggatctcctccctcacagcatcactacatgcacacagccgcaaaaaggtcaagaggaaacatccccgacgggcccaggactccaaaaagcccccaagggcccctcgtaccagcaaggcccagcgccgccgtctcacaggcaaagcacggcacagcggggagtgagaccgagaacgaagcggtgccccagtctaggctgcggggacctgtccttgctcagcttggctgtccctgtagcccagcctgcacctaggtaatgactgcacagctcaaggttgggaagccaggacctctctggcctggggccagctgcctttgcctggggtttgaattcccgaaggagcaggcagctgagagcaggcctcccccaggaagagccttcagagccacgtgggggcatcttcccaaatgtgcaccccacctggcactcatcagatttgtgcgcttgtgatttgtttgtccttgataccacgcacaagggcaggtttttggggtggtggaaatggccagggcccatgggtctgtctccagcagttagccctgtggctgcaataaagtacagttctccctgtgttaagatcctaaccagggttaaggatcagtgtgtccgttgctagaatccagagcccacctgctgctctgaaaagcaggctcctgaggccagtgggggagcagtgccccccatgcccttcaccgaggagcctctgtgcctgtcccttgtcctcggccccaggagtctcctcaactgacactgaagtggtggaagcagttgagtgccaggtcatcccccatcaccacactggggcagcgtccccaggcttccagcagctcccaggtgggtcccaacgtggaaggattaattaattctttctaaagcagttgcagccgggcttggtggctcacgcctgtaatcccagcactttgggaggcccaggcgggcagatcacttaaggtcgggagctcgagaccagcctggccaacatggtgaaaccctgtctctactaaaaatgcaaaaattagccaggtgtggtggcacacgcgtgtaatcccagctacttgggaggctgaggtggaagaatcacttgaaccctggaggcggaggctgcagtgagccgagatcacgccattgcactccagcctgggcaacgttgtgaccttgtctcaaaaaaaaactaaaaaataaagcagttgcatcttgactcgtacaaaagtagcccccaccagagtagaccctgcgggtgccagctagaactccacaaggggccatgtcttcacactccttccagatggatgagttgatggaaaccctgtcccttccttgtcccagcttgtcagtcctgggcaggagagaatttcaggttgtgccttggttagaggagctgtgttgggtcctaaacactaggaccacaaaggggagtgaactgtgttcccagggcttgctgacgcccgtggactatggagtcaggatgacaggacagtgcggtgaggggcatctgcgacaggactgcgggctctacccgccctgatgtgggagctcctggagtgggggtgagcagtgagccagggtctgcagggctgtcctctctccacagccaacagccaggccttacagtggggcaggcttagtgactgtgcctcagttatgctgtacctgggagtgggcaggccctctcccatgtcaccatcaaaacccactgatgaaggctggtgggagtctgagggctgcacccgggtatggtgagttcccctcagggattgtgctgagcgccttggcctggcttcttggctccgcccacctgctctccctgccaccaagttgtcttccccgggtggcatgtgccacttggctgcctcgtgcctgggcacagtggtgcctattatgggccctccaggtggctctggtgctcagcctgctgtgagcaggaacagctgagtcccaggggttcttgcacacagcagggctcgggtttgaatccaggctctgctgcttggtcgctgcatgagcttctgctgtgctgacctctctggtttgtctcgtcatgtgtaaggtgacaccagatacctacctcttagggctgccccgagactaaaataagaccatgtgcatgaaccacttaccaaagtgcctgttgctctccaggtgtgcctaccgcatgttgccgctgctgtttctgctgggacgtctgactccagttccttctcccctctccagtgacaaggtcatttacaacttacatttacaatttatagtgtttaccagtattaaattctcagccactc

SEQ ID NO: 309112 - DNA, 3023 bp, Homo sapiens
aggagtacgctacacccggaagtgtcttcagggagaggaagccggcggcctcactgctatgggccgcaacaagaagaagaagcgagatggtgacgaccggcggccgaggctcgttcttagcttcgacgaggagaagaggcgggagtacctgacaggcttccacaagcggaaggtcgagcgaaagaaggcagccattgaggagattaagcagcggctgaaagaggagcagaggaagcttcgggaggagcgccaccaggaatacttgaagatgctggcagagagagaagaggctctggaggaggcagatgagctggaccggttggtgacagcaaagacggagtcggtgcagtatgaccaccccaaccacacagtcaccgtgaccaccatcagtgacctggacctctcgggggcccggctgctcgggctgaccccacctgagggaggggctggagacaggtctgaggaggaggcgtcatccacggagaaaccaaccaaagccttgcccaggaagtccagagaccccctgctctctcagcggatctcctccctcacagcatcactacatgcacacagccgcaaaaaggtcaagaggaaacatccccgacgggcccaggactccaaaaagcccccaagggcccctcgtaccagcaaggcccagcgccgccgtctcacaggcaaagcacggcacagcggggagtgagaccgagaacgaagcggtgccccagtctaggctgcggggacctgtccttgctcagcttggctgtccctgtagcccagcctgcacctaggtaatgactgcacagctcaaggttgggaagccaggacctctctggcctggggccagctgcctttgcctggggtcagctgcctttgcctggggtttgaattcccgaaggagcaggcagctgagagcaggcctcccccaggaagagccttcagagccacgtgggggcatcttcccaaatgtgcaccccacctggcactcatcagatttgtgcgcttgtgatttgtttgtccttgataccacgcacaagggcaggtttttggggtggtggaaatggccagggcccatgggtctgtctccagcagttagccctgtggctgcaataaagtacagttctccctgtgttaagatcctaaccagggttaaggatcagtgtgtccgttgctagaatccagagcccacctgctgctctgaaaagcaggctcctgaggccagtgggggagcagtgccccccatgcccttcaccgaggagcctctgtgcctgtcccttgtcctcggccccaggagtctcctcaactgacactgaagtggtggaagcagttgagtgccaggtcatcccccatcaccacactggggcagcgtccccaggcttccagcagctcccaggtgggtcccaacgtggaaggattaattaattctttctaaagcagttgcagccgggcttggtggctcacgcctgtaatcccagcactttgggaggcccaggcgggcagatcacttaaggtcgggagctcgagaccagcctggccaacatggtgaaaccctgtctctactaaaaatgcaaaaattagccaggtgtggtggcacacgcgtgtaatcccagctacttgggaggctgaggtggaagaatcacttgaaccctggaggcggaggctgcagtgagccgagatcacgccattgcactccagcctgggcaacgttgtgaccttgtctcaaaaaaaaactaaaaaataaagcagttgcatcttgactcgtacaaaagtagcccccaccagagtagaccctgcgggtgccagctagaactccacaaggggccatgtcttcacactccttccagatggatgagttgatggaaaccctgtcccttccttgtcccagcttgtcagtcctgggcaggagagaatttcaggttgtgccttggttagaggagctgtgttgggtcctaaacactaggaccacaaaggggagtgaactgtgttcccagggcttgctgacgcccgtggactatggagtcaggatgacaggacagtgcggtgaggggcatctgcgacaggactgcgggctctacccgccctgatgtgggagctcctggagtgggggtgagcagtgagccagggtctgcagggctgtcctctctccacagccaacagccaggccttacagtggggcaggcttagtgactgtgcctcagttatgctgtacctgggagtgggcaggccctctcccatgtcaccatcaaaacccactgatgaaggctggtgggagtctgagggctgcacccgggtatggtgagttcccctcagggattgtgctgagcgccttggcctggcttcttggctccgcccacctgctctccctgccaccaagttgtcttccccgggtggcatgtgccacttggctgcctcgtgcctgggcacagtggtgcctattatgggccctccaggtggctctggtgctcagcctgctgtgagcaggaacagctgagtcccaggggttcttgcacacagcagggctcgggtttgaatccaggctctgctgcttggtcgctgcatgagcttctgctgtgctgacctctctggtttgtctcgtcatgtgtaaggtgacaccagatacctacctcttagggctgccccgagactaaaataagaccatgtgcatgaaccacttaccaaagtgcctgttgctctccaggtgtgcctaccgcatgttgccgctgctgtttctgctgggacgtctgactccagttccttctcccctctccagtgacaaggtcatttacaacttacatttacaatttatagtgtttaccagtattaaattctcagccactcaagtagctaggattacaggcatgtgccacctcgcctggataattttgtatttttagtagagacagggtttttccatgttggtcaggctcttctcgaactcccaacctcaggtgatccgcccacttcggcctctcaaagtgttgggattacaggcgtgagccaccgtgcccagccgatattttatttct

SEQ ID NO: 309113 - DNA, 3203 bp, Homo sapiens
aggagtacgctacacccggaagtgtcttcagggagaggaagccggcggcctcactgctatgggccgcaacaagaagaagaagcgagatggtgacgaccggcggccgaggctcgttcttagcttcgacgaggagaagaggcgggagtacctgacaggcttccacaagcggaaggtcgagcgaaagaaggcagccattgaggagattaagcagcggctgaaagaggagcagaggaagcttcgggaggagcgccaccaggaatacttgaagatgctggcagagagagaagaggctctggaggaggcagatgagctggaccggttggtgacagcaaagacggagtcggtgcagtatgaccaccccaaccacacagtcaccgtgaccaccatcagtgacctggacctctcgggggcccggctgctcgggctgaccccacctgagggaggggctggagacaggtctgaggaggaggcgtcatccacggagaaaccaaccaaagccttgcccaggaagtccagagaccccctgctctctcagcggatctcctccctcacagcatcactacatgcacacagccgcaaaaaggtcaagaggaaacatccccgacgggcccaggactccaaaaagcccccaagggcccctcgtaccagcaaggcccagcgccgccgtctcacaggcaaagcacggcacagcggggagtgagaccgagaacgaagcggtgccccagtctaggctgcggggacctgtccttgctcagcttggctgtccctgtagcccagcctgcacctaggtaatgactgcacagctcaaggttgggaagccaggacctctctggcctggggccagctgcctttgcctggggtcagctgcctttgcctggggtttgaattcccgaaggagcaggcagctgagagcaggcctcccccaggaagagccttcagagccacgtgggggcatcttcccaaatgtgcaccccacctggcactcatcagatttgtgcgcttgtgatttgtttgtccttgataccacgcacaagggcaggtttttggggtggtggaaatggccagggcccatgggtctgtctccagcagttagccctgtggctgcaataaagtacagttctccctgtgttaagatcctaaccagggttaaggatcagtgtgtccgttgctagaatccagagcccacctgctgctctgaaaagcaggctcctgaggccagtgggggagcagtgccccccatgcccttcaccgaggagcctctgtgcctgtcccttgtcctcggccccaggagtctcctcaactgacactgaagtggtggaagcagttgagtgccaggtcatcccccatcaccacactggggcagcgtccccaggcttccagcagctcccaggtgggtcccaacgtggaaggattaattaattctttctaaagcagttgcagccgggcttggtggctcacgcctgtaatcccagcactttgggaggcccaggcgggcagatcacttaaggtcgggagctcgagaccagcctggccaacatggtgaaaccctgtctctactaaaaatgcaaaaattagccaggtgtggtggcacacgcgtgtaatcccagctacttgggaggctgaggtggaagaatcacttgaaccctggaggcggaggctgcagtgagccgagatcacgccattgcactccagcctgggcaacgttgtgaccttgtctcaaaaaaaaactaaaaaataaagcagttgcatcttgactcgtacaaaagtagcccccaccagagtagaccctgcgggtgccagctagaactccacaaggggccatgtcttcacactccttccagatggatgagttgatggaaaccctgtcccttccttgtcccagcttgtcagtcctgggcaggagagaatttcaggttgtgccttggttagaggagctgtgttgggtcctaaacactaggaccacaaaggggagtgaactgtgttcccagggcttgctgacgcccgtggactatggagtcaggatgacaggacagtgcggtgaggggcatctgcgacaggactgcgggctctacccgccctgatgtgggagctcctggagtgggggtgagcagtgagccagggtctgcagggctgtcctctctccacagccaacagccaggccttacagtggggcaggcttagtgactgtgcctcagttatgctgtacctgggagtgggcaggccctctcccatgtcaccatcaaaacccactgatgaaggctggtgggagtctgagggctgcacccgggtatggtgagttcccctcagggattgtgctgagcgccttggcctggcttcttggctccgcccacctgctctccctgccaccaagttgtcttccccgggtggcatgtgccacttggctgcctcgtgcctgggcacagtggtgcctattatgggccctccaggtggctctggtgctcagcctgctgtgagcaggaacagctgagtcccaggggttcttgcacacagcagggctcgggtttgaatccaggctctgctgcttggtcgctgcatgagcttctgctgtgctgacctctctggtttgtctcgtcatgtgtaaggtgacaccagatacctacctcttagggctgccccgagactaaaataagaccatgtgcatgaaccacttaccaaagtgcctgttgctctccaggtgtgcctaccgcatgttgccgctgctgtttctgctgggacgtctgactccagttccttctcccctctccagtgacaaggtcatttacaacttacatttacaatttatagtgtttaccagtattaaattctcagccactcaaaaaaaaaaaaaaaaaaaaccggaaaatagttcttccccctcgggcgattcgcgcgcggggtttcgcaaaaggtgtgtcccttttttacacatgaagcgtggtctcaggtcccagggaggtgatactaaggcctacccccagggcgagggccggcgtcgggacgcatacaggggggggaacccccggagtgagagtgcagtcattggaacggaagccccctcaagtttgtgagacccttgcgaactcacgatttggtgcaatctgaaactgttgcaaacacaatcatgaaccacaacacggtgttgagctcggagaacaacggaagggagcatggaacacattatatgagcacgaaacgaccaatga

SEQ ID NO: 309114 - DNA, 3357 bp, Homo sapiens
agcggggggttcttccggtcccgccccctggcgtggctagagaacccctctcggccttccagcccgcgttcccgcttctcccttctcggccgccaccttctcccttctttacctccccacctcgcctagtgtctgtgcgccgccagatagccggaagctcgggtctcagagcagtggcttcgaccaccctagcccagcccagtccatcggtccggcacacagcaggcgcccagccgtggttgataaatgatgagccaatgaaatgagagtggcttaagttcattcattcgctccctagacatttattgggctcctttggtgtgccaggtcccgtatcaggaagcagaacctctgagcctcagcgtctggccagataaataaatggcacatggtagcgggtcagcgaaaagcccagtgctggaccgtgggacaaaatgggaacagagcagctagcactgtggagatgagaaggggctgagattagaccgagggaaggaggtagggaaatgctgggcatcatcaggaaactcctagcgtgcatcaacaggccctacaggcgagtttagggtcaggtgtcctggggacatgggtgttggtccagtgcagggtttccgaaggtctggatggtggtggccctgaaaaccctgttgagagagtactgagggagtacctgacaggcttccacaagcggaaggtcgagcgaaagaaggcagccattgaggagattaagcagcggctgaaagaggagcagaggaagcttcgggaggagcgccaccaggaatacttgaagatgctggcagagagagaagaggctctggaggaggcagatgagctggaccggttggtgacagcaaagacggagtcggtgcagtatgaccaccccaaccacacagtcaccgtgaccaccatcagtgacctggacctctcgggggcccggctgctcgggctgaccccacctgagggaggggctggagacaggtctgaggaggaggcgtcatccacggagaaaccaaccaaagccttgcccaggaagtccagagaccccctgctctctcagcggatctcctccctcacagcatcactacatgcacacagccgcaaaaaggtcaagaggaaacatccccgacgggcccaggactccaaaaagcccccaagggcccctcgtaccagcaaggcccagcgccgccgtctcacaggcaaagcacggcacagcggggagtgagaccgagaacgaagcggtgccccagtctaggctgcggggacctgtccttgctcagcttggctgtccctgtagcccagcctgcacctaggtaatgactgcacagctcaaggttgggaagccaggacctctctggcctggggccagctgcctttgcctggggtcagctgcctttgcctggggtttgaattcccgaaggagcaggcagctgagagcaggcctcccccaggaagagccttcagagccacgtgggggcatcttcccaaatgtgcaccccacctggcactcatcagatttgtgcgcttgtgatttgtttgtccttgataccacgcacaagggcaggtttttggggtggtggaaatggccagggcccatgggtctgtctccagcagttagccctgtggctgcaataaagtacagttctccctgtgttaagatcctaaccagggttaaggatcagtgtgtccgttgctagaatccagagcccacctgctgctctgaaaagcaggctcctgaggccagtgggggagcagtgccccccatgcccttcaccgaggagcctctgtgcctgtcccttgtcctcggccccaggagtctcctcaactgacactgaagtggtggaagcagttgagtgccaggtcatcccccatcaccacactggggcagcgtccccaggcttccagcagctcccaggtgggtcccaacgtggaaggattaattaattctttctaaagcagttgcagccgggcttggtggctcacgcctgtaatcccagcactttgggaggcccaggcgggcagatcacttaaggtcgggagctcgagaccagcctggccaacatggtgaaaccctgtctctactaaaaatgcaaaaattagccaggtgtggtggcacacgcgtgtaatcccagctacttgggaggctgaggtggaagaatcacttgaaccctggaggcggaggctgcagtgagccgagatcacgccattgcactccagcctgggcaacgttgtgaccttgtctcaaaaaaaaactaaaaaataaagcagttgcatcttgactcgtacaaaagtagcccccaccagagtagaccctgcgggtgccagctagaactccacaaggggccatgtcttcacactccttccagatggatgagttgatggaaaccctgtcccttccttgtcccagcttgtcagtcctgggcaggagagaatttcaggttgtgccttggttagaggagctgtgttgggtcctaaacactaggaccacaaaggggagtgaactgtgttcccagggcttgctgacgcccgtggactatggagtcaggatgacaggacagtgcggtgaggggcatctgcgacaggactgcgggctctacccgccctgatgtgggagctcctggagtgggggtgagcagtgagccagggtctgcagggctgtcctctctccacagccaacagccaggccttacagtggggcaggcttagtgactgtgcctcagttatgctgtacctgggagtgggcaggccctctcccatgtcaccatcaaaacccactgatgaaggctggtgggagtctgagggctgcacccgggtatggtgagttcccctcagggattgtgctgagcgccttggcctggcttcttggctccgcccacctgctctccctgccaccaagttgtcttccccgggtggcatgtgccacttggctgcctcgtgcctgggcacagtggtgcctattatgggccctccaggtggctctggtgctcagcctgctgtgagcaggaacagctgagtcccaggggttcttgcacacagcagggctcgggtttgaatccaggctctgctgcttggtcgctgcatgagcttctgctgtgctgacctctctggtttgtctcgtcatgtgtaaggtgacaccagatacctacctcttagggctgccccgagactaaaataagaccatgtgcatgaaccacttaccaaagtgcctgttgctctccaggtgtgcctaccgcatgttgccgctgctgtttctgctgggacgtctgactccagttccttctcccctctccagtgacaaggtcatttacaacttacatttacaatttatagtgtttaccagtattaaattctcagccactc

SEQ ID NO: 309115 - DNA, 2819 bp, Homo sapiens
acttacacttttttggaatggtgcctagcacatagtgagcgcggcattagccatttttctcctagagcgagcccttctctccttgtataatgactctcctgtctctgccggcttccttcctgtagggagtacctgacaggcttccacaagcggaaggtcgagcgaaagaaggcagccattgaggagattaagcagcggctgaaagaggagcagaggaagcttcgggaggagcgccaccaggaatacttgaagatgctggcagagagagaagaggctctggaggaggcagatgagctggaccggttggtgacagcaaagacggagtcggtgcagtatgaccaccccaaccacacagtcaccgtgaccaccatcagtgacctggacctctcgggggcccggctgctcgggctgaccccacctgagggaggggctggagacaggtctgaggaggaggcgtcatccacggagaaaccaaccaaagccttgcccaggaagtccagagaccccctgctctctcagcggatctcctccctcacagcatcactacatgcacacagccgcaaaaaggtcaagaggaaacatccccgacgggcccaggactccaaaaagcccccaagggcccctcgtaccagcaaggcccagcgccgccgtctcacaggcaaagcacggcacagcggggagtgagaccgagaacgaagcggtgccccagtctaggctgcggggacctgtccttgctcagcttggctgtccctgtagcccagcctgcacctaggtaatgactgcacagctcaaggttgggaagccaggacctctctggcctggggccagctgcctttgcctggggtcagctgcctttgcctggggtttgaattcccgaaggagcaggcagctgagagcaggcctcccccaggaagagccttcagagccacgtgggggcatcttcccaaatgtgcaccccacctggcactcatcagatttgtgcgcttgtgatttgtttgtccttgataccacgcacaagggcaggtttttggggtggtggaaatggccagggcccatgggtctgtctccagcagttagccctgtggctgcaataaagtacagttctccctgtgttaagatcctaaccagggttaaggatcagtgtgtccgttgctagaatccagagcccacctgctgctctgaaaagcaggctcctgaggccagtgggggagcagtgccccccatgcccttcaccgaggagcctctgtgcctgtcccttgtcctcggccccaggagtctcctcaactgacactgaagtggtggaagcagttgagtgccaggtcatcccccatcaccacactggggcagcgtccccaggcttccagcagctcccaggtgggtcccaacgtggaaggattaattaattctttctaaagcagttgcagccgggcttggtggctcacgcctgtaatcccagcactttgggaggcccaggcgggcagatcacttaaggtcgggagctcgagaccagcctggccaacatggtgaaaccctgtctctactaaaaatgcaaaaattagccaggtgtggtggcacacgcgtgtaatcccagctacttgggaggctgaggtggaagaatcacttgaaccctggaggcggaggctgcagtgagccgagatcacgccattgcactccagcctgggcaacgttgtgaccttgtctcaaaaaaaaactaaaaaataaagcagttgcatcttgactcgtacaaaagtagcccccaccagagtagaccctgcgggtgccagctagaactccacaaggggccatgtcttcacactccttccagatggatgagttgatggaaaccctgtcccttccttgtcccagcttgtcagtcctgggcaggagagaatttcaggttgtgccttggttagaggagctgtgttgggtcctaaacactaggaccacaaaggggagtgaactgtgttcccagggcttgctgacgcccgtggactatggagtcaggatgacaggacagtgcggtgaggggcatctgcgacaggactgcgggctctacccgccctgatgtgggagctcctggagtgggggtgagcagtgagccagggtctgcagggctgtcctctctccacagccaacagccaggccttacagtggggcaggcttagtgactgtgcctcagttatgctgtacctgggagtgggcaggccctctcccatgtcaccatcaaaacccactgatgaaggctggtgggagtctgagggctgcacccgggtatggtgagttcccctcagggattgtgctgagcgccttggcctggcttcttggctccgcccacctgctctccctgccaccaagttgtcttccccgggtggcatgtgccacttggctgcctcgtgcctgggcacagtggtgcctattatgggccctccaggtggctctggtgctcagcctgctgtgagcaggaacagctgagtcccaggggttcttgcacacagcagggctcgggtttgaatccaggctctgctgcttggtcgctgcatgagcttctgctgtgctgacctctctggtttgtctcgtcatgtgtaaggtgacaccagatacctacctcttagggctgccccgagactaaaataagaccatgtgcatgaaccacttaccaaagtgcctgttgctctccaggtgtgcctaccgcatgttgccgctgctgtttctgctgggacgtctgactccagttccttctcccctctccagtgacaaggtcatttacaacttacatttacaatttatagtgtttaccagtattaaattctcagccactc

SEQ ID NO: 309116 - DNA, 2880 bp, Homo sapiens
acccagaaacagcttcagaagcctggctgcagatggagtgccctctgctggacattggagaacacgtcccccaggctgccctgccttgtcctcagttcacccacattgattctcccctacactggctgacactcacaggacactaggactggggccacaaccgggcagaggaaagtcctggggcagggagtacctgacaggcttccacaagcggaaggtcgagcgaaagaaggcagccattgaggagattaagcagcggctgaaagaggagcagaggaagcttcgggaggagcgccaccaggaatacttgaagatgctggcagagagagaagaggctctggaggaggcagatgagctggaccggttggtgacagcaaagacggagtcggtgcagtatgaccaccccaaccacacagtcaccgtgaccaccatcagtgacctggacctctcgggggcccggctgctcgggctgaccccacctgagggaggggctggagacaggtctgaggaggaggcgtcatccacggagaaaccaaccaaagccttgcccaggaagtccagagaccccctgctctctcagcggatctcctccctcacagcatcactacatgcacacagccgcaaaaaggtcaagaggaaacatccccgacgggcccaggactccaaaaagcccccaagggcccctcgtaccagcaaggcccagcgccgccgtctcacaggcaaagcacggcacagcggggagtgagaccgagaacgaagcggtgccccagtctaggctgcggggacctgtccttgctcagcttggctgtccctgtagcccagcctgcacctaggtaatgactgcacagctcaaggttgggaagccaggacctctctggcctggggccagctgcctttgcctggggtcagctgcctttgcctggggtttgaattcccgaaggagcaggcagctgagagcaggcctcccccaggaagagccttcagagccacgtgggggcatcttcccaaatgtgcaccccacctggcactcatcagatttgtgcgcttgtgatttgtttgtccttgataccacgcacaagggcaggtttttggggtggtggaaatggccagggcccatgggtctgtctccagcagttagccctgtggctgcaataaagtacagttctccctgtgttaagatcctaaccagggttaaggatcagtgtgtccgttgctagaatccagagcccacctgctgctctgaaaagcaggctcctgaggccagtgggggagcagtgccccccatgcccttcaccgaggagcctctgtgcctgtcccttgtcctcggccccaggagtctcctcaactgacactgaagtggtggaagcagttgagtgccaggtcatcccccatcaccacactggggcagcgtccccaggcttccagcagctcccaggtgggtcccaacgtggaaggattaattaattctttctaaagcagttgcagccgggcttggtggctcacgcctgtaatcccagcactttgggaggcccaggcgggcagatcacttaaggtcgggagctcgagaccagcctggccaacatggtgaaaccctgtctctactaaaaatgcaaaaattagccaggtgtggtggcacacgcgtgtaatcccagctacttgggaggctgaggtggaagaatcacttgaaccctggaggcggaggctgcagtgagccgagatcacgccattgcactccagcctgggcaacgttgtgaccttgtctcaaaaaaaaactaaaaaataaagcagttgcatcttgactcgtacaaaagtagcccccaccagagtagaccctgcgggtgccagctagaactccacaaggggccatgtcttcacactccttccagatggatgagttgatggaaaccctgtcccttccttgtcccagcttgtcagtcctgggcaggagagaatttcaggttgtgccttggttagaggagctgtgttgggtcctaaacactaggaccacaaaggggagtgaactgtgttcccagggcttgctgacgcccgtggactatggagtcaggatgacaggacagtgcggtgaggggcatctgcgacaggactgcgggctctacccgccctgatgtgggagctcctggagtgggggtgagcagtgagccagggtctgcagggctgtcctctctccacagccaacagccaggccttacagtggggcaggcttagtgactgtgcctcagttatgctgtacctgggagtgggcaggccctctcccatgtcaccatcaaaacccactgatgaaggctggtgggagtctgagggctgcacccgggtatggtgagttcccctcagggattgtgctgagcgccttggcctggcttcttggctccgcccacctgctctccctgccaccaagttgtcttccccgggtggcatgtgccacttggctgcctcgtgcctgggcacagtggtgcctattatgggccctccaggtggctctggtgctcagcctgctgtgagcaggaacagctgagtcccaggggttcttgcacacagcagggctcgggtttgaatccaggctctgctgcttggtcgctgcatgagcttctgctgtgctgacctctctggtttgtctcgtcatgtgtaaggtgacaccagatacctacctcttagggctgccccgagactaaaataagaccatgtgcatgaaccacttaccaaagtgcctgttgctctccaggtgtgcctaccgcatgttgccgctgctgtttctgctgggacgtctgactccagttccttctcccctctccagtgacaaggtcatttacaacttacatttacaatttatagtgtttaccagtattaaattctcagccactc

SEQ ID NO: 309117 - DNA, 3250 bp, Homo sapiens
agcggggggttcttccggtcccgccccctggcgtggctagagaacccctctcggccttccagcccgcgttcccgcttctcccttctcggccgccaccttctcccttctttacctccccacctcgcctagtgtctgtgcgccgccagatagccggaagctcgggtctcagagcagtggcttcgaccaccctagcccagcccagtccatcggtccggcacacagcaggcgcccagccgtggttgataaatgatgagccaatgaaatgagagtggcttaagttcattcattcgctccctagacatttattgggctcctttggtgtgccaggtcccgtatcaggaagcagaacctctgagcctcagcgtctggccagataaataaatggcacatggtagcgggtcagcgaaaagcccagtgctggaccgtgggacaaaatgggaacagagcagctagcactgtggagatgagaaggggctgagattagaccgagggaaggaggtagggaaatgctgggcatcatcaggaaactcctagcgtgcatcaacaggccctacagggagtacctgacaggcttccacaagcggaaggtcgagcgaaagaaggcagccattgaggagattaagcagcggctgaaagaggagcagaggaagcttcgggaggagcgccaccaggaatacttgaagatgctggcagagagagaagaggctctggaggaggcagatgagctggaccggttggtgacagcaaagacggagtcggtgcagtatgaccaccccaaccacacagtcaccgtgaccaccatcagtgacctggacctctcgggggcccggctgctcgggctgaccccacctgagggaggggctggagacaggtctgaggaggaggcgtcatccacggagaaaccaaccaaagccttgcccaggaagtccagagaccccctgctctctcagcggatctcctccctcacagcatcactacatgcacacagccgcaaaaaggtcaagaggaaacatccccgacgggcccaggactccaaaaagcccccaagggcccctcgtaccagcaaggcccagcgccgccgtctcacaggcaaagcacggcacagcggggagtgagaccgagaacgaagcggtgccccagtctaggctgcggggacctgtccttgctcagcttggctgtccctgtagcccagcctgcacctaggtaatgactgcacagctcaaggttgggaagccaggacctctctggcctggggccagctgcctttgcctggggtcagctgcctttgcctggggtttgaattcccgaaggagcaggcagctgagagcaggcctcccccaggaagagccttcagagccacgtgggggcatcttcccaaatgtgcaccccacctggcactcatcagatttgtgcgcttgtgatttgtttgtccttgataccacgcacaagggcaggtttttggggtggtggaaatggccagggcccatgggtctgtctccagcagttagccctgtggctgcaataaagtacagttctccctgtgttaagatcctaaccagggttaaggatcagtgtgtccgttgctagaatccagagcccacctgctgctctgaaaagcaggctcctgaggccagtgggggagcagtgccccccatgcccttcaccgaggagcctctgtgcctgtcccttgtcctcggccccaggagtctcctcaactgacactgaagtggtggaagcagttgagtgccaggtcatcccccatcaccacactggggcagcgtccccaggcttccagcagctcccaggtgggtcccaacgtggaaggattaattaattctttctaaagcagttgcagccgggcttggtggctcacgcctgtaatcccagcactttgggaggcccaggcgggcagatcacttaaggtcgggagctcgagaccagcctggccaacatggtgaaaccctgtctctactaaaaatgcaaaaattagccaggtgtggtggcacacgcgtgtaatcccagctacttgggaggctgaggtggaagaatcacttgaaccctggaggcggaggctgcagtgagccgagatcacgccattgcactccagcctgggcaacgttgtgaccttgtctcaaaaaaaaactaaaaaataaagcagttgcatcttgactcgtacaaaagtagcccccaccagagtagaccctgcgggtgccagctagaactccacaaggggccatgtcttcacactccttccagatggatgagttgatggaaaccctgtcccttccttgtcccagcttgtcagtcctgggcaggagagaatttcaggttgtgccttggttagaggagctgtgttgggtcctaaacactaggaccacaaaggggagtgaactgtgttcccagggcttgctgacgcccgtggactatggagtcaggatgacaggacagtgcggtgaggggcatctgcgacaggactgcgggctctacccgccctgatgtgggagctcctggagtgggggtgagcagtgagccagggtctgcagggctgtcctctctccacagccaacagccaggccttacagtggggcaggcttagtgactgtgcctcagttatgctgtacctgggagtgggcaggccctctcccatgtcaccatcaaaacccactgatgaaggctggtgggagtctgagggctgcacccgggtatggtgagttcccctcagggattgtgctgagcgccttggcctggcttcttggctccgcccacctgctctccctgccaccaagttgtcttccccgggtggcatgtgccacttggctgcctcgtgcctgggcacagtggtgcctattatgggccctccaggtggctctggtgctcagcctgctgtgagcaggaacagctgagtcccaggggttcttgcacacagcagggctcgggtttgaatccaggctctgctgcttggtcgctgcatgagcttctgctgtgctgacctctctggtttgtctcgtcatgtgtaaggtgacaccagatacctacctcttagggctgccccgagactaaaataagaccatgtgcatgaaccacttaccaaagtgcctgttgctctccaggtgtgcctaccgcatgttgccgctgctgtttctgctgggacgtctgactccagttccttctcccctctccagtgacaaggtcatttacaacttacatttacaatttatagtgtttaccagtattaaattctcagccactc

SEQ ID NO: 309118 - DNA, 2662 bp, Homo sapiens
  misc_feature (29)..(29): n is a, c, g, or t
  misc_feature (32)..(32): n is a, c, g, or t
gctgcttgtgatctagaggacccgtcagnttncagcagcggctgaaagaggagcagaggaagcttcgggaggagcgccaccaggaatacttgaagatgctggcagagagagaagaggctctggaggaggcagatgagctggaccggttggtgacagcaaagacggagtcggtgcagtatgaccaccccaaccacacagtcaccgtgaccaccatcagtgacctggacctctcgggggcccggctgctcgggctgaccccacctgagggaggggctggagacaggtctgaggaggaggcgtcatccacggagaaaccaaccaaagccttgcccaggaagtccagagaccccctgctctctcagcggatctcctccctcacagcatcactacatgcacacagccgcaaaaaggtcaagaggaaacatccccgacgggcccaggactccaaaaagcccccaagggcccctcgtaccagcaaggcccagcgccgccgtctcacaggcaaagcacggcacagcggggagtgagaccgagaacgaagcggtgccccagtctaggctgcggggacctgtccttgctcagcttggctgtccctgtagcccagcctgcacctaggtaatgactgcacagctcaaggttgggaagccaggacctctctggcctggggccagctgcctttgcctggggtcagctgcctttgcctggggtttgaattcccgaaggagcaggcagctgagagcaggcctcccccaggaagagccttcagagccacgtgggggcatcttcccaaatgtgcaccccacctggcactcatcagatttgtgcgcttgtgatttgtttgtccttgataccacgcacaagggcaggtttttggggtggtggaaatggccagggcccatgggtctgtctccagcagttagccctgtggctgcaataaagtacagttctccctgtgttaagatcctaaccagggttaaggatcagtgtgtccgttgctagaatccagagcccacctgctgctctgaaaagcaggctcctgaggccagtgggggagcagtgccccccatgcccttcaccgaggagcctctgtgcctgtcccttgtcctcggccccaggagtctcctcaactgacactgaagtggtggaagcagttgagtgccaggtcatcccccatcaccacactggggcagcgtccccaggcttccagcagctcccaggtgggtcccaacgtggaaggattaattaattctttctaaagcagttgcagccgggcttggtggctcacgcctgtaatcccagcactttgggaggcccaggcgggcagatcacttaaggtcgggagctcgagaccagcctggccaacatggtgaaaccctgtctctactaaaaatgcaaaaattagccaggtgtggtggcacacgcgtgtaatcccagctacttgggaggctgaggtggaagaatcacttgaaccctggaggcggaggctgcagtgagccgagatcacgccattgcactccagcctgggcaacgttgtgaccttgtctcaaaaaaaaactaaaaaataaagcagttgcatcttgactcgtacaaaagtagcccccaccagagtagaccctgcgggtgccagctagaactccacaaggggccatgtcttcacactccttccagatggatgagttgatggaaaccctgtcccttccttgtcccagcttgtcagtcctgggcaggagagaatttcaggttgtgccttggttagaggagctgtgttgggtcctaaacactaggaccacaaaggggagtgaactgtgttcccagggcttgctgacgcccgtggactatggagtcaggatgacaggacagtgcggtgaggggcatctgcgacaggactgcgggctctacccgccctgatgtgggagctcctggagtgggggtgagcagtgagccagggtctgcagggctgtcctctctccacagccaacagccaggccttacagtggggcaggcttagtgactgtgcctcagttatgctgtacctgggagtgggcaggccctctcccatgtcaccatcaaaacccactgatgaaggctggtgggagtctgagggctgcacccgggtatggtgagttcccctcagggattgtgctgagcgccttggcctggcttcttggctccgcccacctgctctccctgccaccaagttgtcttccccgggtggcatgtgccacttggctgcctcgtgcctgggcacagtggtgcctattatgggccctccaggtggctctggtgctcagcctgctgtgagcaggaacagctgagtcccaggggttcttgcacacagcagggctcgggtttgaatccaggctctgctgcttggtcgctgcatgagcttctgctgtgctgacctctctggtttgtctcgtcatgtgtaaggtgacaccagatacctacctcttagggctgccccgagactaaaataagaccatgtgcatgaaccacttaccaaagtgcctgttgctctccaggtgtgcctaccgcatgttgccgctgctgtttctgctgggacgtctgactccagttccttctcccctctccagtgacaaggtcatttacaacttacatttacaatttatagtgtttaccagtattaaattctcagccactc

SEQ ID NO: 309119 - DNA, 2513 bp, Homo sapiens
aggagtacgctacacccggaagtgtcttcagggagaggaagccggcggcctcactgctatgggccgcaacaagaagaagaagcgagatggtgacgaccggcggccgaggctcgttcttagcttcgacgaggagaagaggcgggagtacctgacaggcttccacaagcggaaggtcgagcgaaagaaggcagccattgaggagattaagcagcggctgaaagaggagcagaggaagcttcgggaggagcgccaccaggaatacttgaagatgctggcagagagagaagaggctctggaggaggcagatgagctggaccggttggtgacagcaaagacggagtcggtgcagtatgaccaccccaaccacacagtcaccgtgaccaccatcagtgacctggacctctcgggggcccggctgctcgggctgaccccacctgagggaggggctggagacaggtctgaggaggaggcgtcatccacggagaaaccaaccaaagccttgcccaggaagtccagagaccccctgctctctcagcggatctcctccctcacagcatcactacatgcacacagccgcaaaaaggtcaagaggaaacatccccgacgggcccaggactccaaaaagcccccaagggcccctcgtaccagcaaggcccagcgccgccgtctcacaggcaaagcacggcacagcggggagtgagaccgagaacgaagcggtgccccagtctaggctgcggggacctgtccttgctcagcttggctgtccctgtagcccagcctgcacctaggtaatgactgcacagctcaaggttgggaagccaggacctctctggcctggggccagctgcctttgcctggggtcagctgcctttgcctggggtttgaattcccgaaggagcaggcagctgagagcaggcctcccccaggaagagccttcagagccacgtgggggcatcttcccaaatgtgcaccccacctggcactcatcagatttgtgcgcttgtgatttgtttgtccttgataccacgcacaagggcaggtttttggggtggtggaaatggccagggcccatgggtctgtctccagcagttagccctgtggctgcaataaagtacagttctccctgtgttaagatcctaaccagggttaaggatcagtgtgtccgttgctagaatccagagcccacctgctgctctgaaaagcaggctcctgaggccagtgggggagcagtgccccccatgcccttcaccgaggagcctctgtgcctgtcccttgtcctcggccccaggagtctcctcaactgacactgaagtggtggaagcagttgagtgccaggtcatcccccatcaccacactggggcagcgtccccaggcttccagcagctcccaggtgggtcccaacgtggaaggattaattaattctttctaaagcagttgcagccgggcttggtggctcacgcctgtaatcccagcactttgggaggcccaggcgggcagatcacttaaggtcgggagctcgagaccagcctggccaacatggtgaaaccctgtctctactaaaaatgcaaaaattagccaggtgtggtggcacacgcgtgtaatcccagctacttgggaggctgaggtggaagaatcacttgaaccctggaggcggaggctgcagtgagccgagatcacgccattgcactccagcctgggcaacgttgtgaccttgtctcaaaaaaaaactaaaaaataaagcagttgcatcttgactcgtacaaaagtagcccccaccagagtagaccctgcgggtgccagctagaactccacaaggggccatgtcttcacactccttccagatggatgagttgatggaaaccctgtcccttccttgtcccagcttgtcagtcctgggcaggagagaatttcaggttgtgccttggttagaggagctgtgttgggtcctaaacactaggaccacaaaggggagtgaactgtgttcccagggcttgctgacgcccgtggactatggagtcaggatgacaggacagtgcggtgaggggcatctgcgacaggactgcgggctctacccgccctgatgtgggagctcctggagtgggggtgagcagtgagccagggtctgcagggctgtcctctctccacagccaacagccaggccttacagtggggcaggcttagtgactgtgcctcagttatgctgtacctgggagtgggcaggccctctcccatgtcaccatcaaaacccactgatgaaggctggtgggagtctgagggctgcacccgggtatggtgagttcccctcagggattgtgctgagcgccttggcctggcttcttggctccgcccacctgctctccctgccaccaagttgtcttccccgggtggcatgtgccacttgccgccgttcctaggaacggcggcaagaggtccaagtaaaccgctagcttgttggaccgtggaggccacaagagcagaaacatggaatgccagacgctgggggggatcctcta

SEQ ID NO: 309120 - DNA, 1139 bp, Homo sapiens
aggagtacgctacacccggaagtgtcttcagggagaggaagccggcggcctcactgctatgggccgcaacaagaagaagaagcgagatggtgacgaccggcggccgaggctcgttcttagcttcgacgaggagaagaggcgggagtacctgacaggcttccacaagcggaaggtcgagcgaaagaaggcagccattgaggagattaagcagcggctgaaagaggagcagaggaagcttcgggaggagcgccaccaggaatacttgaagatgctggcagagagagaagaggctctggaggaggcagatgagctggaccggttggtgacagcaaagacggagtcggtgcagtatgaccaccccaaccacacagtcaccgtgaccaccatcagtgacctggacctctcgggggcccggctgctcgggctgaccccacctgagggaggggctggagacaggtctgaggaggaggcgtcatccacggagaaaccaaccaaagccttgcccaggaagtccagagaccccctgctctctcagcggatctcctccctcacagcatcactacatgcacacagccgcaaaaaggtcaagaggaaacatccccgacgggcccaggactccaaaaagcccccaagggcccctcgtaccagcaaggcccagcgccgccgtctcacaggcaaagcacggcacagcggggagtgagaccgagaacgaagcggtgccccagtctaggctgcggggacctgtccttgctcagcttggctgtccctgtagcccagcctgcacctaggtgtgcctaccgcatgttgccgctgctgtttctgctgggacgtctgactccagttccttctcccctctccagtgacaaggtcatttacaacttacatttacaatttatagtgtttaccagtattaaattctcagccactcctaaaaaaaaaaaaaaatcggggttttaatcgggcggggcgaagggtcatgaatgcgctggtctacgtgttctggaccgatttgtccaggggcactgccggcccttagggcgtaatcgtaaggcgattttcgatggagggactctgtgttggaagaacagtgaaagaaacaagtgggaaaaagaagaaaattatgaaaaacatagaacatg

SEQ ID NO: 309121 - DNA, 2448 bp, Homo sapiens
gcattttagcagcggggtggcctggggagcagctgcatgggtggcacggtggggaggggctggagacaggtctgaggaggaggcgtcatccacggagaaaccaaccaaagccttgcccaggaagtccagagaccccctgctctctcagcggatctcctccctcacagcatcactacatgcacacagccgcaaaaaggtcaagaggaaacatccccgacgggcccaggactccaaaaagcccccaagggcccctcgtaccagcaaggcccagcgccgccgtctcacaggcaaagcacggcacagcggggagtgagaccgagaacgaagcggtgccccagtctaggctgcggggacctgtccttgctcagcttggctgtccctgtagcccagcctgcacctaggtaatgactgcacagctcaaggttgggaagccaggacctctctggcctggggccagctgcctttgcctggggtcagctgcctttgcctggggtttgaattcccgaaggagcaggcagctgagagcaggcctcccccaggaagagccttcagagccacgtgggggcatcttcccaaatgtgcaccccacctggcactcatcagatttgtgcgcttgtgatttgtttgtccttgataccacgcacaagggcaggtttttggggtggtggaaatggccagggcccatgggtctgtctccagcagttagccctgtggctgcaataaagtacagttctccctgtgttaagatcctaaccagggttaaggatcagtgtgtccgttgctagaatccagagcccacctgctgctctgaaaagcaggctcctgaggccagtgggggagcagtgccccccatgcccttcaccgaggagcctctgtgcctgtcccttgtcctcggccccaggagtctcctcaactgacactgaagtggtggaagcagttgagtgccaggtcatcccccatcaccacactggggcagcgtccccaggcttccagcagctcccaggtgggtcccaacgtggaaggattaattaattctttctaaagcagttgcagccgggcttggtggctcacgcctgtaatcccagcactttgggaggcccaggcgggcagatcacttaaggtcgggagctcgagaccagcctggccaacatggtgaaaccctgtctctactaaaaatgcaaaaattagccaggtgtggtggcacacgcgtgtaatcccagctacttgggaggctgaggtggaagaatcacttgaaccctggaggcggaggctgcagtgagccgagatcacgccattgcactccagcctgggcaacgttgtgaccttgtctcaaaaaaaaactaaaaaataaagcagttgcatcttgactcgtacaaaagtagcccccaccagagtagaccctgcgggtgccagctagaactccacaaggggccatgtcttcacactccttccagatggatgagttgatggaaaccctgtcccttccttgtcccagcttgtcagtcctgggcaggagagaatttcaggttgtgccttggttagaggagctgtgttgggtcctaaacactaggaccacaaaggggagtgaactgtgttcccagggcttgctgacgcccgtggactatggagtcaggatgacaggacagtgcggtgaggggcatctgcgacaggactgcgggctctacccgccctgatgtgggagctcctggagtgggggtgagcagtgagccagggtctgcagggctgtcctctctccacagccaacagccaggccttacagtggggcaggcttagtgactgtgcctcagttatgctgtacctgggagtgggcaggccctctcccatgtcaccatcaaaacccactgatgaaggctggtgggagtctgagggctgcacccgggtatggtgagttcccctcagggattgtgctgagcgccttggcctggcttcttggctccgcccacctgctctccctgccaccaagttgtcttccccgggtggcatgtgccacttggctgcctcgtgcctgggcacagtggtgcctattatgggccctccaggtggctctggtgctcagcctgctgtgagcaggaacagctgagtcccaggggttcttgcacacagcagggctcgggtttgaatccaggctctgctgcttggtcgctgcatgagcttctgctgtgctgacctctctggtttgtctcgtcatgtgtaaggtgacaccagatacctacctcttagggctgccccgagactaaaataagaccatgtgcatgaaccacttaccaaagtgcctgttgctctccaggtgtgcctaccgcatgttgccgctgctgtttctgctgggacgtctgactccagttccttctcccctctccagtgacaaggtcatttacaacttacatttacaatttatagtgtttaccagtattaaattctcagccactc

SEQ ID NO: 309122 - DNA, 1530 bp, Homo sapiens
aggagtacgctacacccggaagtgtcttcagggagaggaagccggcggcctcactgctatgggccgcaacaagaagaagaagcgagatggtgacgaccggcggccgaggctcgttcttagcttcgacgaggagaagaggcgggagtacctgacaggcttccacaagcggaaggtcgagcgaaagaaggcagccattgaggagattaagcagcggctgaaagaggagcagaggaagcttcgggaggagcgccaccaggaatacttgaagatgctggcagagagagaagaggctctggaggaggcagatgagctggaccggttggtgacagcaaagacggagtcggtgcagtatgaccaccccaaccacacagtcaccgtgaccaccatcagtgacctggacctctcgggggcccggctgctcgggctgaccccacctgagggaggggctggagacaggtctgaggaggaggcgtcatccacggagaaaccaaccaaagccttgcccaggaagtccagagaccccctgctctctcagcggatctcctccctcacagcatcactacatgcacacagccgcaaaaaggtcaagaggaaacatccccgacgggcccaggactccaaaaagcccccaagggcccctcgtaccagcaaggcccagcgccgccgtctcacaggcaaagcacggcacagcggggagtgagaccgagaacgaagcggtgccccagtctaggctgcggggacctgtccttgctcagcttggctgtccctgtagcccagcctgcacctaggtaatgactgcacagctcaaggttgggaagccaggacctctctggcctggggccagctgcctttgcctggggtcagctgcctttgcctggggtttgaattcccgaaggagcaggcagctgagagcaggcctcccccaggaagagccttcagagccacgtgggggcatcttcccaaatgtgcaccccacctggcactcatcagatttgtgcgcttgtgatttgtttgtccttgataccacgcacaagggcaggtttttggggtggtggaaatggccagggcccatgggtctgtctccagcagttagccctgtggctgcaataaagtacagttctccctgtgttaagatcctaaccagggttaaggatcagtgtgtccgttgctagaatccagagcccacctgctgctctgaaaagcaggctcctgaggccagtgggggagcagtgccccccatgcccttcaccgaggagcctctgtgcctgtcccttgtcctcggccccaggagtctcctcaactgacactgaagtggtggaagcagttgagtgccaggtcatcccccatcaccacactggggcagcgtccccaggcttccagcagctcccaggtgtgcctaccgcatgttgccgctgctgtttctgctgggacgtctgactccagttccttctcccctctccagtgacaaggtcatttacaacttacatttacaatttatagtgtttaccagtattaaattctcagccactc

SEQ ID NO: 309123 - DNA, 830 bp, Homo sapiens
  misc_feature (791)..(793): n is a, c, g, or t
aggagtacgctacacccggaagtgtcttcagggagaggaagccggcggcctcactgctatgggccgcaacaagaagaagaagcgagatggtgacgaccggcggccgaggctcgttcttagcttcgacgaggagaagaggcgggagtacctgacaggcttccacaagcggaaggtcgagcgaaagaaggcagccattgaggagattaagcagcggctgaaagaggagcagaggaagcttcgggaggagcgccaccaggaatacttgaagatgctggcagagagagaagaggctctggaggaggcagatgagctggaccggttggtgacagcaaagacggagtcggtgcagtatgaccaccccaaccacacagtcaccgtgaccaccatcagtgacctggacctctcgggggcccggctgctcgggctgaccccacctgagggaggggctggagacaggtctgaggaggaggcgtcatccacggagaaaccaaccaaagccttgcccaggaagtccagagaccccctgctctctcagcggatctcctccctcacagcatcactacatgcacacagccgcaaaaaggtcaagaggaaacatccccgacgggcccaggactccaaaaagcccccaagggcccctcgtaccagcaaggcccagcgccgccgtctcacaggcaaagcacggcacagcggggagtgagaccgagaacgaagcggtgccccagtctaggctgcggggacctgtccttgctcagcttggctgtccctgtagcccagcctgcacctagggnnnaccgcatgttaggctgcagaaagctgacgggtctcta

SEQ ID NO: 309124 - DNA, 937 bp, Homo sapiens
aggagtacgctacacccggaagtgtcttcagggagaggaagccggcggcctcactgctatgggccgcaacaagaagaagaagcgagatggtgacgaccggcggccgaggctcgttcttagcttcgacgaggagaagaggcgggagtacctgacaggcttccacaagcggaaggtcgagcgaaagaaggcagccattgaggagattaagcagcggctgaaagaggagcagaggaagcttcgggaggagcgccaccaggaatacttgaagatgctggcagagagagaagaggctctggaggaggcagatgagctggaccggttggtgacagcaaagacggagtcggtgcagtatgaccaccccaaccacacagtcaccgtgaccaccatcagtgacctggacctctcgggggcccggctgctcgggctgaccccacctgagggaggggctggagacaggtctgaggaggaggcgtcatccacggagaaaccaaccaaagccttgcccaggaagtccagagaccccctgctctctcagcggatctcctccctcacagcatcactacatgcacacagccgcaaaaaggtcaagaggaaacatccccgacgggcccaggactccaaaaagcccccaagggcccctcgtaccagcaaggcccagcgcctctgtttgtgtgtgggtggtggtgtgtggtgggtggtgtggtgtgttggtggttgtgtgtgtgtggtgtggtggtggggggggtgagtgttttctttcttagcttggctgtccctgtagcccagcctgcacctaggtgtgcctaccgcatgttgccgctgctgtttctgctgggacgtctgactccagttccttctcccctctccagtgacaaggtcatttacaacttacatttacaatttatagtgtttaccagtattaaattctcagccactc

SEQ ID NO: 309125 - DNA, 1454 bp, Homo sapiens
gtcggccgccccgggcccgcgcggccaatcggcgcattgagatgcaaataagcggctataaaaggggcgggaccgcggcgggccggaagccgcgaggagcgcggacggctgggctgctgctgggcggccgcggggcagcggagggcgccggcactccggtccccgccgctccccgtccccgctgctcctagcccctgccgcgtccccggcggagcgggcatggcgccacccgcggcgcctggccgggaccgtgtgggccgtgaggatgaggacggctgggagacgcgaggggaccgcaaggcccggaagcccctggtggagaagaagcggcgcgcgcggatcaacgagagcctgcaggagctgcggctgctgctggcgggcgccgaggtgcaggccaagctggagaacgccgaagtgctggagctgacggtgcggcgggtccagggtgtgctgcggggccgggcgcgcgagcgcgagcagctgcaggcggaagcgagcgagcgcttcgctgccggctacatccagtgcatgcacgaggtgcacacgttcgtgtccacgtgccaggccatcgacgctaccgtcgctgccgagctcctgaaccatctgctcgagtccatgccgctgcgtgagggcagcagcttccaggatctgctgggggacgccctggcggggccacctagagcccctggacggagtggctggcctgcggggggcgctccgggatccccaatacccagccccccgggtcctggggacgacctgtgctccgacctggaggaggcccctgaggctgaactgagtcaggctcctgctgaggggcccgacttggtgcccgcagccctgggcagcctgaccacagcccaaattgcccggagtgtctggaggccttggtgaccaatgccagccagagtcctgcgggggtgggcccggccctccctggatctcctccctcctcccaggggttcagatgtggtggggtagggccctggaagtctcccaggtcttccctccctcctctgatggatggcttgcagggcagcccctggtaaccagcccagtcaggccccagccccgtttcttaagaaacttttagggaccctgcagctctggagtgggtggagggagggagctacgggcaggaggaagaattttgtagagctgccagcgctctcccaggttcacccacccaggcttcaccagccctgtgcgggctctgggggcagaggtggcagaaatggtgctgggcactagtgttccaggcagccctgggctaaacaaaagcttgaacttgccacttcagcggggagatgagaggcaggtgcactgagctgcactgcccagagctgtgatgctctgtacatcttgtttgtagcacacttgagtttgtgtattccattgacatcaaatgtgacaattttactaaataaagaattttggagttagttacccttgaa

SEQ ID NO: 309126 - DNA, 770 bp, Homo sapiens
aacaaaggagtatgaaaaccatggactgaatggaccatgttatgtattcagagagagaagccactcatcaatgccagccagagtcctgcgggggtgggcccggccctccctggatctcctccctcctcccaggggttcagatgtggtggggtagggccctggaagtctcccaggtcttccctccctcctctgatggatggcttgcagggcagcccctggtaaccagcccagtcaggccccagccccgtttcttaagaaacttttagggaccctgcagctctggagtgggtggagggagggagctacgggcaggaggaagaattttgtagagctgccagcgctctcccaggttcacccacccaggcttcaccagccctgtgcgggctctgggggcagaggtggcagaaatggtgctgggcactagtgttccaggcagccctgggctaaacaaaagcttgaacttgccacttcagcggggagatgagaggcaggtgcactgagctgcactgcccagagctgtgatgctctgtacatcttgtttgtagcacacttgagtttgtgtattccattgacatcaaatgtgacaattttactaaataaagaattttggagttagttacccttgaaaaaaaaaaaaaaaactcgagactagttctctcttctacaagccacaaggacttgggaacactatacctattatcgggcgcatgagctggggtcctagggcgagtctaagcctccttattcgagccgagttgggcagcaggaat

SEQ ID NO: 309127 - DNA, 1597 bp, Homo sapiens
gtcggccgccccgggcccgcgcggccaatcggcgcattgagatgcaaataagcggctataaaaggggcgggaccgcggcgggccggaagccgcgaggagcgcggacggctgggctgctgctgggcggccgcggggcagcggagggcgccggcactccggtccccgccgctccccgtccccgctgctcctagcccctgccgcgtccccggcggagcgggcatggcgccacccgcggcgcctggccgggaccgtgtgggccgtgaggatgaggacggctgggagacgcgaggggaccgcaaggcccggaagcccctggtggagaagaagcggcgcgcgcggatcaacgagagcctgcaggagctgcggctgctgctggcgggcgccgaggtgcaggccaagctggagaacgccgaagtgctggagctgacggtgcggcgggtccagggtgtgctgcggggccgggcgcgcgagcgcgagcagctgcaggcggaagcgagcgagcgcttcgctgccggctacatccagtgcatgcacgaggtgcacacgttcgtgtccacgtgccaggccatcgacgctaccgtcgctgccgagctcctgaaccatctgctcgagtccatgccgctgcgtgagggcagcagcttccaggatctgctgggggacgccctggcggggccacctagagcccctggacggagtggctggcctgcggggggcgctccgggatccccaatacccagccccccgggtcctggggacgacctgtgctccgacctggaggaggcccctgaggctgaactgagtcaggctcctgctgaggggcccgacttggtgcccgcagccctgggcagcctgaccacagcccaaattgcccggagtgtctggaggccttggtgaccaatgccagccagagtcctgcgggggtgggcccggccctccctggatctcctccctcctcccaggggttcagatgtggtggggtagggccctggaagtctcccaggtcttccctccctcctctgatggatggcttgcagggcagcccctggtaaccagcccagtcaggccccagccccgtttcttaagaaacttttagggaccctgcagctctggagtgggtggagggagggagctacgggcaggaggaagaattttgtagagctgccagcgctctcccaggttcacccacccaggcttcaccagccctgtgcgggctctgggggcagaggtggcagaaatggtgctgggcactagtgttccaggcagccctgggctaaacaaaagcttgaacttgccacttcagcggggagatgagaggcaggtgcactgagctgcactgcccagagctgtgatgctctgtacatcttgtttgtagcacacttgagtttgtgtattccattgacatcaaatgtgacaattttactaaataaagaattttggagttagttacccttgaaaaaaaaaaaaaaaactcgagactagttctctcttctacaagccacaaggacttgggaacactatacctattatcgggcgcatgagctggggtcctagggcgagtctaagcctccttattcgagccgagttgggcagcaggaat

SEQ ID NO: 309128 - DNA, 1379 bp, Homo sapiens
gtcggccgccccgggcccgcgcggccaatcggcgcattgagatgcaaataagcggctataaaaggggcgggaccgcggcgggccggaagccgcgaggagcgcggacggctgggctgctgctgggcggccgcggggcagcggagggcgccggcactccggtccccgccgctccccgtccccgctgctcctagcccctgccgcgtccccggcggagcgggcatggcgccacccgcggcgcctggccgggaccgtgtgggccgtgaggatgaggacggctgggagacgcgaggggaccgcaaggcccggaagcccctggtggagaagaagcggcgcgcgcggatcaacgagagcctgcaggagctgcggctgctgctggcgggcgccgaggtgcaggccaagctggagaacgccgaagtgctggagctgacggtgcggcgggtccagggtgtgctgcggggccgggcgcgcgagcgcgagcagctgcaggcggaagcgagcgagcgcttcgctgccggctacatccagtgcatgcacgaggtgcacacgttcgtgtccacgtgccaggccatcgacgctaccgtcgctgccgagctcctgaaccatctgctcgagtccatgccgctgcgtgagggcagcagcttccaggatctgctgggggacgccctggcggggccacctagagcccctggacggagtggctggcctgcggggggcgctccgggatccccaatacccagccccccgggtcctggggacgacctgtgctccgacctggaggaggcccctgaggctgaactgagtcaggctcctgctgaggggcccgacttggtgcccgcagccctgggcagcctgaccacagcccaaattgcccggagtgtctggaggccttggtgaccaatgccagccagagtcctgcgggggtgggcccggccctccctggatctcctccctcctcccaggggttcagatgtggtggggtagggccctggaagtctcccaggtcttccctccctcctctgatggatggcttgcagggcagcccctggtaaccagcccagtcagaggaggaagaattttgtagagctgccagcgctctcccaggttcacccacccaggcttcaccagccctgtgcgggctctgggggcagaggtggcagaaatggtgctgggcactagtgttccaggcagccctgggctaaacaaaagcttgaacttgccacttcagcggggagatgagaggcaggtgcactgagctgcactgcccagagctgtgatgctctgtacatcttgtttgtagcacacttgagtttgtgtattccattgacatcaaatgtgacaattttactaaataaagaattttggagttagttacccttgaa

SEQ ID NO: 309129 - DNA, 1689 bp, Homo sapiens
gtcggccgccccgggcccgcgcggccaatcggcgcattgagatgcaaataagcggctataaaaggggcgggaccgcggcgggccggaagccgcgaggagcgcggacggctgggctgctgctgggcggccgcggggcagcggagggcgccggcactccggtccccgccgctccccgtccccgctgctcctagcccctgccgcgtccccggcggagcgggcatggcgccacccgcggcgcctggccgggaccgtgtgggccgtgaggatgaggacggctgggagacgcgaggggaccgcaaggcccggaagcccctggtggagaagaagcggcgcgcgcggatcaacgagagcctgcaggagctgcggctgctgctggcgggcgccgaggtgcaggccaagctggagaacgccgaagtgctggagctgacggtgcggcgggtccagggtgtgctgcggggccgggcgcgcggtgagtggcggcggggcgggcgggggcgccggccgcgggcgcctgtaacccctgccagacggaggacttccctcccggcgcccctgtcctgtcggcggcgagggctcccaccggagcagggtgcgcccccgcgtctcctgggtgagccgcgtccccgcgggccgggtgggctgggccacgcagtcgccgctcaccgcgcgggacgcggctctctccctcccaccctcgggcccagagcgcgagcagctgcaggcggaagcgagcgagcgcttcgctgccggctacatccagtgcatgcacgaggtgcacacgttcgtgtccacgtgccaggccatcgacgctaccgtcgctgccgagctcctgaaccatctgctcgagtccatgccgctgcgtgagggcagcagcttccaggatctgctgggggacgccctggcggggccacctagagcccctggacggagtggctggcctgcggggggcgctccgggatccccaatacccagccccccgggtcctggggacgacctgtgctccgacctggaggaggcccctgaggctgaactgagtcaggctcctgctgaggggcccgacttggtgcccgcagccctgggcagcctgaccacagcccaaattgcccggagtgtctggaggccttggtgaccaatgccagccagagtcctgcgggggtgggcccggccctccctggatctcctccctcctcccaggggttcagatgtggtggggtagggccctggaagtctcccaggtcttccctccctcctctgatggatggcttgcagggcagcccctggtaaccagcccagtcaggccccagccccgtttcttaagaaacttttagggaccctgcagctctggagtgggtggagggagggagctacgggcaggaggaagaattttgtagagctgccagcgctctcccaggttcacccacccaggcttcaccagccctgtgcgggctctgggggcagaggtggcagaaatggtgctgggcactagtgttccaggcagccctgggctaaacaaaagcttgaacttgccacttcagcggggagatgagaggcaggtgcactgagctgcactgcccagagctgtgatgctctgtacatcttgtttgtagcacacttgagtttgtgtattccattgacatcaaatgtgacaattttactaaataaagaattttggagttagttacccttgaa

SEQ ID NO: 309130 - DNA, 1367 bp, Homo sapiens
gtcggccgccccgggcccgcgcggccaatcggcgcattgagatgcaaataagcggctataaaaggggcgggaccgcggcgggccggaagccgcgaggagcgcggacggctgggctgctgctgggcggccgcggggcagcggagggcgccggcactccggtccccgccgctccccgtccccgctgctcctagcccctgccgcgtccccggcggagcgggcatggcgccacccgcggcgcctggccgggaccgtgtgggccgtgaggatgaggacggctgggagacgcgaggggaccgcaaggtgcaggccaagctggagaacgccgaagtgctggagctgacggtgcggcgggtccagggtgtgctgcggggccgggcgcgcgagcgcgagcagctgcaggcggaagcgagcgagcgcttcgctgccggctacatccagtgcatgcacgaggtgcacacgttcgtgtccacgtgccaggccatcgacgctaccgtcgctgccgagctcctgaaccatctgctcgagtccatgccgctgcgtgagggcagcagcttccaggatctgctgggggacgccctggcggggccacctagagcccctggacggagtggctggcctgcggggggcgctccgggatccccaatacccagccccccgggtcctggggacgacctgtgctccgacctggaggaggcccctgaggctgaactgagtcaggctcctgctgaggggcccgacttggtgcccgcagccctgggcagcctgaccacagcccaaattgcccggagtgtctggaggccttggtgaccaatgccagccagagtcctgcgggggtgggcccggccctccctggatctcctccctcctcccaggggttcagatgtggtggggtagggccctggaagtctcccaggtcttccctccctcctctgatggatggcttgcagggcagcccctggtaaccagcccagtcaggccccagccccgtttcttaagaaacttttagggaccctgcagctctggagtgggtggagggagggagctacgggcaggaggaagaattttgtagagctgccagcgctctcccaggttcacccacccaggcttcaccagccctgtgcgggctctgggggcagaggtggcagaaatggtgctgggcactagtgttccaggcagccctgggctaaacaaaagcttgaacttgccacttcagcggggagatgagaggcaggtgcactgagctgcactgcccagagctgtgatgctctgtacatcttgtttgtagcacacttgagtttgtgtattccattgacatcaaatgtgacaattttactaaataaagaattttggagttagttacccttgaa

SEQ ID NO: 309131 - DNA, 1252 bp, Homo sapiens
ctccgagggatagtgtcaaaccagcggctgtaaacgacggcagtactataacgctccccgtccccgctgctcctagcccctgccgcgtccccggcggagcgggcatggcgccacccgcggcgcctggccgggaccgtgtgggccgtgaggatgaggacggctgggagacgcgaggggaccgcaaggtgcaggccaagctggagaacgccgaagtgctggagctgacggtgcggcgggtccagggtgtgctgcggggccgggcgcgcgagcgcgagcagctgcaggcggaagcgagcgagcgcttcgctgccggctacatccagtgcatgcacgaggtgcacacgttcgtgtccacgtgccaggccatcgacgctaccgtcgctgccgagctcctgaaccatctgctcgagtccatgccgctgcgtgagggcagcagcttccaggatctgctgggggacgccctggcggggccacctagagcccctggacggagtggctggcctgcggggggcgctccgggatccccaatacccagccccccgggtcctggggacgacctgtgctccgacctggaggaggcccctgaggctgaactgagtcaggctcctgctgaggggcccgacttggtgcccgcagccctgggcagcctgaccacagcccaaattgcccggagtgtctggaggccttggtgaccaatgccagccagagtcctgcgggggtgggcccggccctccctggatctcctccctcctcccaggggttcagatgtggtggggtagggccctggaagtctcccaggtcttccctccctcctctgatggatggcttgcagggcagcccctggtaaccagcccagtcaggccccagccccgtttcttaagaaacttttagggaccctgcagctctggagtgggtggagggagggagctacgggcaggaggaagaattttgtagagctgccagcgctctcccaggttcacccacccaggcttcaccagccctgtgcgggctctgggggcagaggtggcagaaatggtgctgggcactagtgttccaggcagccctgggctaaacaaaagcttgaacttgccacttcagcggggagatgagaggcaggtgcactgagctgcactgcccagagctgtgatgctctgtacatcttgtttgtagcacacttgagtttgtgtattccattgacatcaaatgtgacaattttactaaataaagaattttggagttagttacccttgaa

SEQ ID NO: 309132 - DNA, 1531 bp, Homo sapiens
gtcggccgccccgggcccgcgcggccaatcggcgcattgagatgcaaataagcggctataaaaggggcgggaccgcggcgggccggaagccgcgaggagcgcggacggctgggctgctgctgggcggccgcggggcagcggagggcgccggcactccggtccccgccgctccccgtccccgctgctcctagcccctgccgcgtccccggcggagcgggcatggcgccacccgcggcgcctggccgggaccgtgtgggccgtgaggatgaggacggctgggagacgcgaggggaccgcaaggtgcgggccggggccatgggcgagcaagcgggcgggaggccgtgcggggctgggattcagtgccccgctccccgcaggcccggaagcccctggtggagaagaagcggcgcgcgcggatcaacgagagcctgcaggagctgcggctgctgctggcgggcgccgaggtgcaggccaagctggagaacgccgaagtgctggagctgacggtgcggcgggtccagggtgtgctgcggggccgggcgcgcgagcgcgagcagctgcaggcggaagcgagcgagcgcttcgctgccggctacatccagtgcatgcacgaggtgcacacgttcgtgtccacgtgccaggccatcgacgctaccgtcgctgccgagctcctgaaccatctgctcgagtccatgccgctgcgtgagggcagcagcttccaggatctgctgggggacgccctggcggggccacctagagcccctggacggagtggctggcctgcggggggcgctccgggatccccaatacccagccccccgggtcctggggacgacctgtgctccgacctggaggaggcccctgaggctgaactgagtcaggctcctgctgaggggcccgacttggtgcccgcagccctgggcagcctgaccacagcccaaattgcccggagtgtctggaggccttggtgaccaatgccagccagagtcctgcgggggtgggcccggccctccctggatctcctccctcctcccaggggttcagatgtggtggggtagggccctggaagtctcccaggtcttccctccctcctctgatggatggcttgcagggcagcccctggtaaccagcccagtcaggccccagccccgtttcttaagaaacttttagggaccctgcagctctggagtgggtggagggagggagctacgggcaggaggaagaattttgtagagctgccagcgctctcccaggttcacccacccaggcttcaccagccctgtgcgggctctgggggcagaggtggcagaaatggtgctgggcactagtgttccaggcagccctgggctaaacaaaagcttgaacttgccacttcagcggggagatgagaggcaggtgcactgagctgcactgcccagagctgtgatgctctgtacatcttgtttgtagcacacttgagtttgtgtattccattgacatcaaatgtgacaattttactaaataaagaattttggagttagttacccttgaa

SEQ ID NO: 309133 - DNA, 1602 bp, Homo sapiens
gtcggccgccccgggcccgcgcggccaatcggcgcattgagatgcaaataagcggctataaaaggggcgggaccgcggcgggccggaagccgcgaggagcgcggacggctgggctgctgctgggcggccgcggggcagcggagggcgccggcactccggtccccgccgctccccgtccccgctgctcctagcccctgccgcgtccccggcggagcgggcatggcgccacccgcggcgcctggccgggaccgtgtgggccgtgaggatgaggacggctgggagacgcgaggggaccgcaaggtgcaggccaagctggagaacgccgaagtgctggagctgacggtgcggcgggtccagggtgtgctgcggggccgggcgcgcggtgagtggcggcggggcgggcgggggcgccggccgcgggcgcctgtaacccctgccagacggaggacttccctcccggcgcccctgtcctgtcggcggcgagggctcccaccggagcagggtgcgcccccgcgtctcctgggtgagccgcgtccccgcgggccgggtgggctgggccacgcagtcgccgctcaccgcgcgggacgcggctctctccctcccaccctcgggcccagagcgcgagcagctgcaggcggaagcgagcgagcgcttcgctgccggctacatccagtgcatgcacgaggtgcacacgttcgtgtccacgtgccaggccatcgacgctaccgtcgctgccgagctcctgaaccatctgctcgagtccatgccgctgcgtgagggcagcagcttccaggatctgctgggggacgccctggcggggccacctagagcccctggacggagtggctggcctgcggggggcgctccgggatccccaatacccagccccccgggtcctggggacgacctgtgctccgacctggaggaggcccctgaggctgaactgagtcaggctcctgctgaggggcccgacttggtgcccgcagccctgggcagcctgaccacagcccaaattgcccggagtgtctggaggccttggtgaccaatgccagccagagtcctgcgggggtgggcccggccctccctggatctcctccctcctcccaggggttcagatgtggtggggtagggccctggaagtctcccaggtcttccctccctcctctgatggatggcttgcagggcagcccctggtaaccagcccagtcaggccccagccccgtttcttaagaaacttttagggaccctgcagctctggagtgggtggagggagggagctacgggcaggaggaagaattttgtagagctgccagcgctctcccaggttcacccacccaggcttcaccagccctgtgcgggctctgggggcagaggtggcagaaatggtgctgggcactagtgttccaggcagccctgggctaaacaaaagcttgaacttgccacttcagcggggagatgagaggcaggtgcactgagctgcactgcccagagctgtgatgctctgtacatcttgtttgtagcacacttgagtttgtgtattccattgacatcaaatgtgacaattttactaaataaagaattttggagttagttacccttgaa

SEQ ID NO: 309134 - DNA, 1358 bp, Homo sapiens
aatcgaggctgtactggtcccgaagttccttatgattgctgctggcgggcgccgaggtgcaggccaagctggagaacgccgaagtgctggagctgacggtgcggcgggtccagggtgtgctgcggggccgggcgcgcggtgagtggcggcggggcgggcgggggcgccggccgcgggcgcctgtaacccctgccagacggaggacttccctcccggcgcccctgtcctgtcggcggcgagggctcccaccggagcagggtgcgcccccgcgtctcctgggtgagccgcgtccccgcgggccgggtgggctgggccacgcagtcgccgctcaccgcgcgggacgcggctctctccctcccaccctcgggcccagagcgcgagcagctgcaggcggaagcgagcgagcgcttcgctgccggctacatccagtgcatgcacgaggtgcacacgttcgtgtccacgtgccaggccatcgacgctaccgtcgctgccgagctcctgaaccatctgctcgagtccatgccgctgcgtgagggcagcagcttccaggatctgctgggggacgccctggcggggccacctagagcccctggacggagtggctggcctgcggggggcgctccgggatccccaatacccagccccccgggtcctggggacgacctgtgctccgacctggaggaggcccctgaggctgaactgagtcaggctcctgctgaggggcccgacttggtgcccgcagccctgggcagcctgaccacagcccaaattgcccggagtgtctggaggccttggtgaccaatgccagccagagtcctgcgggggtgggcccggccctccctggatctcctccctcctcccaggggttcagatgtggtggggtagggccctggaagtctcccaggtcttccctccctcctctgatggatggcttgcagggcagcccctggtaaccagcccagtcaggccccagccccgtttcttaagaaacttttagggaccctgcagctctggagtgggtggagggagggagctacgggcaggaggaagaattttgtagagctgccagcgctctcccaggttcacccacccaggcttcaccagccctgtgcgggctctgggggcagaggtggcagaaatggtgctgggcactagtgttccaggcagccctgggctaaacaaaagcttgaacttgccacttcagcggggagatgagaggcaggtgcactgagctgcactgcccagagctgtgatgctctgtacatcttgtttgtagcacacttgagtttgtgtattccattgacatcaaatgtgacaattttactaaataaagaattttggagttagttacccttgaa

SEQ ID NO: 309135 - DNA, 1411 bp, Homo sapiens
gtcggccgccccgggcccgcgcggccaatcggcgcattgagatgcaaataagcggctataaaaggggcgggaccgcggcgggccggaagccgcgaggagcgcggacggctgggctgctgctgggcggccgcggggcagcggagggcgccggcactccggtccccgccgctccccgtccccgctgctcctagcccctgccgcgtccccggcggagcgggcatggcgccacccgcggcgcctggccgggaccgtgtgggccgtgaggatgaggacggctgggagacgcgaggggaccgcaaggcccggaagcccctggtggagaagaagcggcgcgcgcggatcaacgagagcctgcaggagctgcggctgctgctggcgggcgccgaggtgcaggccaagctggagaacgccgaagtgctggagctgagcgcgagcagctgcaggcggaagcgagcgagcgcttcgctgccggctacatccagtgcatgcacgaggtgcacacgttcgtgtccacgtgccaggccatcgacgctaccgtcgctgccgagctcctgaaccatctgctcgagtccatgccgctgcgtgagggcagcagcttccaggatctgctgggggacgccctggcggggccacctagagcccctggacggagtggctggcctgcggggggcgctccgggatccccaatacccagccccccgggtcctggggacgacctgtgctccgacctggaggaggcccctgaggctgaactgagtcaggctcctgctgaggggcccgacttggtgcccgcagccctgggcagcctgaccacagcccaaattgcccggagtgtctggaggccttggtgaccaatgccagccagagtcctgcgggggtgggcccggccctccctggatctcctccctcctcccaggggttcagatgtggtggggtagggccctggaagtctcccaggtcttccctccctcctctgatggatggcttgcagggcagcccctggtaaccagcccagtcaggccccagccccgtttcttaagaaacttttagggaccctgcagctctggagtgggtggagggagggagctacgggcaggaggaagaattttgtagagctgccagcgctctcccaggttcacccacccaggcttcaccagccctgtgcgggctctgggggcagaggtggcagaaatggtgctgggcactagtgttccaggcagccctgggctaaacaaaagcttgaacttgccacttcagcggggagatgagaggcaggtgcactgagctgcactgcccagagctgtgatgctctgtacatcttgtttgtagcacacttgagtttgtgtattccattgacatcaaatgtgacaattttactaaataaagaattttggagttagttacccttgaa

SEQ ID NO: 309136 - DNA, 1340 bp, Homo sapiens
gtcggccgccccgggcccgcgcggccaatcggcgcattgagatgcaaataagcggctataaaaggggcgggaccgcggcgggccggaagccgcgaggagcgcggacggctgggctgctgctgggcggccgcggggcagcggagggcgccggcactccggtccccgccgctccccgtccccgctgctcctagcccctgccgcgtccccggcggagcgggcatggcgccacccgcggcgcctggccgggaccgcgtctcctgggtgagccgcgtccccgcgggccgggtgggctgggccacgcagtcgccgctcaccgcgcgggacgcggctctctccctcccaccctcgggcccagagcgcgagcagctgcaggcggaagcgagcgagcgcttcgctgccggctacatccagtgcatgcacgaggtgcacacgttcgtgtccacgtgccaggccatcgacgctaccgtcgctgccgagctcctgaaccatctgctcgagtccatgccgctgcgtgagggcagcagcttccaggatctgctgggggacgccctggcggggccacctagagcccctggacggagtggctggcctgcggggggcgctccgggatccccaatacccagccccccgggtcctggggacgacctgtgctccgacctggaggaggcccctgaggctgaactgagtcaggctcctgctgaggggcccgacttggtgcccgcagccctgggcagcctgaccacagcccaaattgcccggagtgtctggaggccttggtgaccaatgccagccagagtcctgcgggggtgggcccggccctccctggatctcctccctcctcccaggggttcagatgtggtggggtagggccctggaagtctcccaggtcttccctccctcctctgatggatggcttgcagggcagcccctggtaaccagcccagtcaggccccagccccgtttcttaagaaacttttagggaccctgcagctctggagtgggtggagggagggagctacgggcaggaggaagaattttgtagagctgccagcgctctcccaggttcacccacccaggcttcaccagccctgtgcgggctctgggggcagaggtggcagaaatggtgctgggcactagtgttccaggcagccctgggctaaacaaaagcttgaacttgccacttcagcggggagatgagaggcaggtgcactgagctgcactgcccagagctgtgatgctctgtacatcttgtttgtagcacacttgagtttgtgtattccattgacatcaaatgtgacaattttactaaataaagaattttggagttagttacccttgaa

SEQ ID NO: 309137 - DNA, 1614 bp, Homo sapiens
gtcggccgccccgggcccgcgcggccaatcggcgcattgagatgcaaataagcggctataaaaggggcgggaccgcggcgggccggaagccgcgaggagcgcggacggctgggctgctgctgggcggccgcggggcagcggagggcgccggcactccggtccccgccgctccccgtccccgctgctcctagcccctgccgcgtccccggcggagcgggcatggcgccacccgcggcgcctggccgggaccgtgtgggccgtgaggatgaggacggctgggagacgcgaggggaccgcaaggcccggaagcccctggtggagaagaagcggcgcgcgcggatcaacgagagcctgcaggagctgcggctgctgctggcgggcgccgaggtgcaggccaagctggagaacgccgaagtgctggagctgacggtgcggcgggtccagggtgtgctgcggggccgggcgcgcggtgagtggcggcggggcgggcgggggcgccggccgcgggcgcctgtaacccctgccagacggaggacttccctcccggcgcccctgtcctgtcggcggcgagggctcccaccggagcagggtgcgcccccgcgtctcctgggtgagccgcgtccccgcgggccgggtgggctgggccacgcagtcgccgctcaccgcgcgggacgcggctctctccctcccaccctcgggcccagagcgcgagcagctgcaggcggaagcgagcgagcgcttcgctgccggctacatccagtgcatgcacgaggtgcacacgttcgtgtccacgtgccaggccatcgacgctaccgtcgctgccgagctcctgaaccatctgctcgagtccatgccgctgcgtgagggcagcagcttccaggatctgctgggggacgccctggcggggccacctagagcccctggacggagtggctggcctgcggggggcgctccgggatccccaatacccagccccccgggtcctggggacgacctgtgctccgacctggaggaggcccctgaggctgaactgagtcaggctcctgctgaggggcccgacttggtgcccgcagccctgggcagcctgaccacagcccaaattgcccggagtgtctggaggccttggtgaccaatgccagccagagtcctgcgggggtgggcccggccctccctggatctcctccctcctcccaggggttcagatgtggtggggtagggccctggaagtctcccaggtcttccctccctcctctgatggatggcttgcagggcagcccctggtaaccagcccagtcagaggaggaagaattttgtagagctgccagcgctctcccaggttcacccacccaggcttcaccagccctgtgcgggctctgggggcagaggtggcagaaatggtgctgggcactagtgttccaggcagccctgggctaaacaaaagcttgaacttgccacttcagcggggagatgagaggcaggtgcactgagctgcactgcccagagctgtgatgctctgtacatcttgtttgtagcacacttgagtttgtgtattccattgacatcaaatgtgacaattttactaaataaagaattttggagttagttacccttgaa

SEQ ID NO: 309138 - DNA, 1160 bp, Homo sapiens
gtcggccgccccgggcccgcgcggccaatcggcgcattgagatgcaaataagcggctataaaaggggcgggaccgcggcgggccggaagccgcgaggagcgcggacggctgggctgctgctgggcggccgcggggcagcggagggcgccggcactccggtccccgccgctccccgtccccgctgctcctagcccctgccgcgtccccggcggagcgggcatggcgccacccgcggcgcctggccgggaccgtgtgggccgtgaggatgaggacggctgggagacgcgaggggaccgcaaggcccggaagcccctggtggagaagaagcggcgcgcgcggatcaacgagagcctgcaggagctgcggctgctgctggcgggcgccgaggtgcaggccaagctggagaacgccgaagtgctggagctgacggtgcggcgggtccagggtgtgctgcggggccgggcgcgcggtgagtggcggcggggcgggcgggggcgccggccgcgggcgcctgtaacccctgccagacggaggacttccctcccggcgcccctgtcctgtcggcggcgagggctcccaccggagcagggtgcgcccccgcgtctcctgggtgagccgcgtccccgcgggccgggtgggctgggccacgcagtcgccgctcaccgcgcgggacgcggctctctccctcccaccctcgggcccagagcgcgagcagctgcaggcggaagcgagcgagcgcttcgctgccggctacatccagtgcatgcacgaggtgcacacgttcgtgtccacgtgccaggccatcgacgctaccgtcgctgccgagctcctgaaccatctgctcgagtccatgccgctgcgtgagggcagcagcttccaggatctgctgggggacgccctggcggggccacctagagcccctggacggaaggtggcagaaatggtgctgggcactagtgttccaggcagccctgggctaaacaaaagcttgaacttgccacttcagcggggagatgagaggcaggtgcactgagctgcactgcccagagctgtgatgctctgtacatcttgtttgtagcacacttgagtttgtgtattccattgacatcaaatgtgacaattttactaaataaagaattttggagttagttacccttgaa

SEQ ID NO: 309139 - DNA, 963 bp, Homo sapiens
gtcggccgccccgggcccgcgcggccaatcggcgcattgagatgcaaataagcggctataaaaggggcgggaccgcggcgggccggaagccgcgaggagcgcggacggctgggctgctgctgggcggccgcggggcagcggagggcgccggcactccggtccccgccgctccccgtccccgctgctcctagcccctgccgcgtccccggcggagcgggcatggcgccacccgcggcgcctggccgggaccgtgtgggccgtgaggatgaggacggctgggagacgcgaggggaccgcaaggtgcaggccaagctggagaacgccgaagtgctggagctgacggtgcggcgggtccagggtgtgctgcggggccgggcgcgcgagcgcgagcagctgcaggcggaagcgagcgagcgcttcgctgccggctacatccagtgcatgcacgaggtgcacacgttcgtgtccacgtgccaggccatcgacgctaccgtcgctgccgagctcctgaaccatctgctcgagtccatgccgctgcgtgagggcagcccctggtaaccagcccagtcaggccccagccccgtttcttaagaaacttttagggaccctgcagctctggagtgggtggagggagggagctacgggcaggaggaagaattttgtagagctgccagcgctctcccaggttcacccacccaggcttcaccagccctgtgcgggctctgggggcagaggtggcagaaatggtgctgggcactagtgttccaggcagccctgggctaaacaaaagcttgaacttgccacttcagcggggagatgagaggcaggtgcactgagctgcactgcccagagctgtgatgctctgtacatcttgtttgtagcacacttgagtttgtgtattccattgacatcaaatgtgacaattttactaaataaagaattttggagttagttacccttgaa

SEQ ID NO: 309140 - DNA, 743 bp, Homo sapiens
gtcggccgccccgggcccgcgcggccaatcggcgcattgagatgcaaataagcggctataaaaggggcgggaccgcggcgggccggaagccgcgaggagcgcggacggctgggctgctgctgggcggccgcggggcagcggagggcgccggcactccggtccccgccgctccccgtccccgctgctcctagcccctgccgcgtccccggcggagcgggcatggcgccacccgcggcgcctggccgggaccgtgtgggccgtgaggatgaggacggctgggagacgcgaggggaccgcaaggcccggaagcccctggtggagaagaagcggcgcgcgcggatcaacgagagcctgcaggagctgcggctgctgctggcgggcgccgaggtgcaggccaagctggagaacgccgaagtgctggagctgaggaggaagaattttgtagagctgccagcgctctcccaggttcacccacccaggcttcaccagccctgtgcgggctctgggggcagaggtggcagaaatggtgctgggcactagtgttccaggcagccctgggctaaacaaaagcttgaacttgccacttcagcggggagatgagaggcaggtgcactgagctgcactgcccagagctgtgatgctctgtacatcttgtttgtagcacacttgagtttgtgtattccattgacatcaaatgtgacaattttactaaataaagaattttggagttagttacccttgaa

SEQ ID NO: 309141 - DNA, 1299 bp, Homo sapiens
ctgcatcagacgagaggcccattttccaacacgcccaagaaaaaatatacataaaggttgatgtgttttcaaatgggtttttgctttgctcttctcttttctccctaaccaagcgcctccaggtctctacacgaagacccaggacccagccaaagcccccaacacccctgacattctcgagatcgagttcaaaaaaggggtccctgtgaaggtgaccaacgtcaaggatggcaccacccaccagacctccttggagctcttcatgtacctgaacgaagtcgcgggcaagcatggcgtgggccgtattgacatcgtggagaaccgcttcattggaatgaagtcccgaggtatctacgagaccccagcaggcaccatcctttaccatgctcatttagacatcgaggccttcaccatggaccgggaagtgcgcaaaatcaaacaaggcctgggcttgaaatttgctgagctggtgtataccggtttctggcacagccctgagtgtgaatttgtccgccactgcatcgccaagtcccaggagcgagtggaagggaaagtgcaggtgtccgtcctcaagggccaggtgtacatcctcggccgggagtccccactgtctctctacaatgaggagctggtgagcatgaacgtgcagggtgattatgagccaactgatgccaccgggttcatcaacatcaattccctcaggctgaaggaatatcatcgtctccagagcaaggtcactgccaaatagacccgtgtacaatgaggagctggggcctcctcaatttgcagatcccccaagtacaggcgctaattgttgtgataatttgtaattgtgacttgttctccccggctggcagcgtagtggggctgccaggccccagctttgttccctggtccccctgaagcctgcaaacgttgtcatcgaagggaagggtggggggcagctgcggtggggagctataaaaatgacaattaaaagagacactagtcttttatttctagtgagtgtgtgtgtgtgtgtgtgtgtgtgtgtgtgtgtgtgtgtgtgtgtagttaattatggttttcttaggccaacctttgtgttttcggacctaagtgctgccgaaggccgccatttgccagacagcctgttaatctggcagtcgacccctctccagcaaaaactaggaatccagaagtgccgcctgggtccgatcctagccagcatcctgggaatctgtcaccaactgtggtcctgtggcaaatgtcaggaaaccaaataaaattcagggaatgccctttgggggcatcaacgca

SEQ ID NO: 309142 - DNA, 1541 bp, Homo sapiens
  misc_feature (16)..(16): n is a, c, g, or t
  misc_feature (23)..(23): n is a, c, g, or t
cacttagtgcatagtncgaggcnggtgtgaatcggccgaggcgctgcccaccgctgccgagcccgacgctatgtccagcaaaggctccgtggttctggcctacagtggcggcctggacacctcgtgcatcctcgtgtggctgaaggaacaaggctatgacgtcattgcctatctggccaacattggccagaaggaagacttcgaggaagccaggaagaaggcactgaagcttggggccaaaaaggtgttcattgaggatgtcagcagggagtttgtggaggagttcatctggccggccatccagtccagcgcactgtatgaggaccgctacctcctgggcacctctcttgccaggccctgcatcgcccgcaaacaagtggaaatcgcccagcgggagggggccaagtatgtgtcccacggcgccacaggaaaggggaacgatcaggtccggtttgagctcagctgctactcactggccccccagataaaggtcattgctccctggaggatgcctgaattctacaaccggttcaagggccgcaatgacctgatggagtacgcaaagcaacacgggattcccatcccggtcactcccaagaacccgtggagcatggatgagaacctcatgcacatcagctacgaggctggaatcctggagaaccccaagaaccaagcgcctccaggtctctacacgaagacccaggacccagccaaagcccccaacacccctgacattctcgagatcgagttcaaaaaaggggtccctgtgaaggtgaccaacgtcaaggatggcaccacccaccagacctccttggagctcttcatgtacctgaacgaagtcgcgggcaagcatggcgtgggccgtattgacatcgtggagaaccgcttcattggaatgaagtcccgaggtatctacgagaccccagcaggcaccatcctttaccatgctcatttagacatcgaggccttcaccatggaccgggaagtgcgcaaaatcaaacaaggcctgggcttgaaatttgctgagctggtgtataccggtttctggcacagccctgagtgtgaatttgtccgccactgcatcgccaagtcccaggagcgagtggaagggaaagtgcaggtgtccgtcctcaagggccaggtgtacatcctcggccgggagtccccactgtctctctacaatgaggagctggtgagcatgaacgtgcagggtgattatgagccaactgatgccaccgggttcatcaacatcaattccctcaggctgaaggaatatcatcgtctccagagcaaggtcactgccaaatagacccgtgtacaatgaggagctggggcctcctcaatttgcagatcccccaagtacaggcgctaattgttgtgataatttgtaattgtgacttgttctccccggctggcagcgtagtggggctgccaggccccagctttgttccctggtccccctgaagcctgcaaacgttgtcatcgaagggaagggtggggggcagctgcggtggggagctataaaaatgacaattaaaaga

SEQ ID NO: 309143 - DNA, 820 bp, Homo sapiens
gggcccagaggcccactgccctctcttcccaccctaggggtccctgtgaaggtgaccaacgtcaaggatggcaccacccaccagacctccttggagctcttcatgtacctgaacgaagtcgcgggcaagcatggcgtgggccgtattgacatcgtggagaaccgcttcattggaatgaagtcccgaggtatctacgagaccccagcaggcaccatcctttaccatgctcatttagacatcgaggccttcaccatggaccgggaagtgcgcaaaatcaaacaaggcctgggcttgaaatttgctgagctggtgtataccggtttctggcacagccctgagtgtgaatttgtccgccactgcatcgccaagtcccaggagcgagtggaagggaaagtgcaggtgtccgtcctcaagggccaggtgtacatcctcggccgggagtccccactgtctctctacaatgaggagctggtgagcatgaacgtgcagggtgattatgagccaactgatgccaccgggttcatcaacatcaattccctcaggctgaaggaatatcatcgtctccagagcaaggtcactgccaaatagacccgtgtacaatgaggagctggggcctcctcaatttgcagatcccccaagtacaggcgctaattgttgtgataatttgtaattgtgacttgttctccccggctggcagcgtagtggggctgccaggccccagctttgttccctggtccccctgaagcctgcaaacgttgtcatcgaagggaagggtggggggcagctgcggtggggagctataaaaatgacaattaaaaga

SEQ ID NO: 309144 - DNA, 1040 bp, Homo sapiens
  misc_feature (16)..(16): n is a, c, g, or t
  misc_feature (23)..(23): n is a, c, g, or t
  misc_feature (904)..(904): n is a, c, g, or t
  misc_feature (929)..(929): n is a, c, g, or t
  misc_feature (945)..(945): n is a, c, g, or t
  misc_feature (956)..(956): n is a, c, g, or t
  misc_feature (983)..(985): n is a, c, g, or t
  misc_feature (1002)..(1002): n is a, c, g, or t
cacttagtgcatagtncgaggcnggtgtgaatcggccgaggcgctgcccaccgctgccgagcccgacgctatgtccagcaaaggctccgtggttctggcctacagtggcggcctggacacctcgtgcatcctcgtgtggctgaaggaacaaggctatgacgtcattgcctatctggccaacattggccagaaggaagacttcgaggaagccaggaagaaggcactgaagcttggggccaaaaaggtgttcattgaggatgtcagcagggagtttgtggaggagttcatctggccggccatccagtccagcgcactgtatgaggaccgctacctcctgggcacctctcttgccaggccctgcatcgcccgcaaacaagtggaaatcgcccagcgggagggggccaagtatgtgtcccacggcgccacaggaaaggggaacgatcaggtccggtttgagctcagctgctactcactggccccccagataaaggtcattgctccctggaggatgcctgaattctacaaccggttcaagggccgcaatgacctgatggagtacgcaaagcaacacgggattcccatcccggtcactcccaagaacccgtggagcatggatgagaacctcatgcacatcagctacgaggctggaatcctggagaaccccaagaaccaagcgcctccaggtctctacacgaagacccaggacccagccaaagcccccaacacccctgacattctcgagatcgagttcaaaaaaggggtccctgtgaaggtgaccaacgtcaaggatggcaccacccaccagacctccttggagctcttcatgtacctgaacgaagtcgcgggcaagcatgggtggccgtattgactcgggggaacgtccattggatgagtccggggtttntcgagacccgggccttcttaccggncttggatgggctccanggcggggggcnacacagcggggaatgggcggttggttnnnccctgttttccgtcccncgggggggggtcagggaccggccccagggggggggcgc

SEQ ID NO: 309145 - DNA, 366 bp, Homo sapiens
acaagcttctactctccttgcacatgaacgtgcagggtgattatgagccaactgatgccaccgggttcatcaacatcaattccctcaggctgaaggaatatcatcgtctccagagcaaggtcactgccaaatagacccgtgtacaatgaggagctggggcctcctcaatttgcagatcccccaagtacaggcgctaattgttgtgataatttgtaattgtgacttgttctccccggctggcagcgtagtggggctgccaggccccagctttgttccctggtccccctgaagcctgcaaacgttgtcatcgaagggaagggtggggggcagctgcggtggggagctataaaaatgacaattaaaaga

SEQ ID NO: 309146 - DNA, 388 bp, Homo sapiens
tcttaacaaacagctgccccagccaccccagctctgcctgaattaattgaacccagtgtgtgttgttattgttaatttacatttttctttgttttgaatctggtttacaggctgaaggaatatcatcgtctccagagcaaggtcactgccaaatagacccgtgtacaatgaggagctggggcctcctcaatttgcagatcccccaagtacaggcgctaattgttgtgataatttgtaattgtgacttgttctccccggctggcagcgtagtggggctgccaggccccagctttgttccctggtccccctgaagcctgcaaacgttgtcatcgaagggaagggtggggggcagctgcggtggggagctataaaaatgacaattaaaaga

SEQ ID NO: 309147 - DNA, 968 bp, Homo sapiens
  misc_feature (649)..(649): n is a, c, g, or t
  misc_feature (695)..(695): n is a, c, g, or t
  misc_feature (719)..(720): n is a, c, g, or t
agtcccaggacaaattcacactcagggctgtgccagaaaccggtatacaccagctcgtttctggcacagccctgagtgtgaatttgtccgccactgcatcgccaagtcccaggagcgagtggaagggaaagtgcaggtgtccgtcctcaagggccaggtgtacatcctcggccgggagtcccagctcctcattgtagagagacagccagcaccatggcggttggcaagaacaagcgccttacgaaaggcggcaaaaagggagccaagaagaaagtggttgatccattttctaagaaagattggtatgatgtgaaagcacctgctatgttcaatataagaaatattggaaagacgctcgtcaccaggacccaaggaaccaaaattgcatctgatggtctcaagggtcgtgtgtttgaagtgagtcttgctgatttgcagaatgatgaagttgcatttagaaaattcaagctgattactgaagatgttcagggtaaaaactgcctgactaacttccatggcatggatcttacccgtgacaaaatgtgttccatggtcaaaaaatggcagacaatgattgaagctcacgttgatgtcaagactaccgatggttacttgcttcgtctgttctgtgttggttttactaaaaaangcaacaatcagatacggaagactcttatgctcagcaccaacaggtncgcaaatccggaagaagatgatgnnaatcatgaccgagaggtgcgacaatgacttgaagaagtggtccataatgatccgaccagcttgggaagactagaaaggtggcatctatatcttccggaggttcgtgaaagtaaatgcgggagccagttgatgggaacctggctcggggaggggatcgcacccgggcacaggtctgacgtggttaacccacattgtcccgggacgttgggaaacaaacgctcggcggagaaggggcccgggctagaaag

SEQ ID NO: 309148 - DNA, 2097 bp, Homo sapiens
cgcctgcgcccccgccggcgcgcccctgggagggtgagccggcgccgggcccaggcccggacctggtgggaggcggggggaggtggggacgaggcctggggaggcgggccccgcccatctgcaggtggctgtgaacgctgagcggctccaggcgggggccgggcccgggggcggggtctgtggcgcgcgtccccgccacgtgtccccggtcaccggccctgcccccgggccctgtgcttataacctgggatgggcacccctgccagtcctgctctgccgcctgccaccgctgcccgagcccgacgctatgtccagcaaaggctccgtggttctggcctacagtggcggcctggacacctcgtgcatcctcgtgtggctgaaggaacaaggctatgacgtcattgcctatctggccaacattggccagaaggaagacttcgaggaagccaggaagaaggcactgaagcttggggccaaaaaggtgttcattgaggatgtcagcagggagtttgtggaggagttcatctggccggccatccagtccagcgcactgtatgaggaccgctacctcctgggcacctctcttgccaggccctgcatcgcccgcaaacaagtggaaatcgcccagcgggagggggccaagtatgtgtcccacggcgccacaggaaaggggaacgatcaggtccggtttgagctcagctgctactcactggccccccagataaaggtcattgctccctggaggatgcctgaattctacaaccggttcaagggccgcaatgacctgatggagtacgcaaagcaacacgggattcccatcccggtcactcccaagaacccgtggagcatggatgagaacctcatgcacatcagctacgaggctggaatcctggagaaccccaagaaccaagcgcctccaggtctctacacgaagacccaggacccagccaaagcccccaacacccctgacattctcgagatcgagttcaaaaaaggggtccctgtgaaggtgaccaacgtcaaggatggcaccacccaccagacctccttggagctcttcatgtacctgaacgaagtcgcgggcaagcatggcgtgggccgtattgacatcgtggagaaccgcttcattggaatgaagtcccgaggtatctacgagaccccagcaggcaccatcctttaccatgctcatttagacatcgaggccttcaccatggaccgggaagtgcgcaaaatcaaacaaggcctgggcttgaaatttgctgagctggtgtataccggtttctggcacagccctgagtgtgaatttgtccgccactgcatcgccaagtcccaggagcgagtggaagggaaagtgcaggtgtccgtcctcaagggccaggtgtacatcctcggccgggagtccccactgtctctctacaatgaggagctggtgagcatgaacgtgcagggtgattatgagccaactgatgccaccgggttcatcaacatcaattccctcaggctgaaggaatatcatcgtctccagagcaaggtcactgccaaatagacccgtgtacaatgaggagctggggcctcctcaatttgcagatcccccaagtacaggcgctaattgttgtgataatttgtaattgtgacttgttctccccggctggcagcgtagtggggctgccaggccccagctttgttccctggtccccctgaagcctgcaaacgttgtcatcgaagggaagggtggggggcagctgcggtggggagctataaaaatgacaattaaaagagacactagtcttttatttctagtgagtgtgtgtgtgtgtgtgtgtgtgtgtgtgtgtgtgtgtgtgtgtgtagttaattatggttttcttaggccaacctttgtgttttcggacctaagtgctgccgaaggccgccatttgccagacagcctgttaatctggcagtcgacccctctccagcaaaaactaggaatccagaagtgccgcctgggtccgatcctagccagcatcctgggaatctgtcaccaactgtggtcctgtggcaaatgtcaggaaaccaaataaaattcagggaatgccctttgggggcatcaacgca

SEQ ID NO: 309149 - DNA, 1778 bp, Homo sapiens
cgcctgcgcccccgccggcgcgcccctgggagggtgagccggcgccgggcccaggcccggacctggtgggaggcggggggaggtggggacgaggcctggggaggcgggccccgcccatctgcaggtggctgtgaacgctgagcggctccaggcgggggccgggcccgggggcggggtctgtggcgcgcgtccccgccacgtgtccccggtcaccggccctgcccccgggccctgtgcttataacctgggatgggcacccctgccagtcctgctctgccgcctgccaccgctgcccgagcccgacgctatgtccagcaaaggctccgtggttctggcctacagtggcggcctggacacctcgtgcatcctcgtgtggctgaaggaacaaggctatgacgtcattgcctatctggccaacattggccagaaggaagacttcgaggaagccaggaagaaggcactgaagcttggggccaaaaaggtgttcattgaggatgtcagcagggagtttgtggaggagttcatctggccggccatccagtccagcgcactgtatgaggaccgctacctcctgggcacctctcttgccaggccctgcatcgcccgcaaacaagtggaaatcgcccagcgggagggggccaagtatgtgtcccacggcgccacaggaaaggggaacgatcaggtccggtttgagctcagctgctactcactggccccccagataaaggtcattgctccctggaggatgcctgaattctacaaccggttcaagggccgcaatgacctgatggagtacgcaaagcaacacgggattcccatcccggtcactcccaagaacccgtggagcatggatgagaacctcatgcacatcagctacgaggctggaatcctggagaaccccaagaaccaagcgcctccaggtctctacacgaagacccaggacccagccaaagcccccaacacccctgacattctcgagatcgagttcaaaaaaggggtccctgtgaaggtgaccaacgtcaaggatggcaccacccaccagacctccttggagctcttcatgtacctgaacgaagtcgcgggcaagcatggcgtgggccgtattgacatcgtggagaaccgcttcattggaatgaagtcccgaggtatctacgagaccccagcaggcaccatcctttaccatgctcatttagacatcgaggccttcaccatggaccgggaagtgcgcaaaatcaaacaaggcctgggcttgaaatttgctgagctggtgtataccggtttctggcacagccctgagtgtgaatttgtccgccactgcatcgccaagtcccaggagcgagtggaagggaaagtgcaggtgtccgtcctcaagggccaggtgtacatcctcggccgggagtccccactgtctctctacaatgaggagctggtgagcatgaacgtgcagggtgattatgagccaactgatgccaccgggttcatcaacatcaattccctcaggctgaaggaatatcatcgtctccagagcaaggtcactgccaaatagacccgtgtacaatgaggagctggggcctcctcaatttgcagatcccccaagtacaggcgctaattgttgtgataatttgtaattgtgacttgttctccccggctggcagcgtagtggggctgccaggccccagctttgttccctggtccccctgaagcctgcaaacgttgtcatcgaagggaagggtggggggcagctgcggtggggagctataaaaatgacaattaaaaga

SEQ ID NO: 309150 - DNA, 1854 bp, Homo sapiens
cgcctgcgcccccgccggcgcgcccctgggagggtgagccggcgccgggcccaggcccggacctggtgggaggcggggggaggtggggacgaggcctggggaggcgggccccgcccatctgcaggtggctgtgaacgctgagcggctccaggcgggggccgggcccgggggcggggtctgtggcgcgcgtccccgccacgtgtccccggtcaccggccctgcccccgggccctgtgcttataacctgggatgggcacccctgccagtcctgctctgccgcctgccaccgctgcccgagcccgacgctatgtccagcaaaggctccgtggttctggcctacagtggcggcctggacacctcgtgcatcctcgtgtggctgaaggaacaaggctatgacgtcattgcctatctggccaacattggccagaaggaagacttcgaggaagccaggaagaaggcactgaagcttggggccaaaaaggtgttcattgaggatgtcagcagggagtttgtggaggagttcatctggccggccatccagtccagcgcactgtatgaggaccgctacctcctgggcacctctcttgccaggccctgcatcgcccgcaaacaagtggaaatcgcccagcgggagggggccaagtatgtgtcccacggcgccacaggaaaggggaacgatcaggtccggtttgagctcagctgctactcactggccccccagataaaggtcattgctccctggaggatgcctgaattctacaaccggttcaagggccgcaatgacctgatggagtacgcaaagcaacacgggattcccatcccggtcactcccaagaacccgtggagcatggatgagaacctcatgcacatcagctacgaggctggaatcctggagaaccccaagaaccaagcgcctccaggtctctacacgaagacccaggacccagccaaagcccccaacacccctgacattctcgagatcgagttcaaaaaaggggtccctgtgaaggtgaccaacgtcaaggatggcaccacccaccagacctccttggagctcttcatgtacctgaacgaagtcgcgggcaagcatggcgtgggccgtattgacatcgtggagaaccgcttcattggaatgaagtcccgaggtatctacgagaccccagcaggcaccatcctttaccatgctcatttagacatcgaggccttcaccatggaccgggaagtgcgcaaaatcaaacaaggcctgggcttgaaatttgctgagctggtgtataccggtttctggcacagccctgagtgtgaatttgtccgccactgcatcgccaagtcccaggagcgagtggaagggaaagtgcaggtgtccgtcctcaagggccaggtgtacatcctcggccgggagtccccactgtctctctacaatgaggagctggtgagcatgaacgtgcagggtgattatgagccaactgatgccaccgggttcatcaacatcaattccctcaggctgaaggaatatcatcgtctccagagcaaggtcactgccaaatagacccgtgtacaatgaggagctggggcctcctcaatttgcagatcccccaagtacaggcgctaattgttgtgataatttgtaattgtgacttgttctccccggctggcagcgtagtggggctgccaggccccagctttgttccctggtccccctgaagcctgcaaacgttgtcatcgaagggaagggtggggggcagctgcggtggggagctataaaaatgacaattaaaagaaaacacacaaccgacagacacgacagaaaacaaacacaacaaaaaacaaacaaaaaacaaaacacacacacaaaaa

SEQ ID NO: 309151 - DNA, 2087 bp, Homo sapiens
cgcctgcgcccccgccggcgcgcccctgggagggtgagccggcgccgggcccaggcccggacctggtgggaggcggggggaggtggggacgaggcctggggaggcgggccccgcccatctgcaggtggctgtgaacgctgagcggctccaggcgggggccgggcccgggggcggggtctgtggcgcgcgtccccgccacgtgtccccggtcaccggccctgcccccgggccctgtgcttataacctgggatgggcacccctgccagtcctgctctgccgcctgccaccgctgcccgagcccgacgctatgtccagcaaaggctccgtggttctggcctacagtggcggcctggacacctcgtgcatcctcgtgtggctgaaggaacaaggctatgacgtcattgcctatctggccaacattggccagaaggaagacttcgaggaagccaggaagaaggcactgaagcttggggccaaaaaggtgttcattgaggatgtcagcagggagtttgtggaggagttcatctggccggccatccagtccagcgcactgtatgaggaccgctacctcctgggcacctctcttgccaggccctgcatcgcccgcaaacaagtggaaatcgcccagcgggagggggccaagtatgtgtcccacggcgccacaggaaaggggaacgatcaggtccggtttgagctcagctgctactcactggccccccagataaaggtcattgctccctggaggatgcctgaattctacaaccggttcaagggccgcaatgacctgatggagtacgcaaagcaacacgggattcccatcccggtcactcccaagaacccgtggagcatggatgagaacctcatgcacatcagctacgaggctggaatcctggagaaccccaagaaccaagcgcctccaggtctctacacgaagacccaggacccagccaaagcccccaacacccctgacattctcgagatcgagttcaaaaaaggggtccctgtgaaggtgaccaacgtcaaggatggcaccacccaccagacctccttggagctcttcatgtacctgaacgaagtcgcgggcaagcatggcgtgggccgtattgacatcgtggagaaccgcttcattggaatgaagtcccgaggtatctacgagaccccagcaggcaccatcctttaccatgctcatttagacatcgaggccttcaccatggaccgggaagtgcgcaaaatcaaacaaggcctgggcttgaaatttgctgagctggtgtataccggtttctggcacagccctgagtgtgaatttgtccgccactgcatcgccaagtcccaggagcgagtggaagggaaagtgcaggtgtccgtcctcaagggccaggtgtacatcctcggccgggagtccccactgtctctctacaatgaggagctggtgagcatgaacgtgcagggtgattatgagccaactgatgccaccgggttcatcaacatcaattccctcaggctgaaggaatatcatcgtctccagagcaaggtcactgccaaatagacccgtgtacaatgaggagctggggcctcctcaatttgcagatcccccaagtacaggcgctaattgttgtgataatttgtaattgtgacttgttctccccggctggcagcgtagtggggctgccaggccccagctttgttccctggtccccctgaagcctgcaaacgttgtcatcgaagggaagggtggggggcagctgcggtggggagctataaaaatgacaattaaaagacgaaaaaaaaaaaaaaaaaaaaaaaaaaaaactttttgggcggcctgggccctaaaaatttttgtaaacaccttcggttgggggcggcgggggccccacgacgagggtcaagcgtcgaacagggggcccaacagcggttcaccaaagaggaacacccgggggcccagaacaagagtgcgggggttccccccccagataaaaaaacgccggggggaacccgaaacggttcgtgaaaaatctccgaagggagtgcgggggacccaagcgggatctatacacgggggcccaaggaaatcgaatataaatggc

SEQ ID NO: 309152 - DNA, 1887 bp, Homo sapiens
cgcctgcgcccccgccggcgcgcccctgggagggtgagccggcgccgggcccaggcccggacctggtgggaggcggggggaggtggggacgaggcctggggaggcgggccccgcccatctgcaggtggctgtgaacgctgagcggctccaggcgggggccgggcccgggggcggggtctgtggcgcgcgtccccgccacgtgtccccggtcaccggccctgcccccgggccctgtgcttataacctgggatgggcacccctgccagtcctgctctgccgcctgccaccgctgcccgagcccgacgctatgtccagcaaaggctccgtggttctggcctacagtggcggcctggacacctcgtgcatcctcgtgtggctgaaggaacaaggctatgacgtcattgcctatctggccaacattggccagaaggaagacttcgaggaagccaggaagaaggcactgaagcttggggccaaaaaggtgttcattgaggatgtcagcagggagtttgtggaggagttcatctggccggccatccagtccagcgcactgtatgaggaccgctacctcctgggcacctctcttgccaggccctgcatcgcccgcaaacaagtggaaatcgcccagcgggagggggccaagtatgtgtcccacggcgccacaggaaaggggaacgatcaggtccggtttgagctcagctgctactcactggccccccagataaaggtcattgctccctggaggatgcctgaattctacaaccggttcaagggccgcaatgacctgatggagtacgcaaagcaacacgggattcccatcccggtcactcccaagaacccgtggagcatggatgagaacctcatgcacatcagctacgaggctggaatcctggagaaccccaagaaccaagcgcctccaggtctctacacgaagacccaggacccagccaaagcccccaacacccctgacattctcgagatcgagttcaaaaaaggggtccctgtgaaggtgaccaacgtcaaggatggcaccacccaccagacctccttggagctcttcatgtacctgaacgaagtcgcgggcaagcatggcgtgggccgtattgacatcgtggagaaccgcttcattggaatgaagtcccgaggtatctacgagaccccagcaggcaccatcctttaccatgctcatttagacatcgaggccttcaccatggaccgggaagtgcgcaaaatcaaacaaggcctgggcttgaaatttgctgagctggtgtataccggtttctggcacagccctgagtgtgaatttgtccgccactgcatcgccaagtcccaggagcgagtggaagggaaagtgcaggtgtccgtcctcaagggccaggtgtacatcctcggccgggagtccccactgtctctctacaatgaggagctggtgagcatgaacgtgcagggtgattatgagccaactgatgccaccgggttcatcaacatcaattccctcaggctgaaggaatatcatcgtctccagagcaaggtcactgccaaatagacccgtgtacaatgaggagctggggcctcctcaatttgcagatcccccaagtacaggcgctaattgttgtgataatttgtaattgtgacttgttctccccggctggcagcgtagtggggctgccaggccccagctttgttccctggtccccctgaagcctgcaaacgttgtcatcgaagggaagggtggggggcagctgcggtggggagctataaaaatgacaattaaaagaaaaaaaaaacacacaccaccaaacaaaaacccgccctttttggcgggggaaacaactaacagcgcggatttccaccttttgaaaggagaagggcccgggggaataaccg

SEQ ID NO: 309153 - DNA, 1852 bp, Homo sapiens
  misc_feature (1784)..(1784): n is a, c, g, or t
  misc_feature (1788)..(1788): n is a, c, g, or t
  misc_feature (1791)..(1791): n is a, c, g, or t
  misc_feature (1797)..(1797): n is a, c, g, or t
  misc_feature (1802)..(1802): n is a, c, g, or t
  misc_feature (1804)..(1804): n is a, c, g, or t
  misc_feature (1806)..(1806): n is a, c, g, or t
  misc_feature (1811)..(1811): n is a, c, g, or t
cgcctgcgcccccgccggcgcgcccctgggagggtgagccggcgccgggcccaggcccggacctggtgggaggcggggggaggtggggacgaggcctggggaggcgggccccgcccatctgcaggtggctgtgaacgctgagcggctccaggcgggggccgggcccgggggcggggtctgtggcgcgcgtccccgccacgtgtccccggtcaccggccctgcccccgggccctgtgcttataacctgggatgggcacccctgccagtcctgctctgccgcctgccaccgctgcccgagcccgacgctatgtccagcaaaggctccgtggttctggcctacagtggcggcctggacacctcgtgcatcctcgtgtggctgaaggaacaaggctatgacgtcattgcctatctggccaacattggccagaaggaagacttcgaggaagccaggaagaaggcactgaagcttggggccaaaaaggtgttcattgaggatgtcagcagggagtttgtggaggagttcatctggccggccatccagtccagcgcactgtatgaggaccgctacctcctgggcacctctcttgccaggccctgcatcgcccgcaaacaagtggaaatcgcccagcgggagggggccaagtatgtgtcccacggcgccacaggaaaggggaacgatcaggtccggtttgagctcagctgctactcactggccccccagataaaggtcattgctccctggaggatgcctgaattctacaaccggttcaagggccgcaatgacctgatggagtacgcaaagcaacacgggattcccatcccggtcactcccaagaacccgtggagcatggatgagaacctcatgcacatcagctacgaggctggaatcctggagaaccccaagaaccaagcgcctccaggtctctacacgaagacccaggacccagccaaagcccccaacacccctgacattctcgagatcgagttcaaaaaaggggtccctgtgaaggtgaccaacgtcaaggatggcaccacccaccagacctccttggagctcttcatgtacctgaacgaagtcgcgggcaagcatggcgtgggccgtattgacatcgtggagaaccgcttcattggaatgaagtcccgaggtatctacgagaccccagcaggcaccatcctttaccatgctcatttagacatcgaggccttcaccatggaccgggaagtgcgcaaaatcaaacaaggcctgggcttgaaatttgctgagctggtgtataccggtttctggcacagccctgagtgtgaatttgtccgccactgcatcgccaagtcccaggagcgagtggaagggaaagtgcaggtgtccgtcctcaagggccaggtgtacatcctcggccgggagtccccactgtctctctacaatgaggagctggtgagcatgaacgtgcagggtgattatgagccaactgatgccaccgggttcatcaacatcaattccctcaggctgaaggaatatcatcgtctccagagcaaggtcactgccaaatagacccgtgtacaatgaggagctggggcctcctcaatttgcagatcccccaagtacaggcgctaattgttgtgataatttgtaattgtgacttgttctccccggctggcagcgtagtggggctgccaggccccagctttgttccctggtccccctgaagcctgcaaacgttgtcatcgaagggaagggtggggggcagctgcggtggggagctataaaaatgacaattaaaagacaacanacanaanaaaaanacaangnanagaanaaaaacaagaaggacagcaaaacaacaagaaagcaagccaa

SEQ ID NO: 309154 - DNA, 1812 bp, Homo sapiens
cgcctgcgcccccgccggcgcgcccctgggagggtgagccggcgccgggcccaggcccggacctggtgggaggcggggggaggtggggacgaggcctggggaggcgggccccgcccatctgcaggtggctgtgaacgctgagcggctccaggcgggggccgggcccgggggcggggtctgtggcgcgcgtccccgccacgtgtccccggtcaccggccctgcccccgggccctgtgcttataacctgggatgggcacccctgccagtcctgctctgccgcctgccaccgctgcccgagcccgacgctatgtccagcaaaggctccgtggttctggcctacagtggcggcctggacacctcgtgcatcctcgtgtggctgaaggaacaaggctatgacgtcattgcctatctggccaacattggccagaaggaagacttcgaggaagccaggaagaaggcactgaagcttggggccaaaaaggtgttcattgaggatgtcagcagggagtttgtggaggagttcatctggccggccatccagtccagcgcactgtatgaggaccgctacctcctgggcacctctcttgccaggccctgcatcgcccgcaaacaagtggaaatcgcccagcgggagggggccaagtatgtgtcccacggcgccacaggaaaggggaacgatcaggtccggtttgagctcagctgctactcactggccccccagataaaggtcattgctccctggaggatgcctgaattctacaaccggttcaagggccgcaatgacctgatggagtacgcaaagcaacacgggattcccatcccggtcactcccaagaacccgtggagcatggatgagaacctcatgcacatcagctacgaggctggaatcctggagaaccccaagaaccaagcgcctccaggtctctacacgaagacccaggacccagccaaagcccccaacacccctgacattctcgagatcgagttcaaaaaaggggtccctgtgaaggtgaccaacgtcaaggatggcaccacccaccagacctccttggagctcttcatgtacctgaacgaagtcgcgggcaagcatggcgtgggccgtattgacatcgtggagaaccgcttcattggaatgaagtcccgaggtatctacgagaccccagcaggcaccatcctttaccatgctcatttagacatcgaggccttcaccatggaccgggaagtgcgcaaaatcaaacaaggcctgggcttgaaatttgctgagctggtgtataccggtttctggcacagccctgagtgtgaatttgtccgccactgcatcgccaagtcccaggagcgagtggaagggaaagtgcaggtgtccgtcctcaagggccaggtgtacatcctcggccgggagtccccactgtctctctacaatgaggagctggtgagcatgaacgtgcagggtgattatgagccaactgatgccaccgggttcatcaacatcaattccctcaggctgaaggaatatcatcgtctccagagcaaggtcactgccaaatagacccgtgtacaatgaggagctggggcctcctcaatttgcagatcccccaagtacaggcgctaattgttgtgataatttgtaattgtgacttgttctccccggctggcagcgtagtggggctgccaggccccagctttgttccctggtccccctgaagcctgcaaacgttgtcatcgaagggaagggtggggggcagctgcggtggggagctataaaaatgacaattaaaagaaaaacaaacaaaaaacaaaacacacacacaaaaa

SEQ ID NO: 309155 - DNA, 1835 bp, Homo sapiens
  misc_feature (1800)..(1800): n is a, c, g, or t
cgcctgcgcccccgccggcgcgcccctgggagggtgagccggcgccgggcccaggcccggacctggtgggaggcggggggaggtggggacgaggcctggggaggcgggccccgcccatctgcaggtggctgtgaacgctgagcggctccaggcgggggccgggcccgggggcggggtctgtggcgcgcgtccccgccacgtgtccccggtcaccggccctgcccccgggccctgtgcttataacctgggatgggcacccctgccagtcctgctctgccgcctgccaccgctgcccgagcccgacgctatgtccagcaaaggctccgtggttctggcctacagtggcggcctggacacctcgtgcatcctcgtgtggctgaaggaacaaggctatgacgtcattgcctatctggccaacattggccagaaggaagacttcgaggaagccaggaagaaggcactgaagcttggggccaaaaaggtgttcattgaggatgtcagcagggagtttgtggaggagttcatctggccggccatccagtccagcgcactgtatgaggaccgctacctcctgggcacctctcttgccaggccctgcatcgcccgcaaacaagtggaaatcgcccagcgggagggggccaagtatgtgtcccacggcgccacaggaaaggggaacgatcaggtccggtttgagctcagctgctactcactggccccccagataaaggtcattgctccctggaggatgcctgaattctacaaccggttcaagggccgcaatgacctgatggagtacgcaaagcaacacgggattcccatcccggtcactcccaagaacccgtggagcatggatgagaacctcatgcacatcagctacgaggctggaatcctggagaaccccaagaaccaagcgcctccaggtctctacacgaagacccaggacccagccaaagcccccaacacccctgacattctcgagatcgagttcaaaaaaggggtccctgtgaaggtgaccaacgtcaaggatggcaccacccaccagacctccttggagctcttcatgtacctgaacgaagtcgcgggcaagcatggcgtgggccgtattgacatcgtggagaaccgcttcattggaatgaagtcccgaggtatctacgagaccccagcaggcaccatcctttaccatgctcatttagacatcgaggccttcaccatggaccgggaagtgcgcaaaatcaaacaaggcctgggcttgaaatttgctgagctggtgtataccggtttctggcacagccctgagtgtgaatttgtccgccactgcatcgccaagtcccaggagcgagtggaagggaaagtgcaggtgtccgtcctcaagggccaggtgtacatcctcggccgggagtccccactgtctctctacaatgaggagctggtgagcatgaacgtgcagggtgattatgagccaactgatgccaccgggttcatcaacatcaattccctcaggctgaaggaatatcatcgtctccagagcaaggtcactgccaaatagacccgtgtacaatgaggagctggggcctcctcaatttgcagatcccccaagtacaggcgctaattgttgtgataatttgtaattgtgacttgttctccccggctggcagcgtagtggggctgccaggccccagctttgttccctggtccccctgaagcctgcaaacgttgtcatcgaagggaagggtggggggcagctgcggtggggagctataaaaatgacaattaaaagaattatcacaacaattagcgccntgtacttgggggatctgcaaattgaaggaggcccc

SEQ ID NO: 309156 - DNA, 1840 bp, Homo sapiens
cgcctgcgcccccgccggcgcgcccctgggagggtgagccggcgccgggcccaggcccggacctggtgggaggcggggggaggtggggacgaggcctggggaggcgggccccgcccatctgcaggtggctgtgaacgctgagcggctccaggcgggggccgggcccgggggcggggtctgtggcgcgcgtccccgccacgtgtccccggtcaccggccctgcccccgggccctgtgcttataacctgggatgggcacccctgccagtcctgctctgccgcctgccaccgctgcccgagcccgagtggttcactgcactgtgaaaacagattccagacgccgggaactcacgcctccaatcccagacgctatgtccagcaaaggctccgtggttctggcctacagtggcggcctggacacctcgtgcatcctcgtgtggctgaaggaacaaggctatgacgtcattgcctatctggccaacattggccagaaggaagacttcgaggaagccaggaagaaggcactgaagcttggggccaaaaaggtgttcattgaggatgtcagcagggagtttgtggaggagttcatctggccggccatccagtccagcgcactgtatgaggaccgctacctcctgggcacctctcttgccaggccctgcatcgcccgcaaacaagtggaaatcgcccagcgggagggggccaagtatgtgtcccacggcgccacaggaaaggggaacgatcaggtccggtttgagctcagctgctactcactggccccccagataaaggtcattgctccctggaggatgcctgaattctacaaccggttcaagggccgcaatgacctgatggagtacgcaaagcaacacgggattcccatcccggtcactcccaagaacccgtggagcatggatgagaacctcatgcacatcagctacgaggctggaatcctggagaaccccaagaaccaagcgcctccaggtctctacacgaagacccaggacccagccaaagcccccaacacccctgacattctcgagatcgagttcaaaaaaggggtccctgtgaaggtgaccaacgtcaaggatggcaccacccaccagacctccttggagctcttcatgtacctgaacgaagtcgcgggcaagcatggcgtgggccgtattgacatcgtggagaaccgcttcattggaatgaagtcccgaggtatctacgagaccccagcaggcaccatcctttaccatgctcatttagacatcgaggccttcaccatggaccgggaagtgcgcaaaatcaaacaaggcctgggcttgaaatttgctgagctggtgtataccggtttctggcacagccctgagtgtgaatttgtccgccactgcatcgccaagtcccaggagcgagtggaagggaaagtgcaggtgtccgtcctcaagggccaggtgtacatcctcggccgggagtccccactgtctctctacaatgaggagctggtgagcatgaacgtgcagggtgattatgagccaactgatgccaccgggttcatcaacatcaattccctcaggctgaaggaatatcatcgtctccagagcaaggtcactgccaaatagacccgtgtacaatgaggagctggggcctcctcaatttgcagatcccccaagtacaggcgctaattgttgtgataatttgtaattgtgacttgttctccccggctggcagcgtagtggggctgccaggccccagctttgttccctggtccccctgaagcctgcaaacgttgtcatcgaagggaagggtggggggcagctgcggtggggagctataaaaatgacaattaaaaga

SEQ ID NO: 309157 - DNA, 1744 bp, Homo sapiens
cgcctgcgcccccgccggcgcgcccctgggagggtgagccggcgccgggcccaggcccggacctggtgggaggcggggggaggtggggacgaggcctggggaggcgggccccgcccatctgcaggtggctgtgaacgctgagcggctccaggcgggggccgggcccgggggcggggtctgtggcgcgcgtccccgccacgtgtccccggtcaccggccctgcccccgggccctgtgcttataacctgggatgggcacccctgccagtcctgctctgccgcctgccaccgctgcccgagcccgacgctatgtccagcaaaggctccgtggttctggcctacagtggcggcctggacacctcgtgcatcctcgtgtggctgaaggaacaaggctatgacgtcattgcctatctggccaacattggccagaaggaagacttcgaggaagccaggaagaaggcactgaagcttggggccaaaaaggtgttcattgaggatgtcagcagggagtttgtggaggagttcatctggccggccatccagtccagcgcactgtatgaggaccgctacctcctgggcacctctcttgccaggccctgcatcgcccgcaaacaagtggaaatcgcccagcgggagggggccaagtatgtgtcccacggcgccacaggaaaggggaacgatcaggtccggtttgagctcagctgctactcactggccccccagataaaggtcattgctccctggaggatgcctgaattctacaaccggttcaagggccgcaatgacctgatggagtacgcaaagcaacacgggattcccatcccggtcactcccaagaacccgtggagcatggatgagaacctcatgcacatcagctacgaggctggaatcctggagaaccccaagaaccaagcgcctccaggtctctacacgaagacccaggacccagccaaagcccccaacacccctgacattctcgagatcgagttcaaaaaaggggtccctgtgaaggtgaccaacgtcaaggatggcaccacccaccagacctccttggagctcttcatgtacctgaacgaagtcgcgggcaagcatggcgtgggccgtattgacatcgtggagaaccgcttcattggaatgaagtcccgaggtatctacgagaccccagcaggcaccatcctttaccatgctcatttagacatcgaggccttcaccatggaccgggaagtgcgcaaaatcaaacaaggcctgggcttgaaatttgctgagctggtgtataccggtttctggcacagccctgagtgtgaatttgtccgccactgcatcgccaagtcccaggagcgagtggaagggaaagtgcaggtgtccgtcctcaagggccaggtgtacatcctcggccgggagtccccactgtctctctacaatgaggagctggtgagcatgaacgtgcagggtgattatgagccaactgatgccaccgggttcatcaacatcaattccctcaggctgaaggaatatcatcgtctccagagcaaggtcactgccaaatagacccgtgtacaatgaggagctggggcctcctcaatttgcagatcccccaagtaacctgccggtggagtacaacctgccggtggagtacaacctgccggtggagtacaacctgccggtggagtacaacctgccggtggagtacaacctgccggtggagtacaacctgccggtggagtacaacctgccggtggagacaca

SEQ ID NO: 309158 - DNA, 1693 bp, Homo sapiens
cgcctgcgcccccgccggcgcgcccctgggagggtgagccggcgccgggcccaggcccggacctggtgggaggcggggggaggtggggacgaggcctggggaggcgggccccgcccatctgcaggtggctgtgaacgctgagcggctccaggcgggggccgggcccgggggcggggtctgtggcgcgcgtccccgccacgtgtccccggtcaccggccctgcccccgggccctgtgcttataacctgggatgggcacccctgccagtcctgctctgccgcctgccaccgctgcccgagcccgacgctatgtccagcaaaggctccgtggttctggcctacagtggcggcctggacacctcgtgcatcctcgtgtggctgaaggaacaaggctatgacgtcattgcctatctggccaacattggccagaaggaagacttcgaggaagccaggaagaaggcactgaagcttggggccaaaaaggtgttcattgaggatgtcagcagggagtttgtggaggagttcatctggccggccatccagtccagcgcactgtatgaggaccgctacctcctgggcacctctcttgccaggccctgcatcgcccgcaaacaagtggaaatcgcccagcgggagggggccaagtatgtgtcccacggcgccacaggaaaggggaacgatcaggtccggtttgagctcagctgctactcactggccccccagataaaggtcattgctccctggaggatgcctgaattctacaaccggttcaagggccgcaatgacctgatggagtacgcaaagcaacacgggattcccatcccggtcactcccaagaacccgtggagcatggatgagaacctcatgcacatcagctacgaggctggaatcctggagaaccccaagaaccaagcgcctccaggtctctacacgaagacccaggacccagccaaagcccccaacacccctgacattctcgagatcgagttcaaaaaaggggtccctgtgaaggtgaccaacgtcaaggatggcaccacccaccagacctccttggagctcttcatgtacctgaacgaagtcgcgggcaagcatggcgtgggccgtattgacatcgtggagaaccgcttcattggaatgaagtcccgaggtatctacgagaccccagcaggcaccatcctttaccatgctcatttagacatcgaggccttcaccatggaccgggaagtgcgcaaaatcaaacaaggcctgggcttgaaatttgctgagctggtgtataccggtttctggcacagccctgagtgtgaatttgtccgccactgcatcgccaagtcccaggagcgagtggaagggaaagtgcaggtgtccgtcctcaagggccaggtgtacatcctcggccgggagtccccactgtctctctacaatgaggagctggtgagcatgaacgtgcagggtgattatgagccaactgatgccaccgggttcatcaacatcaattccctcaggctgaaggaatatcatcgtctccagagcaaggtcactgccaaatagacccgtgtacaatgaggagctggggcctcctcaatttgcagatcccccaagtagacccgacgtgccacccaacgggccccacgaagagcccccccacgagccgcgcaaagagccacgcgaagagccccccaaagagccggagatcct

SEQ ID NO: 309159 - DNA, 2000 bp, Homo sapiens
aagcgcgggtcaccctcggggcttggggacagcaggctcacacagttgcccttggcgcccgcactggatgagttccacggtgcctccctcaggccccaagtccaggtggcagctgtctaactggagcaggaactcggagacggatggggacactctgacctgcacaaagctctgctctgccgcctgccaccgctgcccgagcccgacgctatgtccagcaaaggctccgtggttctggcctacagtggcggcctggacacctcgtgcatcctcgtgtggctgaaggaacaaggctatgacgtcattgcctatctggccaacattggccagaaggaagacttcgaggaagccaggaagaaggcactgaagcttggggccaaaaaggtgttcattgaggatgtcagcagggagtttgtggaggagttcatctggccggccatccagtccagcgcactgtatgaggaccgctacctcctgggcacctctcttgccaggccctgcatcgcccgcaaacaagtggaaatcgcccagcgggagggggccaagtatgtgtcccacggcgccacaggaaaggggaacgatcaggtccggtttgagctcagctgctactcactggccccccagataaaggtcattgctccctggaggatgcctgaattctacaaccggttcaagggccgcaatgacctgatggagtacgcaaagcaacacgggattcccatcccggtcactcccaagaacccgtggagcatggatgagaacctcatgcacatcagctacgaggctggaatcctggagaaccccaagaaccaagcgcctccaggtctctacacgaagacccaggacccagccaaagcccccaacacccctgacattctcgagatcgagttcaaaaaaggggtccctgtgaaggtgaccaacgtcaaggatggcaccacccaccagacctccttggagctcttcatgtacctgaacgaagtcgcgggcaagcatggcgtgggccgtattgacatcgtggagaaccgcttcattggaatgaagtcccgaggtatctacgagaccccagcaggcaccatcctttaccatgctcatttagacatcgaggccttcaccatggaccgggaagtgcgcaaaatcaaacaaggcctgggcttgaaatttgctgagctggtgtataccggtttctggcacagccctgagtgtgaatttgtccgccactgcatcgccaagtcccaggagcgagtggaagggaaagtgcaggtgtccgtcctcaagggccaggtgtacatcctcggccgggagtccccactgtctctctacaatgaggagctggtgagcatgaacgtgcagggtgattatgagccaactgatgccaccgggttcatcaacatcaattccctcaggctgaaggaatatcatcgtctccagagcaaggtcactgccaaatagacccgtgtacaatgaggagctggggcctcctcaatttgcagatcccccaagtacaggcgctaattgttgtgataatttgtaattgtgacttgttctccccggctggcagcgtagtggggctgccaggccccagctttgttccctggtccccctgaagcctgcaaacgttgtcatcgaagggaagggtggggggcagctgcggtggggagctataaaaatgacaattaaaagagacactagtcttttatttctagtgagtgtgtgtgtgtgtgtgtgtgtgtgtgtgtgtgtgtgtgtgtgtgtagttaattatggttttcttaggccaacctttgtgttttcggacctaagtgctgccgaaggccgccatttgccagacagcctgttaatctggcagtcgacccctctccagcaaaaactaggaatccagaagtgccgcctgggtccgatcctagccagcatcctgggaatctgtcaccaactgtggtcctgtggcaaatgtcaggaaaccaaataaaattcagggaatgccctttgggggcatcaacgca

SEQ ID NO: 309160 - DNA, 2220 bp, Homo sapiens
cgcctgcgcccccgccggcgcgcccctgggagggtgagccggcgccgggcccaggcccggacctggtgggaggcggggggaggtggggacgaggcctggggaggcgggccccgcccatctgcaggtggctgtgaacgctgagcggctccaggcgggggccgggcccgggggcggggtctgtggcgcgcgtccccgccacgtgtccccggtcaccggccctgcccccgggccctgtgcttataacctgggatgggcacccctgccagtcctgctctgccgcctgccaccgctgcccgagcccggtgggcggcggcactgcgtgctggggaagcacagattcttgtgccctctgtgaccttgagcctgccactgacctctctgagccctgctggctgcctccccaataggaatgacaactcctacttcatgaggttgtagtgggggctcaggggcacagggagatcccgctgaggctcccagggccctgcctggtgcttggcaaggagcagttctgatgggggatgtgtcagctgccagaggctcagagccaaggcccctcccacatctcctgcctgcgtgcattcctcacatcctggccttgggccaaactgctcagcctcagccgccttccctcgatgctggaggatcaggtccaagagatgcctctccccgaccagcctaggactgcagtcagcattcccaggccccagtgtggtctgtggggctgtgtgcagagtgtgcgagacgctatgtccagcaaaggctccgtggttctggcctacagtggcggcctggacacctcgtgcatcctcgtgtggctgaaggaacaaggctatgacgtcattgcctatctggccaacattggccagaaggaagacttcgaggaagccaggaagaaggcactgaagcttggggccaaaaaggtgttcattgaggatgtcagcagggagtttgtggaggagttcatctggccggccatccagtccagcgcactgtatgaggaccgctacctcctgggcacctctcttgccaggccctgcatcgcccgcaaacaagtggaaatcgcccagcgggagggggccaagtatgtgtcccacggcgccacaggaaaggggaacgatcaggtccggtttgagctcagctgctactcactggccccccagataaaggtcattgctccctggaggatgcctgaattctacaaccggttcaagggccgcaatgacctgatggagtacgcaaagcaacacgggattcccatcccggtcactcccaagaacccgtggagcatggatgagaacctcatgcacatcagctacgaggctggaatcctggagaaccccaagaaccaagcgcctccaggtctctacacgaagacccaggacccagccaaagcccccaacacccctgacattctcgagatcgagttcaaaaaaggggtccctgtgaaggtgaccaacgtcaaggatggcaccacccaccagacctccttggagctcttcatgtacctgaacgaagtcgcgggcaagcatggcgtgggccgtattgacatcgtggagaaccgcttcattggaatgaagtcccgaggtatctacgagaccccagcaggcaccatcctttaccatgctcatttagacatcgaggccttcaccatggaccgggaagtgcgcaaaatcaaacaaggcctgggcttgaaatttgctgagctggtgtataccggtttctggcacagccctgagtgtgaatttgtccgccactgcatcgccaagtcccaggagcgagtggaagggaaagtgcaggtgtccgtcctcaagggccaggtgtacatcctcggccgggagtccccactgtctctctacaatgaggagctggtgagcatgaacgtgcagggtgattatgagccaactgatgccaccgggttcatcaacatcaattccctcaggctgaaggaatatcatcgtctccagagcaaggtcactgccaaatagacccgtgtacaatgaggagctggggcctcctcaatttgcagatcccccaagtacaggcgctaattgttgtgataatttgtaattgtgacttgttctccccggctggcagcgtagtggggctgccaggccccagctttgttccctggtccccctgaagcctgcaaacgttgtcatcgaagggaagggtggggggcagctgcggtggggagctataaaaatgacaattaaaaga

SEQ ID NO: 309161 - DNA, 2225 bp, Homo sapiens
agcggaggctcctgactcgtgggcagagagtgtgctgacgcgccgcctggttcgggaaaggctctcgtttcttgccgcgagcaagaagcgttgggtggaccatcgcccagaaggtaagctcgagcacctgtttacttattactagtattagtattattagcactactagtagtagtactactactagtaggagaggtagtatactagtagtgcggagtatggatcacgggaccaaactattgttctgacttgcgcttccagtccgatgtacgacgtggaccctggtgcctggtcactctaggcgtgggacacacgtaacgggctcgaggtctggccgggatcgccagcgcaatgacataccaccggtgagtggttcactgcactgtgaaaacagattccagacgccgggaactcacgcctccaatcccagacgctatgtccagcaaaggctccgtggttctggcctacagtggcggcctggacacctcgtgcatcctcgtgtggctgaaggaacaaggctatgacgtcattgcctatctggccaacattggccagaaggaagacttcgaggaagccaggaagaaggcactgaagcttggggccaaaaaggtgttcattgaggatgtcagcagggagtttgtggaggagttcatctggccggccatccagtccagcgcactgtatgaggaccgctacctcctgggcacctctcttgccaggccctgcatcgcccgcaaacaagtggaaatcgcccagcgggagggggccaagtatgtgtcccacggcgccacaggaaaggggaacgatcaggtccggtttgagctcagctgctactcactggccccccagataaaggtcattgctccctggaggatgcctgaattctacaaccggttcaagggccgcaatgacctgatggagtacgcaaagcaacacgggattcccatcccggtcactcccaagaacccgtggagcatggatgagaacctcatgcacatcagctacgaggctggaatcctggagaaccccaagaaccaagcgcctccaggtctctacacgaagacccaggacccagccaaagcccccaacacccctgacattctcgagatcgagttcaaaaaaggggtccctgtgaaggtgaccaacgtcaaggatggcaccacccaccagacctccttggagctcttcatgtacctgaacgaagtcgcgggcaagcatggcgtgggccgtattgacatcgtggagaaccgcttcattggaatgaagtcccgaggtatctacgagaccccagcaggcaccatcctttaccatgctcatttagacatcgaggccttcaccatggaccgggaagtgcgcaaaatcaaacaaggcctgggcttgaaatttgctgagctggtgtataccggtttctggcacagccctgagtgtgaatttgtccgccactgcatcgccaagtcccaggagcgagtggaagggaaagtgcaggtgtccgtcctcaagggccaggtgtacatcctcggccgggagtccccactgtctctctacaatgaggagctggtgagcatgaacgtgcagggtgattatgagccaactgatgccaccgggttcatcaacatcaattccctcaggctgaaggaatatcatcgtctccagagcaaggtcactgccaaatagacccgtgtacaatgaggagctggggcctcctcaatttgcagatcccccaagtacaggcgctaattgttgtgataatttgtaattgtgacttgttctccccggctggcagcgtagtggggctgccaggccccagctttgttccctggtccccctgaagcctgcaaacgttgtcatcgaagggaagggtggggggcagctgcggtggggagctataaaaatgacaattaaaagagacactagtcttttatttctagtgagtgtgtgtgtgtgtgtgtgtgtgtgtgtgtgtgtgtgtgtgtgtgtagttaattatggttttcttaggccaacctttgtgttttcggacctaagtgctgccgaaggccgccatttgccagacagcctgttaatctggcagtcgacccctctccagcaaaaactaggaatccagaagtgccgcctgggtccgatcctagccagcatcctgggaatctgtcaccaactgtggtcctgtggcaaatgtcaggaaaccaaataaaattcagggaatgccctttgggggcatcaacgca

SEQ ID NO: 309162 - DNA, 1869 bp, Homo sapiens
cactcgccggggactgggaccgaggcaggagggaaggggctcccgatgctcaaacgcctggcaccggattccagacgctatgtccagcaaaggctccgtggttctggcctacagtggcggcctggacacctcgtgcatcctcgtgtggctgaaggaacaaggctatgacgtcattgcctatctggccaacattggccagaaggaagacttcgaggaagccaggaagaaggcactgaagcttggggccaaaaaggtgttcattgaggatgtcagcagggagtttgtggaggagttcatctggccggccatccagtccagcgcactgtatgaggaccgctacctcctgggcacctctcttgccaggccctgcatcgcccgcaaacaagtggaaatcgcccagcgggagggggccaagtatgtgtcccacggcgccacaggaaaggggaacgatcaggtccggtttgagctcagctgctactcactggccccccagataaaggtcattgctccctggaggatgcctgaattctacaaccggttcaagggccgcaatgacctgatggagtacgcaaagcaacacgggattcccatcccggtcactcccaagaacccgtggagcatggatgagaacctcatgcacatcagctacgaggctggaatcctggagaaccccaagaaccaagcgcctccaggtctctacacgaagacccaggacccagccaaagcccccaacacccctgacattctcgagatcgagttcaaaaaaggggtccctgtgaaggtgaccaacgtcaaggatggcaccacccaccagacctccttggagctcttcatgtacctgaacgaagtcgcgggcaagcatggcgtgggccgtattgacatcgtggagaaccgcttcattggaatgaagtcccgaggtatctacgagaccccagcaggcaccatcctttaccatgctcatttagacatcgaggccttcaccatggaccgggaagtgcgcaaaatcaaacaaggcctgggcttgaaatttgctgagctggtgtataccggtttctggcacagccctgagtgtgaatttgtccgccactgcatcgccaagtcccaggagcgagtggaagggaaagtgcaggtgtccgtcctcaagggccaggtgtacatcctcggccgggagtccccactgtctctctacaatgaggagctggtgagcatgaacgtgcagggtgattatgagccaactgatgccaccgggttcatcaacatcaattccctcaggctgaaggaatatcatcgtctccagagcaaggtcactgccaaatagacccgtgtacaatgaggagctggggcctcctcaatttgcagatcccccaagtacaggcgctaattgttgtgataatttgtaattgtgacttgttctccccggctggcagcgtagtggggctgccaggccccagctttgttccctggtccccctgaagcctgcaaacgttgtcatcgaagggaagggtggggggcagctgcggtggggagctataaaaatgacaattaaaagagacactagtcttttatttctagtgagtgtgtgtgtgtgtgtgtgtgtgtgtgtgtgtgtgtgtgtgtgtgtagttaattatggttttcttaggccaacctttgtgttttcggacctaagtgctgccgaaggccgccatttgccagacagcctgttaatctggcagtcgacccctctccagcaaaaactaggaatccagaagtgccgcctgggtccgatcctagccagcatcctgggaatctgtcaccaactgtggtcctgtggcaaatgtcaggaaaccaaataaaattcagggaatgccctttgggggcatcaacgca

SEQ ID NO: 309163 - DNA, 2044 bp, Homo sapiens
cgcctgcgcccccgccggcgcgcccctgggagggtgagccggcgccgggcccaggcccggacctggtgggaggcggggggaggtggggacgaggcctggggaggcgggccccgcccatctgcaggtggctgtgaacgctgagcggctccaggcgggggccgggcccgggggcggggtctgtggcgcgcgtccccgccacgtgtccccggtcaccggccctgcccccgggccctgtgcttataacctgggatgggcacccctgccagtcctgctctgccgcctgccaccgctgcccgagcccgacgctatgtccagcaaaggctccgtggttctggcctacagtggcggcctggacacctcgtgcatcctcgtgtggctgaaggaacaaggctatgacgtcattgcctatctggccaacattggccagaaggaagacttcgaggaagccaggaagaaggcactgaagcttggggccaaaaaggtgttcattgaggatgtcagcagggagtttgtggaggagttcatctggccggccatccagtccagcgcactgtatgaggaccgctacctcctgggcacctctcttgccaggccctgcatcgcccgcaaacaagtggaaatcgcccagcgggagggggccaagtatgtgtcccacggcgccacaggaaaggggaacgatcaggtccggtttgagctcagctgctactcactggccccccagataaaggtcattgctccctggaggatgcctgaattctacaaccggttcaagggccgcaatgacctgatggagtacgcaaagcaacacgggattcccatcccggtcactcccaagaacccgtggagcatggatgagaacctcatgcacatcagctacgaggctggaatcctggagaaccccaagaaccaagcgcctccaggtctctacacgaagacccaggacccagccaaagcccccaacacccctgacattctcgagatcgagttcaaaaaaggggtccctgtgaaggtgaccaacgtcaaggatggcaccacccaccagacctccttggagctcttcatgtacctgaacgaagtcgcgggcaagcatggcgtgggccgtattgacatcgtggagaaccgcttcattggaatgaagtcccgaggtatctacgagaccccagcaggcaccatcctttaccatgctcatttagacatcgaggccttcaccatggaccgggaagtgtttctggcacagccctgagtgtgaatttgtccgccactgcatcgccaagtcccaggagcgagtggaagggaaagtgcaggtgtccgtcctcaagggccaggtgtacatcctcggccgggagtccccactgtctctctacaatgaggagctggtgagcatgaacgtgcagggtgattatgagccaactgatgccaccgggttcatcaacatcaattccctcaggctgaaggaatatcatcgtctccagagcaaggtcactgccaaatagacccgtgtacaatgaggagctggggcctcctcaatttgcagatcccccaagtacaggcgctaattgttgtgataatttgtaattgtgacttgttctccccggctggcagcgtagtggggctgccaggccccagctttgttccctggtccccctgaagcctgcaaacgttgtcatcgaagggaagggtggggggcagctgcggtggggagctataaaaatgacaattaaaagagacactagtcttttatttctagtgagtgtgtgtgtgtgtgtgtgtgtgtgtgtgtgtgtgtgtgtgtgtgtagttaattatggttttcttaggccaacctttgtgttttcggacctaagtgctgccgaaggccgccatttgccagacagcctgttaatctggcagtcgacccctctccagcaaaaactaggaatccagaagtgccgcctgggtccgatcctagccagcatcctgggaatctgtcaccaactgtggtcctgtggcaaatgtcaggaaaccaaataaaattcagggaatgccctttgggggcatcaacgca

SEQ ID NO: 309164 - DNA, 1882 bp, Homo sapiens
cgcctgcgcccccgccggcgcgcccctgggagggtgagccggcgccgggcccaggcccggacctggtgggaggcggggggaggtggggacgaggcctggggaggcgggccccgcccatctgcaggtggctgtgaacgctgagcggctccaggcgggggccgggcccgggggcggggtctgtggcgcgcgtccccgccacgtgtccccggtcaccggccctgcccccgggccctgtgcttataacctgggatgggcacccctgccagtcctgctctgccgcctgccaccgctgcccgagcccgacgctatgtccagcaaaggctccgtggttctggcctacagtggcggcctggacacctcgtgcatcctcgtgtggctgaaggaacaaggctatgacgtcattgcctatctggccaacattggccagaaggaagacttcgaggaagccaggaagaaggcactgaagcttggggccaaaaaggtgttcattgaggatgtcagcagggagtttgtggaggagttcatctggccggccatccagtccagcgcactgtatgaggaccgctacctcctgggcacctctcttgccaggccctgcatcgcccgcaaacaagtggaaatcgcccagcgggagggggccaagtatgtgtcccacggcgccacaggaaaggggaacgatcaggtccggtttgagctcagctgctactcactggccccccagataaaggtcattgctccctggaggatgcctgaattctacaaccggttcaagggccgcaatgacctgatggagtacgcaaagcaacacgggattcccatcccggtcactcccaagaacccgtggagcatggatgagaacctcatgcacatcagctacgaggctggaatcctggagaaccccaagaaccaagcgcctccaggtctctacacgaagacccaggacccagccaaagcccccaacacccctgacattctcgagatcgagttcaaaaaaggggtccctgtgaaggtgaccaacgtcaaggatggcaccacccaccagacctccttggagctcttcatgtacctgaacgaagtcgcgggcaagcatggcgtgggccgtattgacatcgtggagaaccgcttcattggaatgaagtcccgaggtatctacgagaccccagcaggcaccatcctttaccatgctcatttagacatcgaggccttcaccatggaccgggaagtgcgcaaaatcaaacaaggcctgggcttgaaatttgctgagctggtgtataccggtttctggcacagccctgagtgtgaatttgtccgccactgcatcgccaagtcccaggagcgagtggaagggaaagtgcaggtgtccgtcctcaagggccaggtgtacatcctcggccgggagtccccactgtctctctacaatgaggagctggtgagcatgaacgtgttgggcgataacatcactgatttatcgcccaacaccgaaatttttaatgcaggtttggtagtttaggacctgtgggtttgttaggtactgtttgcattaataaattaaagctccatagggtcttctcgtcttgctgtgttatgcccgcctcttcacgggcaggtcaatttcactggttaaaagtaagagacagctgaaccctcgtggagccattcatacaggtccctaattaaggaacaagtgattatgctacctttgcacggttagggtaccgcggccgttaaacatgtgtcactgggcaggcggtgcctctaatactggtgatgctagaggtgatgtttttggtaaacaggcggggtaagatttgccgagttccttttactttttttaacctttccttatgagcatgcccgtgttggggataaatacgggatcctt

SEQ ID NO: 309165 - DNA, 2196 bp, Homo sapiens
cgcctgcgcccccgccggcgcgcccctgggagggtgagccggcgccgggcccaggcccggacctggtgggaggcggggggaggtggggacgaggcctggggaggcgggccccgcccatctgcaggtggctgtgaacgctgagcggctccaggcgggggccgggcccgggggcggggtctgtggcgcgcgtccccgccacgtgtccccggtcaccggccctgcccccgggccctgtgcttataacctgggatgggcacccctgccagtcctgctctgccgcctgccaccgctgcccgagcccgacgctatgtccagcaaaggctccgtggttctggcctacagtggcggcctggacacctcgtgcatcctcgtgtggctgaaggaacaaggctatgacgtcattgcctatctggccaacattggccagaaggaagacttcgaggaagccaggaagaaggcactgaagcttggggccaaaaaggtgttcattgaggatgtcagcagggagtttgtggaggagttcatctggccggccatccagtccagcgcactgtatgaggaccgctacctcctgggcacctctcttgccaggccctgcatcgcccgcaaacaagtggaaatcgcccagcgggagggggccaagtatgtgtcccacggcgccacaggaaaggggaacgatcaggtccggtttgagctcagctgctactcactggccccccagataaaggtcattgctccctggaggatgcctgaattctacaaccggttcaagggccgcaatgacctgatggagtacgcaaagcaacacgggattcccatcccggtcactcccaagaacccgtggagcatggatgagaacctcatgcacatcagctacgaggctggaatcctggagaaccccaagaaccaagcgcctccaggtctctacacgaagacccaggacccagccaaagcccccaacacccctgacattctcgagatcgagttcaaaaaaggggtccctgtgaaggtgaccaacgtcaaggatggcaccacccaccagacctccttggagctcttcatgtacctgaacgaagtcgcgtgagtgtctgcagccctgtccggcctcttgggaaccgccgtctcgggcgagcacgagcctggaccgttgcagctaatggttgtggctgaggctcaggggggcaagcatggcgtgggccgtattgacatcgtggagaaccgcttcattggaatgaagtcccgaggtatctacgagaccccagcaggcaccatcctttaccatgctcatttagacatcgaggccttcaccatggaccgggaagtgcgcaaaatcaaacaaggcctgggcttgaaatttgctgagctggtgtataccggtttctggcacagccctgagtgtgaatttgtccgccactgcatcgccaagtcccaggagcgagtggaagggaaagtgcaggtgtccgtcctcaagggccaggtgtacatcctcggccgggagtccccactgtctctctacaatgaggagctggtgagcatgaacgtgcagggtgattatgagccaactgatgccaccgggttcatcaacatcaattccctcaggctgaaggaatatcatcgtctccagagcaaggtcactgccaaatagacccgtgtacaatgaggagctggggcctcctcaatttgcagatcccccaagtacaggcgctaattgttgtgataatttgtaattgtgacttgttctccccggctggcagcgtagtggggctgccaggccccagctttgttccctggtccccctgaagcctgcaaacgttgtcatcgaagggaagggtggggggcagctgcggtggggagctataaaaatgacaattaaaagagacactagtcttttatttctagtgagtgtgtgtgtgtgtgtgtgtgtgtgtgtgtgtgtgtgtgtgtgtgtagttaattatggttttcttaggccaacctttgtgttttcggacctaagtgctgccgaaggccgccatttgccagacagcctgttaatctggcagtcgacccctctccagcaaaaactaggaatccagaagtgccgcctgggtccgatcctagccagcatcctgggaatctgtcaccaactgtggtcctgtggcaaatgtcaggaaaccaaataaaattcagggaatgccctttgggggcatcaacgca

SEQ ID NO: 309166 - DNA, 1919 bp, Homo sapiens
cgcctgcgcccccgccggcgcgcccctgggagggtgagccggcgccgggcccaggcccggacctggtgggaggcggggggaggtggggacgaggcctggggaggcgggccccgcccatctgcaggtggctgtgaacgctgagcggctccaggcgggggccgggcccgggggcggggtctgtggcgcgcgtccccgccacgtgtccccggtcaccggccctgcccccgggccctgtgcttataacctgggatgggcacccctgccagtcctgctctgccgcctgccaccgctgcccgagcccgacgctatgtccagcaaaggctccgtggttctggcctacagtggcggcctggacacctcgtgcatcctcgtgtggctgaaggaacaaggctatgacgtcattgcctatctggccaacattggccagaaggaagacttcgaggaagccaggaagaaggcactgaagcttggggccaaaaaggtgttcattgaggatgtcagcagggagtttgtggaggagttcatctggccggccatccagtccagcgcactgtatgaggaccgctacctcctgggcacctctcttgccaggccctgcatcgcccgcaaacaagtggaaatcgcccagcgggagggggccaagtatgtgtcccacggcgccacaggaaaggggaacgatcaggtccggtttgagctcagctgctactcactggccccccagataaaggtcattgctccctggaggatgcctgaattctacaaccggttcaagggccgcaatgacctgatggagtacgcaaagcaacacgggattcccatcccggtcactcccaagaacccgtggagcatggatgagaacctcatgcacatcagctacgaggctggaatcctggagaaccccaagaaccaagcgcctccaggtctctacacgaagacccaggacccagccaaagcccccaacacccctgacattctcgagatcgagttcaaaaaaggggtccctgtgaaggtgaccaacgtcaaggatggcaccacccaccagacctccttggagctcttcatgtacctgaacgaagtcgcgggcaagcatggcgtgggccgtattgacatcgtggagaaccgcttcattggaatgaagtcccgaggtatctacgagaccccagcaggcaccatcctttaccatgctcatttagacatcgaggccttcaccatggaccgggaagtccactgtctctctacaatgaggagctggtgagcatgaacgtgcagggtgattatgagccaactgatgccaccgggttcatcaacatcaattccctcaggctgaaggaatatcatcgtctccagagcaaggtcactgccaaatagacccgtgtacaatgaggagctggggcctcctcaatttgcagatcccccaagtacaggcgctaattgttgtgataatttgtaattgtgacttgttctccccggctggcagcgtagtggggctgccaggccccagctttgttccctggtccccctgaagcctgcaaacgttgtcatcgaagggaagggtggggggcagctgcggtggggagctataaaaatgacaattaaaagagacactagtcttttatttctagtgagtgtgtgtgtgtgtgtgtgtgtgtgtgtgtgtgtgtgtgtgtgtgtagttaattatggttttcttaggccaacctttgtgttttcggacctaagtgctgccgaaggccgccatttgccagacagcctgttaatctggcagtcgacccctctccagcaaaaactaggaatccagaagtgccgcctgggtccgatcctagccagcatcctgggaatctgtcaccaactgtggtcctgtggcaaatgtcaggaaaccaaataaaattcagggaatgccctttgggggcatcaacgca

SEQ ID NO: 309167 - DNA, 1536 bp, Homo sapiens
cgcctgcgcccccgccggcgcgcccctgggagggtgagccggcgccgggcccaggcccggacctggtgggaggcggggggaggtggggacgaggcctggggaggcgggccccgcccatctgcaggtggctgtgaacgctgagcggctccaggcgggggccgggcccgggggcggggtctgtggcgcgcgtccccgccacgtgtccccggtcaccggccctgcccccgggccctgtgcttataacctgggatgggcacccctgccagtcctgctctgccgcctgccaccgctgcccgagcccgacgctatgtccagcaaaggctccgtggttctggcctacagtggcggcctggacacctcgtgcatcctcgtgtggctgaaggaacaaggctatgacgtcattgcctatctggccaacattggccagaaggaagacttcgaggaagccaggaagaaggcactgaagcttggggccaaaaaggtgttcattgaggatgtcagcagggagtttgtggaggagttcatctggccggccatccagtccagcgcactgtatgaggaccgctacctcctgggcacctctcttgccaggccctgcatcgcccgcaaacaagtggaaatcgcccagcgggagggggccaagtatgtgtcccacggcgccacaggaaaggggaacgatcaggtccggtttgagctcagctgctactcactggccccccagataaaggtcattgctccctggaggatgcctgaattctacaaccggttcaagggccgcaatgacctgatggagtacgcaaagcaacacgggattcccatcccggtcactcccaagaacccgtggagcatggatgagaacctcatgcacatcagctacgaggctggaatcctggagaaccccaagaaccaagcgcctccaggtctctacacgaagacccaggacccagccaaagcccccaacacccctgacattctcgagatcgagttcaaaaaaggggtccctgtgaaggtgaccaacgtcaaggatggcaccacccaccagacctccttggagctcttcatgtacctgaacgaagtcgcgggcaagcatggcgtgggccgtattgacatcgtggagaaccgcttcattggaatgaagtcccgaggtatctacgagaccccagcaggcaccatcctttaccatgctcatttagacatcgaggccttcaccatggaccgggaagtgcgcaaaatcaaacaaggcctgggcttgaaatttgctgagctggtgtataccgttctggcacagccctgagtgtgaaggctcgatgtcttcatgtacctgaacgaagtcgcgggcaagcatgggtggccgtattgactcgggggaacctgtttcgatcggaactgaaggtccctgaggtatctacgagaacgcgagaaggcacatcctttacccatgctcatgtagacatcgaggccttcaccatggaccggggaacgtgcgcaaaaatcagacaaggcttgggttcgaaattgcgtgagctggtgtatacc

SEQ ID NO: 309168 - DNA, 1578 bp, Homo sapiens
cgcctgcgcccccgccggcgcgcccctgggagggtgagccggcgccgggcccaggcccggacctggtgggaggcggggggaggtggggacgaggcctggggaggcgggccccgcccatctgcaggtggctgtgaacgctgagcggctccaggcgggggccgggcccgggggcggggtctgtggcgcgcgtccccgccacgtgtccccggtcaccggccctgcccccgggccctgtgcttataacctgggatgggcacccctgccagtcctgctctgccgcctgccaccgctgcccgagcccgacgctatgtccagcaaaggctccgtggttctggcctacagtggcggcctggacacctcgtgcatcctcgtgtggctgaaggaacaaggctatgacgtcattgcctatctggccaacattggccagaaggaagacttcgaggaagccaggaagaaggcactgaagcttggggccaaaaaggtgttcattgaggatgtcagcagggagtttgtggaggagttcatctggccggccatccagtccagcgcactgtatgaggaccgctacctcctgggcacctctcttgccaggccctgcatcgcccgcaaacaagtggaaatcgcccagcgggagggggccaagtatgtgtcccacggcgccacaggaaaggggaacgatcaggtccggtttgagctcagctgctactcactggccccccagataaaggtcattgctccctggaggatgcctgaattctacaaccggttcaagggccgcaatgacctgatggagtacgcaaagcaacacgggattcccatcccggtcactcccaagaacccgtggagcatggatgagaacctcatgcacatcagctacgaggctggaatcctggagaaccccaagaaccaagcgcctccaggtctctacacgaagacccaggacccagccaaagcccccaacacccctgacattctcgagatcgagttcaaaaaaggggtccctgtgaaggtgaccaacgtcaaggatggcaccacccaccagacctccttggagctcttcatgtacctgaacgaagtcgcgggcaagcatggcgtgggccgtattgacatcgtggagaaccgcttcattggaatgaagtcccgaggtatctacgagaccccagcaggcaccatcctttaccatgctcatttagacatcgaggccttcaccatggaccgggaagtccactgtctctctacaatgaggagctggtgagcatgaacgtgcagggtgattatgagccaactgatgccaccgggttcatcaacatcaattccctcaggctgaaggaatatcatcgtctccagagcaaggtcactgccaaatagacccgtgtacaatgaggagctggggcctcctcaatttgcagatcccccaagtacaggcgctaattgttgtgataatttgtaattgtgacttgtcatttttatagctccccaccgcagctgccccccacccttcccttcgatgacaacgtttgcaggcttcagggggaccagggaacaaatgctggcctggcagcccccactacgctgcca

SEQ ID NO: 309169 - DNA, 1247 bp, Homo sapiens
cgcctgcgcccccgccggcgcgcccctgggagggtgagccggcgccgggcccaggcccggacctggtgggaggcggggggaggtggggacgaggcctggggaggcgggccccgcccatctgcaggtggctgtgaacgctgagcggctccaggcgggggccgggcccgggggcggggtctgtggcgcgcgtccccgccacgtgtccccggtcaccggccctgcccccgggccctgtgcttataacctgggatgggcacccctgccagtcctgctctgccgcctgccaccgctgcccgagcccgacgctatgtccagcaaaggctccgtggttctggcctacagtggcggcctggacacctcgtgcatcctcgtgtggctgaaggaacaaggctatgacgtcattgcctatctggccaacattggccagaaggaagacttcgaggaagccaggaagaaggcactgaagcttggggccaaaaaggtgttcattgaggatgtcagcagggagtttgtggaggagttcatctggccggccatccagtccagcgcactgtatgaggaccgctacctcctgggcacctctcttgccaggccctgcatcgcccgcaaacaagtggaaatcgcccagcgggagggggccaagtatgtgtcccacggcgccacaggaaaggggaacgatcaggtccggtttgagctcagctgctactcactggccccccagataaaggtcattgctccctggaggatgcctgaattctacaaccggttcaagggccgcaatgacctgatggagtacgcaaagcaacacgggattcccatcccggtcactcccaagaacccgtggagcatggatgagaacctcatgcacatcagctacgaggctggaatcctggagaaccccaagaaccaagcgcctccaggtctctacacgaagacccaggacccagccaaagcccccaacacccctgacattctcgagatcgagttcaaaaaaggggtccctgtgaaggtgaccaacgtcaaggatggcaccacccaccagacctccttggagctcttcatgtacctgaacgaagtcgcgggcaagcatggcgtgggccgtattgacatcgtggagaaccgcttcattggaatgaagtcccgaggtatctacgagaccccagcaggcaccatcctttaccatggtcatcgaagggaagggtggggggcagctgcggtggggagctataaaaatgacaattaaaaga

SEQ ID NO: 309170 - DNA, 1763 bp, Homo sapiens
tcctcgactcccgccagaacgctatgtccagcaaaggctccgtggttctggcctacagtggcggcctggacacctcgtgcatcctcgtgtggctgaaggaacaaggctatgacgtcattgcctatctggccaacattggccagaaggaagacttcgaggaagccaggaagaaggcactgaagcttggggccaaaaagggccatccagtccagcgcactgtatgaggaccgctacctcctgggcacctctcttgccaggccctgcatcgcccgcaaacaagtggaaatcgcccagcgggagggggccaagtatgtgtcccacggcgccacaggaaaggggaacgatcaggtccggtttgagctcagctgctactcactggccccccagataaaggtcattgctccctggaggatgcctgaattctacaaccggttcaagggccgcaatgacctgatggagtacgcaaagcaacacgggattcccatcccggtcactcccaagaacccgtggagcatggatgagaacctcatgcacatcagctacgaggctggaatcctggagaaccccaagaaccaagcgcctccaggtctctacacgaagacccaggacccagccaaagcccccaacacccctgacattctcgagatcgagttcaaaaaaggggtccctgtgaaggtgaccaacgtcaaggatggcaccacccaccagacctccttggagctcttcatgtacctgaacgaagtcgcgggcaagcatggcgtgggccgtattgacatcgtggagaaccgcttcattggaatgaagtcccgaggtatctacgagaccccagcaggcaccatcctttaccatgctcatttagacatcgaggccttcaccatggaccgggaagtgcgcaaaatcaaacaaggcctgggcttgaaatttgctgagctggtgtataccggtttctggcacagccctgagtgtgaatttgtccgccactgcatcgccaagtcccaggagcgagtggaagggaaagtgcaggtgtccgtcctcaagggccaggtgtacatcctcggccgggagtccccactgtctctctacaatgaggagctggtgagcatgaacgtgcagggtgattatgagccaactgatgccaccgggttcatcaacatcaattccctcaggctgaaggaatatcatcgtctccagagcaaggtcactgccaaatagacccgtgtacaatgaggagctggggcctcctcaatttgcagatcccccaagtacaggcgctaattgttgtgataatttgtaattgtgacttgttctccccggctggcagcgtagtggggctgccaggccccagctttgttccctggtccccctgaagcctgcaaacgttgtcatcgaagggaagggtggggggcagctgcggtggggagctataaaaatgacaattaaaagagacactagtcttttatttctagtgagtgtgtgtgtgtgtgtgtgtgtgtgtgtgtgtgtgtgtgtgtgtgtagttaattatggttttcttaggccaacctttgtgttttcggacctaagtgctgccgaaggccgccatttgccagacagcctgttaatctggcagtcgacccctctccagcaaaaactaggaatccagaagtgccgcctgggtccgatcctagccagcatcctgggaatctgtcaccaactgtggtcctgtggcaaatgtcaggaaaccaaataaaattcagggaatgccctttgggggcatcaacgca

SEQ ID NO: 309171 - DNA, 2048 bp, Homo sapiens
cgcctgcgcccccgccggcgcgcccctgggagggtgagccggcgccgggcccaggcccggacctggtgggaggcggggggaggtggggacgaggcctggggaggcgggccccgcccatctgcaggtggctgtgaacgctgagcggctccaggcgggggccgggcccgggggcggggtctgtggcgcgcgtccccgccacgtgtccccggtcaccggccctgcccccgggccctgtgcttataacctgggatgggcacccctgccagtcctgctctgccgcctgccaccgctgcccgagcccgacgctatgtccagcaaaggctccgtggttctggcctacagtggcggcctggacacctcgtgcatcctcgtgtggctgaaggaacaaggctatgacgtcattgcctatctggccaacattggccagaaggaagacttcgaggaagccaggaagaaggcactgaagcttggggccaaaaaggtgttcattgaggatgtcagcagggagtttgtggaggagttcatctggccggccatccagtccagcgcactgtatgaggaccgctacctcctgggcacctctcttgccaggccctgcatcgcccgcaaacaagtggaaatcgcccagcgggagggggccaagtatgtgtcccacggcgccacaggaaaggggaacgatcaggtccggtttgagctcagctgctactcactggccccccagataaaggtcattgctccctggaggatgcctgaattctacaaccggttcaagggccgcaatgacctgatggagtacgcaaagcaacacgggattcccatcccggtcactcccaagaacccgtggagcatggatgagaacctcatgcacatcagctacgaggctggaatcctggagaaccccaagaaccaagcgcctccaggtctctacacgaagacccaggacccagccaaagcccccaacacccctgacattctcgagatcgagttcaaaaaagctccttggagctcttcatgtacctgaacgaagtcgcgggcaagcatggcgtgggccgtattgacatcgtggagaaccgcttcattggaatgaagtcccgaggtatctacgagaccccagcaggcaccatcctttaccatgctcatttagacatcgaggccttcaccatggaccgggaagtgcgcaaaatcaaacaaggcctgggcttgaaatttgctgagctggtgtataccggtttctggcacagccctgagtgtgaatttgtccgccactgcatcgccaagtcccaggagcgagtggaagggaaagtgcaggtgtccgtcctcaagggccaggtgtacatcctcggccgggagtccccactgtctctctacaatgaggagctggtgagcatgaacgtgcagggtgattatgagccaactgatgccaccgggttcatcaacatcaattccctcaggctgaaggaatatcatcgtctccagagcaaggtcactgccaaatagacccgtgtacaatgaggagctggggcctcctcaatttgcagatcccccaagtacaggcgctaattgttgtgataatttgtaattgtgacttgttctccccggctggcagcgtagtggggctgccaggccccagctttgttccctggtccccctgaagcctgcaaacgttgtcatcgaagggaagggtggggggcagctgcggtggggagctataaaaatgacaattaaaagagacactagtcttttatttctagtgagtgtgtgtgtgtgtgtgtgtgtgtgtgtgtgtgtgtgtgtgtgtgtagttaattatggttttcttaggccaacctttgtgttttcggacctaagtgctgccgaaggccgccatttgccagacagcctgttaatctggcagtcgacccctctccagcaaaaactaggaatccagaagtgccgcctgggtccgatcctagccagcatcctgggaatctgtcaccaactgtggtcctgtggcaaatgtcaggaaaccaaataaaattcagggaatgccctttgggggcatcaacgca

SEQ ID NO: 309172 - DNA, 2127 bp, Homo sapiens
cgcctgcgcccccgccggcgcgcccctgggagggtgagccggcgccgggcccaggcccggacctggtgggaggcggggggaggtggggacgaggcctggggaggcgggccccgcccatctgcaggtggctgtgaacgctgagcggctccaggcgggggccgggcccgggggcggggtctgtggcgcgcgtccccgccacgtgtccccggtcaccggccctgcccccgggccctgtgcttataacctgggatgggcacccctgccagtcctgctctgccgcctgccaccgctgcccgagcccgacgctatgtccagcaaaggctccgtggttctggcctacagtggcggcctggacacctcgtgcatcctcgtgtggctgaaggaacaaggctatgacgtcattgcctatctggccaacattggccagaaggaagacttcgaggaagccaggaagaaggcactgaagcttggggccaaaaaggtgttcattgaggatgtcagcagggagtttgtggaggagttcatctggccggccatccagtccagcgcactgtatgaggaccgctacctcctgggcacctctcttgccaggccctgcatcgcccgcaaacaagtggaaatcgcccagcgggagggggccaagtatgtgtcccacggcgccacaggaaaggggaacgatcaggtccggtttgagctcagctgctactcactggccccccagataaaggtcattgctccctggaggatgcctgaattctacaaccggttcaagggccgcaatgacctgatggagtacgcaaagcaacacgggattcccatcccggtcactcccaagaacccgtggagcatggatgagaacctcatgcacatcagctgaccctgtctttcctttcccctccgcagctacgaggctggaatcctggagaaccccaagaaccaagcgcctccaggtctctacacgaagacccaggacccagccaaagcccccaacacccctgacattctcgagatcgagttcaaaaaaggggtccctgtgaaggtgaccaacgtcaaggatggcaccacccaccagacctccttggagctcttcatgtacctgaacgaagtcgcgggcaagcatggcgtgggccgtattgacatcgtggagaaccgcttcattggaatgaagtcccgaggtatctacgagaccccagcaggcaccatcctttaccatgctcatttagacatcgaggccttcaccatggaccgggaagtgcgcaaaatcaaacaaggcctgggcttgaaatttgctgagctggtgtataccggtttctggcacagccctgagtgtgaatttgtccgccactgcatcgccaagtcccaggagcgagtggaagggaaagtgcaggtgtccgtcctcaagggccaggtgtacatcctcggccgggagtccccactgtctctctacaatgaggagctggtgagcatgaacgtgcagggtgattatgagccaactgatgccaccgggttcatcaacatcaattccctcaggctgaaggaatatcatcgtctccagagcaaggtcactgccaaatagacccgtgtacaatgaggagctggggcctcctcaatttgcagatcccccaagtacaggcgctaattgttgtgataatttgtaattgtgacttgttctccccggctggcagcgtagtggggctgccaggccccagctttgttccctggtccccctgaagcctgcaaacgttgtcatcgaagggaagggtggggggcagctgcggtggggagctataaaaatgacaattaaaagagacactagtcttttatttctagtgagtgtgtgtgtgtgtgtgtgtgtgtgtgtgtgtgtgtgtgtgtgtgtagttaattatggttttcttaggccaacctttgtgttttcggacctaagtgctgccgaaggccgccatttgccagacagcctgttaatctggcagtcgacccctctccagcaaaaactaggaatccagaagtgccgcctgggtccgatcctagccagcatcctgggaatctgtcaccaactgtggtcctgtggcaaatgtcaggaaaccaaataaaattcagggaatgccctttgggggcatcaacgca

SEQ ID NO: 309173 - DNA, 1560 bp, Homo sapiens
ggcgagagcgtgcgtgccgctcctgggaagccctcggaacgccgccttgctcctccaaagtcacactttttcctgcctgacttgttcctctccagctattctacctccagctgtgggggcgtcgaagaaaaagatgagatcaagttgaggggaaaaattgtctgatttctccagccctttgtttcccaggcctctggcaagcgaggctggtgctaggctgagggctggggaccgggggatctgccggaccccaccagctggtggggaaatggacagaggagaggggtgcagatccccgcgggaggtgggctgtagggtgtccagggactggtatgtcatctgcccaccactttctgtcttttttcagaaccaagcgcctccaggtctctacacgaagacccaggacccagccaaagcccccaacacccctgacattctcgagatcgagttcaaaaaaggggtccctgtgaaggtgaccaacgtcaaggatggcaccacccaccagacctccttggagctcttcatgtacctgaacgaagtcgcgggcaagcatggcgtgggccgtattgacatcgtggagaaccgcttcattggaatgaagtcccgaggtatctacgagaccccagcaggcaccatcctttaccatgctcatttagacatcgaggccttcaccatggaccgggaagtgcgcaaaatcaaacaaggcctgggcttgaaatttgctgagctggtgtataccggtttctggcacagccctgagtgtgaatttgtccgccactgcatcgccaagtcccaggagcgagtggaagggaaagtgcaggtgtccgtcctcaagggccaggtgtacatcctcggccgggagtccccactgtctctctacaatgaggagctggtgagcatgaacgtgcagggtgattatgagccaactgatgccaccgggttcatcaacatcaattccctcaggctgaaggaatatcatcgtctccagagcaaggtcactgccaaatagacccgtgtacaatgaggagctggggcctcctcaatttgcagatcccccaagtacaggcgctaattgttgtgataatttgtaattgtgacttgttctccccggctggcagcgtagtggggctgccaggccccagctttgttccctggtccccctgaagcctgcaaacgttgtcatcgaagggaagggtggggggcagctgcggtggggagctataaaaatgacaattaaaagagacactagtcttttatttctagtgagtgtgtgtgtgtgtgtgtgtgtgtgtgtgtgtgtgtgtgtgtgtgtagttaattatggttttcttaggccaacctttgtgttttcggacctaagtgctgccgaaggccgccatttgccagacagcctgttaatctggcagtcgacccctctccagcaaaaactaggaatccagaagtgccgcctgggtccgatcctagccagcatcctgggaatctgtcaccaactgtggtcctgtggcaaatgtcaggaaaccaaataaaattcagggaatgccctttgggggcatcaacgca

SEQ ID NO: 309174 - DNA, 1277 bp, Homo sapiens
  misc_feature (1141)..(1141): n is a, c, g, or t
  misc_feature (1166)..(1166): n is a, c, g, or t
  misc_feature (1182)..(1182): n is a, c, g, or t
  misc_feature (1193)..(1193): n is a, c, g, or t
  misc_feature (1220)..(1222): n is a, c, g, or t
  misc_feature (1239)..(1239): n is a, c, g, or t
cgcctgcgcccccgccggcgcgcccctgggagggtgagccggcgccgggcccaggcccggacctggtgggaggcggggggaggtggggacgaggcctggggaggcgggccccgcccatctgcaggtggctgtgaacgctgagcggctccaggcgggggccgggcccgggggcggggtctgtggcgcgcgtccccgccacgtgtccccggtcaccggccctgcccccgggccctgtgcttataacctgggatgggcacccctgccagtcctgctctgccgcctgccaccgctgcccgagcccgacgctatgtccagcaaaggctccgtggttctggcctacagtggcggcctggacacctcgtgcatcctcgtgtggctgaaggaacaaggctatgacgtcattgcctatctggccaacattggccagaaggaagacttcgaggaagccaggaagaaggcactgaagcttggggccaaaaaggtgttcattgaggatgtcagcagggagtttgtggaggagttcatctggccggccatccagtccagcgcactgtatgaggaccgctacctcctgggcacctctcttgccaggccctgcatcgcccgcaaacaagtggaaatcgcccagcgggagggggccaagtatgtgtcccacggcgccacaggaaaggggaacgatcaggtccggtttgagctcagctgctactcactggccccccagataaaggtcattgctccctggaggatgcctgaattctacaaccggttcaagggccgcaatgacctgatggagtacgcaaagcaacacgggattcccatcccggtcactcccaagaacccgtggagcatggatgagaacctcatgcacatcagctacgaggctggaatcctggagaaccccaagaaccaagcgcctccaggtctctacacgaagacccaggacccagccaaagcccccaacacccctgacattctcgagatcgagttcaaaaaaggggtccctgtgaaggtgaccaacgtcaaggatggcaccacccaccagacctccttggagctcttcatgtacctgaacgaagtcgcgggcaagcatgggtggccgtattgactcgggggaacgtccattggatgagtccggggtttntcgagacccgggccttcttaccggncttggatgggctccanggcggggggcnacacagcggggaatgggcggttggttnnnccctgttttccgtcccncgggggggggtcagggaccggccccagggggggggcgc

SEQ ID NO: 309175 - DNA, 1453 bp, Homo sapiens
ggcgagagcgtgcgtgccgctcctgggaagccctcggaacgccgccttgctcctccaaagtcacactttttcctgcctgacttgttcctctccagctattctacctccagctgtgggggcgtcgaagaaaaagatgagatcaagttgaggggaaaaattgtctgatttctccagccctttgtttcccaggcctctggcaagcgaggctggtgctaggctgagggctggggaccgggggatctgccggaccccaccagctgaaccaagcgcctccaggtctctacacgaagacccaggacccagccaaagcccccaacacccctgacattctcgagatcgagttcaaaaaaggggtccctgtgaaggtgaccaacgtcaaggatggcaccacccaccagacctccttggagctcttcatgtacctgaacgaagtcgcgggcaagcatggcgtgggccgtattgacatcgtggagaaccgcttcattggaatgaagtcccgaggtatctacgagaccccagcaggcaccatcctttaccatgctcatttagacatcgaggccttcaccatggaccgggaagtgcgcaaaatcaaacaaggcctgggcttgaaatttgctgagctggtgtataccggtttctggcacagccctgagtgtgaatttgtccgccactgcatcgccaagtcccaggagcgagtggaagggaaagtgcaggtgtccgtcctcaagggccaggtgtacatcctcggccgggagtccccactgtctctctacaatgaggagctggtgagcatgaacgtgcagggtgattatgagccaactgatgccaccgggttcatcaacatcaattccctcaggctgaaggaatatcatcgtctccagagcaaggtcactgccaaatagacccgtgtacaatgaggagctggggcctcctcaatttgcagatcccccaagtacaggcgctaattgttgtgataatttgtaattgtgacttgttctccccggctggcagcgtagtggggctgccaggccccagctttgttccctggtccccctgaagcctgcaaacgttgtcatcgaagggaagggtggggggcagctgcggtggggagctataaaaatgacaattaaaagagacactagtcttttatttctagtgagtgtgtgtgtgtgtgtgtgtgtgtgtgtgtgtgtgtgtgtgtgtgtagttaattatggttttcttaggccaacctttgtgttttcggacctaagtgctgccgaaggccgccatttgccagacagcctgttaatctggcagtcgacccctctccagcaaaaactaggaatccagaagtgccgcctgggtccgatcctagccagcatcctgggaatctgtcaccaactgtggtcctgtggcaaatgtcaggaaaccaaataaaattcagggaatgccctttgggggcatcaacgca

SEQ ID NO: 309176 - DNA, 1234 bp, Homo sapiens
  misc_feature (1094)..(1094): n is a, c, g, or t
  misc_feature (1097)..(1097): n is a, c, g, or t
  misc_feature (1099)..(1099): n is a, c, g, or t
  misc_feature (1102)..(1102): n is a, c, g, or t
  misc_feature (1114)..(1114): n is a, c, g, or t
  misc_feature (1127)..(1128): n is a, c, g, or t
  misc_feature (1130)..(1131): n is a, c, g, or t
  misc_feature (1133)..(1133): n is a, c, g, or t
  misc_feature (1136)..(1136): n is a, c, g, or t
  misc_feature (1156)..(1156): n is a, c, g, or t
  misc_feature (1169)..(1169): n is a, c, g, or t
cgcctgcgcccccgccggcgcgcccctgggagggtgagccggcgccgggcccaggcccggacctggtgggaggcggggggaggtggggacgaggcctggggaggcgggccccgcccatctgcaggtggctgtgaacgctgagcggctccaggcgggggccgggcccgggggcggggtctgtggcgcgcgtccccgccacgtgtccccggtcaccggccctgcccccgggccctgtgcttataacctgggatgggcacccctgccagtcctgctctgccgcctgccaccgctgcccgagcccgacgctatgtccagcaaaggctccgtggttctggcctacagtggcggcctggacacctcgtgcatcctcgtgtggctgaaggaacaaggctatgacgtcattgcctatctggccaacattggccagaaggaagacttcgaggaagccaggaagaaggcactgaagcttggggccaaaaaggtgttcattgaggatgtcagcagggagtttgtggaggagttcatctggccggccatccagtccagcgcactgtatgaggaccgctacctcctgggcacctctcttgccaggccctgcatcgcccgcaaacaagtggaaatcgcccagcgggagggggccaagtatgtgtcccacggcgccacaggaaaggggaacgatcaggtccggtttgagctcagctgctactcactggccccccagataaaggtcattgctccctggaggatgcctgaattctacaaccggttcaagggccgcaatgacctgatggagtacgcaaagcaacacgggattcccatcccggtcactcccaagaacccgtggagcatggatgagaacctcatgcacatcagctacgaggctggaatcctggagaaccccaagaaccaagcgcctccaggtctctacacgaagacccaggacccagccaaagcccccaacacccctgacattctcgagatcgagttcaaaaaaggggtccctgtgaaggtgaccaacgtcaaggatggcaccacccaccagacctccttggagctcttcatgtacctgaacgaagtcgcggcaagctgggggncgntngantcggggaaccgntctggatgagccnngnntnganaccagaggcaccttcaggcntgaagggtacagncggggggacaaaaggggggatggggggtcggtgggcgtggtgcgcgtctcagggggggggcaggc

SEQ ID NO: 309177 - DNA, 1139 bp, Homo sapiens
gggcccagaggcccactgccctctcttcccaccctaggggtccctgtgaaggtgaccaacgtcaaggatggcaccacccaccagacctccttggagctcttcatgtacctgaacgaagtcgcgggcaagcatggcgtgggccgtattgacatcgtggagaaccgcttcattggaatgaagtcccgaggtatctacgagaccccagcaggcaccatcctttaccatgctcatttagacatcgaggccttcaccatggaccgggaagtgcgcaaaatcaaacaaggcctgggcttgaaatttgctgagctggtgtataccggtttctggcacagccctgagtgtgaatttgtccgccactgcatcgccaagtcccaggagcgagtggaagggaaagtgcaggtgtccgtcctcaagggccaggtgtacatcctcggccgggagtccccactgtctctctacaatgaggagctggtgagcatgaacgtgcagggtgattatgagccaactgatgccaccgggttcatcaacatcaattccctcaggctgaaggaatatcatcgtctccagagcaaggtcactgccaaatagacccgtgtacaatgaggagctggggcctcctcaatttgcagatcccccaagtacaggcgctaattgttgtgataatttgtaattgtgacttgttctccccggctggcagcgtagtggggctgccaggccccagctttgttccctggtccccctgaagcctgcaaacgttgtcatcgaagggaagggtggggggcagctgcggtggggagctataaaaatgacaattaaaagagacactagtcttttatttctagtgagtgtgtgtgtgtgtgtgtgtgtgtgtgtgtgtgtgtgtgtgtgtgtagttaattatggttttcttaggccaacctttgtgttttcggacctaagtgctgccgaaggccgccatttgccagacagcctgttaatctggcagtcgacccctctccagcaaaaactaggaatccagaagtgccgcctgggtccgatcctagccagcatcctgggaatctgtcaccaactgtggtcctgtggcaaatgtcaggaaaccaaataaaattcagggaatgccctttgggggcatcaacgca

SEQ ID NO: 309178 - DNA, 1123 bp, Homo sapiens
gggacagaaggtgctcccggcgggtccctgtgaaggtgaccaacgtcaaggatggcaccacccaccagacctccttggagctcttcatgtacctgaacgaagtcgcgggcaagcatggcgtgggccgtattgacatcgtggagaaccgcttcattggaatgaagtcccgaggtatctacgagaccccagcaggcaccatcctttaccatgctcatttagacatcgaggccttcaccatggaccgggaagtgcgcaaaatcaaacaaggcctgggcttgaaatttgctgagctggtgtataccggtttctggcacagccctgagtgtgaatttgtccgccactgcatcgccaagtcccaggagcgagtggaagggaaagtgcaggtgtccgtcctcaagggccaggtgtacatcctcggccgggagtccccactgtctctctacaatgaggagctggtgagcatgaacgtgcagggtgattatgagccaactgatgccaccgggttcatcaacatcaattccctcaggctgaaggaatatcatcgtctccagagcaaggtcactgccaaatagacccgtgtacaatgaggagctggggcctcctcaatttgcagatcccccaagtacaggcgctaattgttgtgataatttgtaattgtgacttgttctccccggctggcagcgtagtggggctgccaggccccagctttgttccctggtccccctgaagcctgcaaacgttgtcatcgaagggaagggtggggggcagctgcggtggggagctataaaaatgacaattaaaagagacactagtcttttatttctagtgagtgtgtgtgtgtgtgtgtgtgtgtgtgtgtgtgtgtgtgtgtgtgtagttaattatggttttcttaggccaacctttgtgttttcggacctaagtgctgccgaaggccgccatttgccagacagcctgttaatctggcagtcgacccctctccagcaaaaactaggaatccagaagtgccgcctgggtccgatcctagccagcatcctgggaatctgtcaccaactgtggtcctgtggcaaatgtcaggaaaccaaataaaattcagggaatgccctttgggggcatcaacgca

SEQ ID NO: 309179 - DNA, 1572 bp, Homo sapiens
cccccttctcaccccaacacaccaccattctgccatggagtgcaggctccgtccagccagccccggtgagggagtctgtgtccttcccctccttcatggggctccctctcaccctcacaacagcatcctctctggggacatgctggagacccccatgggcccctcccaggagaggccagctctgcagcttacaggccaggggaagcccacagctcggccctcccggctctgaccccttgtcctatgtccaggtcattgctccctggaggatgcctgaattctacaaccggttcaagggccgcaatgacctgatggagtacgcaaagcaacacgggattcccatcccggtcactcccaagaacccgtggagcatggatgagaacctcatgcacatcagctacgaggctggaatcctggagaaccccaagaaccaagcgcctccaggtctctacacgaagacccaggacccagccaaagcccccaacacccctgacattctcgagatcgagttcaaaaaagctccttggagctcttcatgtacctgaacgaagtcgcgggcaagcatggcgtgggccgtattgacatcgtggagaaccgcttcattggaatgaagtcccgaggtatctacgagaccccagcaggcaccatcctttaccatgctcatttagacatcgaggccttcaccatggaccgggaagtgcgcaaaatcaaacaaggcctgggcttgaaatttgctgagctggtgtataccggtttctggcacagccctgagtgtgaatttgtccgccactgcatcgccaagtcccaggagcgagtggaagggaaagtgcaggtgtccgtcctcaagggccaggtgtacatcctcggccgggagtccccactgtctctctacaatgaggagctggtgagcatgaacgtgcagggtgattatgagccaactgatgccaccgggttcatcaacatcaattccctcaggctgaaggaatatcatcgtctccagagcaaggtcactgccaaatagacccgtgtacaatgaggagctggggcctcctcaatttgcagatcccccaagtacaggcgctaattgttgtgataatttgtaattgtgacttgttctccccggctggcagcgtagtggggctgccaggccccagctttgttccctggtccccctgaagcctgcaaacgttgtcatcgaagggaagggtggggggcagctgcggtggggagctataaaaatgacaattaaaagagacactagtcttttatttctagtgagtgtgtgtgtgtgtgtgtgtgtgtgtgtgtgtgtgtgtgtgtgtgtagttaattatggttttcttaggccaacctttgtgttttcggacctaagtgctgccgaaggccgccatttgccagacagcctgttaatctggcagtcgacccctctccagcaaaaactaggaatccagaagtgccgcctgggtccgatcctagccagcatcctgggaatctgtcaccaactgtggtcctgtggcaaatgtcaggaaaccaaataaaattcagggaatgccctttgggggcatcaacgca

SEQ ID NO: 309180 - DNA, 1039 bp, Homo sapiens
aatggaccagttcttcccacaggggcaagcatggcgtgggccgtattgacatcgtggagaaccgcttcattggaatgaagtcccgaggtatctacgagaccccagcaggcaccatcctttaccatgctcatttagacatcgaggccttcaccatggaccgggaagtgcgcaaaatcaaacaaggcctgggcttgaaatttgctgagctggtgtataccggtttctggcacagccctgagtgtgaatttgtccgccactgcatcgccaagtcccaggagcgagtggaagggaaagtgcaggtgtccgtcctcaagggccaggtgtacatcctcggccgggagtccccactgtctctctacaatgaggagctggtgagcatgaacgtgcagggtgattatgagccaactgatgccaccgggttcatcaacatcaattccctcaggctgaaggaatatcatcgtctccagagcaaggtcactgccaaatagacccgtgtacaatgaggagctggggcctcctcaatttgcagatcccccaagtacaggcgctaattgttgtgataatttgtaattgtgacttgttctccccggctggcagcgtagtggggctgccaggccccagctttgttccctggtccccctgaagcctgcaaacgttgtcatcgaagggaagggtggggggcagctgcggtggggagctataaaaatgacaattaaaagagacactagtcttttatttctagtgagtgtgtgtgtgtgtgtgtgtgtgtgtgtgtgtgtgtgtgtgtgtgtagttaattatggttttcttaggccaacctttgtgttttcggacctaagtgctgccgaaggccgccatttgccagacagcctgttaatctggcagtcgacccctctccagcaaaaactaggaatccagaagtgccgcctgggtccgatcctagccagcatcctgggaatctgtcaccaactgtggtcctgtggcaaatgtcaggaaaccaaataaaattcagggaatgccctttgggggcatcaacgca

SEQ ID NO: 309181 - DNA, 1158 bp, Homo sapiens
cgcctgcgcccccgccggcgcgcccctgggagggtgagccggcgccgggcccaggcccggacctggtgggaggcggggggaggtggggacgaggcctggggaggcgggccccgcccatctgcaggtggctgtgaacgctgagcggctccaggcgggggccgggcccgggggcggggtctgtggcgcgcgtccccgccacgtgtccccggtcaccggccctgcccccgggccctgtgcttataacctgggatgggcacccctgccagtcctgctctgccgcctgccaccgctgcccgagcccgacgctatgtccagcaaaggctccgtggttctggcctacagtggcggcctggacacctcgtgcatcctcgtgtggctgaaggaacaaggctatgacgtcattgcctatctggccaacattggccagaaggaagacttcgaggaagccaggaagaaggcactgaagcttggggccaaaaaggtgttcattgaggatgtcagcagggagtttgtggaggagttcatctggccggccatccagtccagcgcactgtatgaggaccgctacctcctgggcacctctcttgccaggccctgcatcgcccgcaaacaagtggaaatcgcccagcgggagggggccaagtatgtgtcccacggcgccacaggaaaggggaacgatcaggtccggtttgagctcagctgctactcactggccccccagataaaggtcattgctccctggaggatgcctgaattctacaaccggttcaagggccgcaatgacctgatggagtacgcaaagcaacacgggattcccatcccggtcactcccaagaacccgtggagcatggatgagaacctcatgcacatcagctacgaggctggaatcctggagaaccccaagaaccaagcgcctccaggtctctacacgaagacccaggacccagccaaagcccccaacacccctgacattctcgagatcgagttcaaaaaagcctgtgaggggccacgtcaggtggacaccacagactctgaggctctgtctgagagtcggcacatggtggcgtgatcgggaacgtctggaagccggtttaacccggcctttgctatgggcgggggaaaaagggtggtccggtttccacccaagggccttttctg

SEQ ID NO: 309182 - DNA, 1456 bp, Homo sapiens
cgcctgcgcccccgccggcgcgcccctgggagggtgagccggcgccgggcccaggcccggacctggtgggaggcggggggaggtggggacgaggcctggggaggcgggccccgcccatctgcaggtggctgtgaacgctgagcggctccaggcgggggccgggcccgggggcggggtctgtggcgcgcgtccccgccacgtgtccccggtcaccggccctgcccccgggccctgtgcttataacctgggatgggcacccctgccagtcctgctctgccgcctgccaccgctgcccgagcccgacgctatgtccagcaaaggctccgtggttctggcctacagtggcggcctggacacctcgtgcatcctcgtgtggctgaaggaacaaggctatgacgtcattgcctatctggccaacattggccagaaggaagacttcgaggaagccaggaagaaggcactgaagcttggggccaaaaaggtgttcattgaggatgtcagcagggagtttgtggaggagttcatctggccggccatccagtccagcgcactgtatgaggaccgctacctcctgggcacctctcttgccaggccctgcatcgcccgcaaacaagtggaaatcgcccagcgggagggggccaagtatgtgtcccacggcgccacaggaaaggggaacgatcaggtccggtttgagctcagctgctactcactggccccccagataaaggtcattgctccctggaggatgcctgaattctacaaccggttcaagggccgcaatgacctgatggagtacgcaaagcaacacgggattcccatcccggtcactcccaagaacccgtggagcatggatgagaacctcatgcacatcagctacgaggctggaatcctggagaaccccaagaaccaagcgcctccaggtctctacacgaagacccaggacccagccaaagcccccaacacccctgacattctcgagatcgagttcaaaaaagggtatgtgcccacctgttgggactcgaagggggttgacttttggggccctggctcctttcccctccctgcctgggaacctaggccctctttacccccgccctgcattcctggaagctagagttcaggcaggggcttcaaggtaacgcacagcccacctccctggacagtacaacccatggaccatggatgcctctaggcttgggaggaacatgccctcggctacccatcactcgggttcatgggcaccaggtctggaatgagagcgctctagtccctgaacagccactcaactttcctgggcctcagtttcctcagctgtatctgaggatgaaagagtgcctgctgttttcctggggtagaatgaggcctgcaagggagcgtccagccctgggccctgaccccggaaggtgctcagtaaacggtgagtgttggcgagctggcctcatggacccctgggacc

SEQ ID NO: 309183 - DNA, 1047 bp, Homo sapiens
  misc_feature (1)..(1): n is a, c, g, or t
ngtccctgtgaaggtcgaccaacgtcaaggatggcaccacccaccagacctccttggagctcttcatgtaggccatccagtccagcgcactgtatgaggaccgctacctcctgggcacctctcttgccaggccctgcatcgcccgcaaacaagtggaaatcgcccagcgggagggggccaagtatgtgtcccacggcgccacaggaaaggggaacgatcaggtccggtttgagctcagctgctactcactggccccccagataaaggtcattgctccctggaggatgcctgaattctacaaccggttcaagggccgcaatgacctgatggagtacgcaaagcaacacgggattcccatcccggtcactcccaagaacccgtggacatgaacgtgcagggtgattatgagccaactgatgccaccgggttcatcaacatcaattccctcaggctgaaggaatatcatcgtctccagagcaaggtcactgccaaatagacccgtgtacaatgaggagctggggcctcctcaatttgcagatcccccaagtacaggcgctaattgttgtgataatttgtaattgtgacttgttctccccggctggcagcgtagtggggctgccaggccccagctttgttccctggtccccctgaagcctgcaaacgttgtcatcgaagggaagggtggggggcagctgcggtggggagctataaaaatgacaattaaaagagacactagtcttttatttctagtgagtgtgtgtgtgtgtgtgtgtgtgtgtgtgtgtgtgtgtgtgtgtgtagttaattatggttttcttaggccaacctttgtgttttcggacctaagtgctgccgaaggccgccatttgccagacagcctgttaatctggcagtcgacccctctccagcaaaaactaggaatccagaagtgccgcctgggtccgatcctagccagcatcctgggaatctgtcaccaactgtggtcctgtggcaaatgtcaggaaaccaaataaaattcagggaatgccctttgggggcatcaacgca

SEQ ID NO: 309184 - DNA, 1014 bp, Homo sapiens
cgcctgcgcccccgccggcgcgcccctgggagggtgagccggcgccgggcccaggcccggacctggtgggaggcggggggaggtggggacgaggcctggggaggcgggccccgcccatctgcaggtggctgtgaacgctgagcggctccaggcgggggccgggcccgggggcggggtctgtggcgcgcgtccccgccacgtgtccccggtcaccggccctgcccccgggccctgtgcttataacctgggatgggcacccctgccagtcctgctctgccgcctgccaccgctgcccgagcccgacgctatgtccagcaaaggctccgtggttctggcctacagtggcggcctggacacctcgtgcatcctcgtgtggctgaaggaacaaggctatgacgtcattgcctatctggccaacattggccagaaggaagacttcgaggaagccaggaagaaggcactgaagcttggggccaaaaaggtgttcattgaggatgtcagcagggagtttgtggaggagttcatctggccggccatccagtccagcgcactgtatgaggaccgctacctcctgggcacctctcttgccaggccctgcatcgcccgcaaacaagtggaaatcgcccagcgggagggggccaagtatgtgtcccacggcgccacaggaaagcatgaacgtgcagggtgattatgagccaactgatgccaccgggttcatcaacatcaattccctcaggctgaaggaatatcatcgtctccagagcaaggtcactgccaaatagacccgtgtacaatgaggagctggggcctcctcaatttgcagatcccccaagtacaggcgctaattgttgtgataatttgtaattgtgacttgttctccccggctggcagcgtagtggggctgccaggccccagctttgttccctggtccccctgaagcctgcaaacgttgtcatcgaagggaagggtggggggcagctgcggtggggagctataaaaatgacaattaaaaga

SEQ ID NO: 309185 - DNA, 771 bp, Homo sapiens
agcggaggctcctgactcgtgggcagagagtgtgctgacgcgccgcctggttcgggaaaggctctcgtttcttgccgcgagcaagaagcgttgggtggaccatcgcccagaaggtaagctcgagcacctgtttacttattactagtattagtattattagcactactagtagtagtactactactagtaggagaggtagtatactagtagtgcggagtatggatcacgggaccaaactattgttctgacttgcgcttccagtccgatgtacgacgtggaccctggtgcctggtcactctaggcgtgggacacacgtaacgggctcgaggtctggccgggatcgccagcgcaatgacataccaccggtgagtggttcactgcactgtgaaaacagattccagacgccgggaactcacgcctccaatcccagacgctatgtccagcaaaggctccgtggttctggcctacagtggcggcctggacacctcgtgcatcctcgtgtggctgaaggaacaaggctatgacgtcattgcctatctggccaacattggccagaaggaagacttcgaggaagccaggaagaaggcactgaagcttggggccaaaaaggttcattgaggatgtcagcagggagttggtggagaagctgtggcggggccacagcttctcagccagatccatgaagatctgggtccatttatgtctttactcttgctctctactaattcactctgtaaaccccaagcatgtgcacacacaggctgctcgcgc

SEQ ID NO: 309186 - DNA, 443 bp, Homo sapiens
tttttttttagttttggtaaaataatttattgggtttttcccctattataaaagtaatatatataaaagaaaccttagaaagttaggcaagaacataaaaaccacctgtatcctactttgctgagataactattactcttgtgctatttatctttccttccagacattttttgcatacttacatataaataggaccttgcagtactcatcacttaacaagaagtcacgacagatttgtgcagcctgctgggggagtgggtggggtaatggtacgtggcttcttcaccctcagcccctggatttttcaggtggcttctcttcctgatctcaaagccacactccagctaagaaaagtctggtgaagacagatagataatttcggtacctcacctataggttggggaataatgtttcatgatataagtatgatttgaattgatttt

SEQ ID NO: 309187 - DNA, 1894 bp, Homo sapiens
gcggccagggtagctatcgcggcggcggcggcggcggcggttgaactgactcggagcgaggagacccgagcgagcagacgcggccctggcgcccgccctgcgcactcaccatggcgatgcatttcatcttctcagatacagcggtgcttctgtttgatttctggagtgtccacagtcctgctggcatggccctttcggtgttggtgctcctgcttctggctgtactgtatgaaggcatcaaggttggcaaagccaagctgctcaaccaggtactggtgaacctgccaacctccatcagccagcagaccatcgcagagacagacggggactctgcaggctcagattcattccctgttggcagaacccaccacaggtggtatttgtgtcactttggccagtctctaatccatgtcatccaggtggtcatcggctacttcatcatgctggccgtaatgtcctacaacacctggattttccttggtgtggtcttgggctctgctgtgggctactacctagcttacccacttctcagcacagcttagctggtgaggaacgtgcaggcactgaggctggagggacatggagccccctcttccagacactatacttccaactgccctttcttctgatggctattcctccaccttattcccagcccctggaaactttgagctgaagccagcacttgctccctggagttcggaagccattgcagcaaccttccttctcagccagcctacatagggcccaggcatggtcttgtgtcttaagacagctgctgtgaccaaagggagaatggagataacaggggtggcagggttactgagcccatgacaatgcttctctgtgactcaaaccaggaatttccaaagatttcaagccagggagaagggttcttggtgatgcagggcatggaacctggacaccctcagctctcctgctttgtgccttatctacaggagcatcgcccattggacttcctgacctcttctgtctttgagggacagagaccaagctagatcctttttctcacctttctgcctttggaacacatgaagatcatctcgtctatggatcatgttgacaaactaagttttttttatttttcccattgaactcctagttggcaattttgcacattcatacaaaaaaatttttaatgaaatgatttcattgattcatgatggatggcagaaactgctgagacctatttccctttcttggggagagaataagtgacagctgattaaaggcagagacacaggactgctttcaggctcctggtttattctctgatagactgagctccttccaccagaaggcactgcctgcaggaagaagatgatctgatggccgtgggtgtctgggaagctcttcgtggcctcaatgccctcctttatcctcatctttcttctatgcagaacaaaaagctgcatctaataatgttcaatacttaatattctctatttattacttactgcttactcgtaatgatctagtggggaaacatgattcattcacttaaaatactgattaagccatggcaggtactgactgaagatgcaatccaaccaaagccattacattttttgagttagatgggactctctggatagttgaacctcttcactttataaaaaaggaaagagagaaaatcactgctgtatactaaatacctcacagattagatgaaaagatggttgtaagctttgggaattaaaaacaaatacattttagtaaatatatatttttaaatagtcaaaaaaacagaaccacacaaatcgtaacccgaaacaacaaaaaggggggggccccaaaaaaattcccccggggggggccccatttggccgcacccttttttgtgtaaagagggggcccaaaaggggggcgttaa

SEQ ID NO: 309188 - DNA, 1855 bp, Homo sapiens
gcggccagggtagctatcgcggcggcggcggcggcggcggttgaactgactcggagcgaggagacccgagcgagcagacgcggccctggcgcccgccctgcgcactcaccatggcgatgcatttcatcttctcagatacagcggtgcttctgtttgatttctggagtgtccacagtcctgctggcatggccctttcggtgttggtgctcctgcttctggctgtactgtatgaaggcatcaaggttggcaaagccaagctgctcaaccaggtactggtgaacctgccaacctccatcagccagcagaccatcgcagagacagacggggactctgcaggctcagattcattccctgttggcagaacccaccacaggtggtatttgtgtcactttggccagtctctaatccatgtcatccaggtggtcatcggctacttcatcatgctggccgtaatgtcctacaacacctggattttccttggtgtggtcttgggctctgctgtgggctactacctagcttacccacttctcagcacagcttagctggtgaggaacgtgcaggcactgaggctggagggacatggagccccctcttccagacactatacttccaactgccctttcttctgatggctattcctccaccttattcccagcccctggaaactttgagctgaagccagcacttgctccctggagttcggaagccattgcagcaaccttccttctcagccagcctacatagggcccaggcatggtcttgtgtcttaagacagctgctgtgaccaaagggagaatggagataacaggggtggcagggttactgagcccatgacaatgcttctctgtgactcaaaccaggaatttccaaagatttcaagccagggagaagggttcttggtgatgcagggcatggaacctggacaccctcagctctcctgctttgtgccttatctacaggagcatcgcccattggacttcctgacctcttctgtctttgagggacagagaccaagctagatcctttttctcacctttctgcctttggaacacatgaagatcatctcgtctatggatcatgttgacaaactaagttttttttatttttcccattgaactcctagttggcaattttgcacattcatacaaaaaaatttttaatgaaatgatttcattgattcatgatggatggcagaaactgctgagacctatttccctttcttggggagagaataagtgacagctgattattctctgatagactgagctccttccaccagaaggcactgcctgcaggaagaagatgatctgatggccgtgggtgtctgggaagctcttcgtggcctcaatgccctcctttatcctcatctttcttctatgcagaacaaaaagctgcatctaataatgttcaatacttaatattctctatttattacttactgcttactcgtaatgatctagtggggaaacatgattcattcacttaaaatactgattaagccatggcaggtactgactgaagatgcaatccaaccaaagccattacattttttgagttagatgggactctctggatagttgaacctcttcactttataaaaaaggaaagagagaaaatcactgctgtatactaaatacctcacagattagatgaaaagatggttgtaagctttgggaattaaaaacaaatacattttagtaaatatatatttttaaatagtcaaaaaaacagaaccacacaaatcgtaacccgaaacaacaaaaaggggggggccccaaaaaaattcccccggggggggccccatttggccgcacccttttttgtgtaaagagggggcccaaaaggggggcgttaa

SEQ ID NO: 309189 - DNA, 2204 bp, Homo sapiens
tttttttttagttttggtaaaataatttattgggtttttcccctattataaaagtaatatatataaaagaaaccttagaaagttaggcaagaacataaaaaccacctgtatcctactttgctgagataactattactcttgtgctatttatctttccttccagacattttttgcatacttacatataaataggaccttgcagtactcatcacttaacaagaagtcacgacagatttgtgcagcctgctgggggagtgggtggggtaatggtacgtggcttcttcaccctcagcccctggatttttcaggtggcttctcttcctgatctcaaagccacactccagctaagaaaagtctggtgaagacagtgaagaagttcggaactcagcaagggtggggaagaaggtgcaggatagaggtggatggagtggattccatgaacaggtggaggtgctggaagggaaacagtgctggcctggccaggtctccttaaaaataaatctcgagttttttctgggggcgggggtgggaggggcagaaagaaatcactcctgggttaagcatacaagttataaatcaatcgggtcacgtaactcaacagctttctactccctgatatctactcccagcttcctcattaccagctcattaccaggattaacttgcttctcctttttatctaggtggtatttgtgtcactttggccagtctctaatccatgtcatccaggtggtcatcggctacttcatcatgctggccgtaatgtcctacaacacctggattttccttggtgtggtcttgggctctgctgtgggctactacctagcttacccacttctcagcacagcttagctggtgaggaacgtgcaggcactgaggctggagggacatggagccccctcttccagacactatacttccaactgccctttcttctgatggctattcctccaccttattcccagcccctggaaactttgagctgaagccagcacttgctccctggagttcggaagccattgcagcaaccttccttctcagccagcctacatagggcccaggcatggtcttgtgtcttaagacagctgctgtgaccaaagggagaatggagataacaggggtggcagggttactgagcccatgacaatgcttctctgtgactcaaaccaggaatttccaaagatttcaagccagggagaagggttcttggtgatgcagggcatggaacctggacaccctcagctctcctgctttgtgccttatctacaggagcatcgcccattggacttcctgacctcttctgtctttgagggacagagaccaagctagatcctttttctcacctttctgcctttggaacacatgaagatcatctcgtctatggatcatgttgacaaactaagttttttttatttttcccattgaactcctagttggcaattttgcacattcatacaaaaaaatttttaatgaaatgatttcattgattcatgatggatggcagaaactgctgagacctatttccctttcttggggagagaataagtgacagctgattaaaggcagagacacaggactgctttcaggctcctggtttattctctgatagactgagctccttccaccagaaggcactgcctgcaggaagaagatgatctgatggccgtgggtgtctgggaagctcttcgtggcctcaatgccctcctttatcctcatctttcttctatgcagaacaaaaagctgcatctaataatgttcaatacttaatattctctatttattacttactgcttactcgtaatgatctagtggggaaacatgattcattcacttaaaatactgattaagccatggcaggtactgactgaagatgcaatccaaccaaagccattacattttttgagttagatgggactctctggatagttgaacctcttcactttataaaaaaggaaagagagaaaatcactgctgtatactaaatacctcacagattagatgaaaagatggttgtaagctttgggaattaaaaacaaatacattttagtaaatatatatttttaaatagtcaaaaaaacagaaccacacaaatcgtaacccgaaacaacaaaaaggggggggccccaaaaaaattcccccggggggggccccatttggccgcacccttttttgtgtaaagagggggcccaaaaggggggcgttaa

SEQ ID NO: 309190 - DNA, 1947 bp, Homo sapiens
gcggccagggtagctatcgcggcggcggcggcggcggcggttgaactgactcggagcgaggagacccgagcgagcagacgcggccctggcgcccgccctgcgcactcaccatggcgatgcatttcatcttctcagatacagcggtgcttctgtttgatttctggagtgtccacagtcctgctgggcaagaaactaaagcccagagacaggaagagagactcgtgcagggtcacacagcatggccctttcggtgttggtgctcctgcttctggctgtactgtatgaaggcatcaaggttggcaaagccaagctgctcaaccaggtactggtgaacctgccaacctccatcagccagcagaccatcgcagagacagacggggactctgcaggctcagattcattccctgttggcagaacccaccacaggtggtatttgtgtcactttggccagtctctaatccatgtcatccaggtggtcatcggctacttcatcatgctggccgtaatgtcctacaacacctggattttccttggtgtggtcttgggctctgctgtgggctactacctagcttacccacttctcagcacagcttagctggtgaggaacgtgcaggcactgaggctggagggacatggagccccctcttccagacactatacttccaactgccctttcttctgatggctattcctccaccttattcccagcccctggaaactttgagctgaagccagcacttgctccctggagttcggaagccattgcagcaaccttccttctcagccagcctacatagggcccaggcatggtcttgtgtcttaagacagctgctgtgaccaaagggagaatggagataacaggggtggcagggttactgagcccatgacaatgcttctctgtgactcaaaccaggaatttccaaagatttcaagccagggagaagggttcttggtgatgcagggcatggaacctggacaccctcagctctcctgctttgtgccttatctacaggagcatcgcccattggacttcctgacctcttctgtctttgagggacagagaccaagctagatcctttttctcacctttctgcctttggaacacatgaagatcatctcgtctatggatcatgttgacaaactaagttttttttatttttcccattgaactcctagttggcaattttgcacattcatacaaaaaaatttttaatgaaatgatttcattgattcatgatggatggcagaaactgctgagacctatttccctttcttggggagagaataagtgacagctgattaaaggcagagacacaggactgctttcaggctcctggtttattctctgatagactgagctccttccaccagaaggcactgcctgcaggaagaagatgatctgatggccgtgggtgtctgggaagctcttcgtggcctcaatgccctcctttatcctcatctttcttctatgcagaacaaaaagctgcatctaataatgttcaatacttaatattctctatttattacttactgcttactcgtaatgatctagtggggaaacatgattcattcacttaaaatactgattaagccatggcaggtactgactgaagatgcaatccaaccaaagccattacattttttgagttagatgggactctctggatagttgaacctcttcactttataaaaaaggaaagagagaaaatcactgctgtatactaaatacctcacagattagatgaaaagatggttgtaagctttgggaattaaaaacaaatacattttagtaaatatatatttttaaatagtcaaaaaaacagaaccacacaaatcgtaacccgaaacaacaaaaaggggggggccccaaaaaaattcccccggggggggccccatttggccgcacccttttttgtgtaaagagggggcccaaaaggggggcgttaa

SEQ ID NO: 309191 - DNA, 1636 bp, Homo sapiens
gatatgaggatcaagctaagtgtctgtcaacagctttctactccctgatatctactcccagcttcctcattaccagctcattaccaggattaacttgcttctcctttttatctaggtggtatttgtgtcactttggccagtctctaatccatgtcatccaggtggtcatcggctacttcatcatgctggccgtaatgtcctacaacacctggattttccttggtgtggtcttgggctctgctgtgggctactacctagcttacccacttctcagcacagcttagctggtgaggaacgtgcaggcactgaggctggagggacatggagccccctcttccagacactatacttccaactgccctttcttctgatggctattcctccaccttattcccagcccctggaaactttgagctgaagccagcacttgctccctggagttcggaagccattgcagcaaccttccttctcagccagcctacatagggcccaggcatggtcttgtgtcttaagacagctgctgtgaccaaagggagaatggagataacaggggtggcagggttactgagcccatgacaatgcttctctgtgactcaaaccaggaatttccaaagatttcaagccagggagaagggttcttggtgatgcagggcatggaacctggacaccctcagctctcctgctttgtgccttatctacaggagcatcgcccattggacttcctgacctcttctgtctttgagggacagagaccaagctagatcctttttctcacctttctgcctttggaacacatgaagatcatctcgtctatggatcatgttgacaaactaagttttttttatttttcccattgaactcctagttggcaattttgcacattcatacaaaaaaatttttaatgaaatgatttcattgattcatgatggatggcagaaactgctgagacctatttccctttcttggggagagaataagtgacagctgattaaaggcagagacacaggactgctttcaggctcctggtttattctctgatagactgagctccttccaccagaaggcactgcctgcaggaagaagatgatctgatggccgtgggtgtctgggaagctcttcgtggcctcaatgccctcctttatcctcatctttcttctatgcagaacaaaaagctgcatctaataatgttcaatacttaatattctctatttattacttactgcttactcgtaatgatctagtggggaaacatgattcattcacttaaaatactgattaagccatggcaggtactgactgaagatgcaatccaaccaaagccattacattttttgagttagatgggactctctggatagttgaacctcttcactttataaaaaaggaaagagagaaaatcactgctgtatactaaatacctcacagattagatgaaaagatggttgtaagctttgggaattaaaaacaaatacattttagtaaatatatatttttaaatagtcaaaaaaacagaaccacacaaatcgtaacccgaaacaacaaaaaggggggggccccaaaaaaattcccccggggggggccccatttggccgcacccttttttgtgtaaagagggggcccaaaaggggggcgttaa

SEQ ID NO: 309192 - DNA, 968 bp, Homo sapiens
gcggccagggtagctatcgcggcggcggcggcggcggcggttgaactgactcggagcgaggagacccgagcgagcagacgcggccctggcgcccgccctgcgcactcaccatggcgatgcatttcatcttctcagatacagcggtgcttctgtttgatttctggagtgtccacagtcctgctggcatggccctttcggtgttggtgctcctgcttctggctgtactgtatgaaggcatcaaggttggcaaagccaagctgctcaaccaggtactggtgaacctgccaacctccatcagccagcagaccatcgcagagacagacggggactctgcaggctcagattcattccctgttggcagaacccaccacaggtggtatttgtgtcactttggccagtctctaatccatgtcatccaggtggtcatcggctacttcatcatgctggccgtaatgtcctacaacacctggattttccttggtgtggtcttgggctctgctgtgggctactacctagcttacccacttctcagcacagcttagctggtgaggaacgtgcaggcactgaggctggagggacatggagccccctcttccagacactatacttccaactgccctttcttctgatggctattcctccaccttattcccagcccctggaaactttgagctgaagccagcacttgctccctggagttcggaagccattgcagcaaccttccttctcagccagcctacatagggcccaggcatggtcttgtgtcttaagacagctgctgtgaccaaagggagaatggagataacaggggtggcagggttactgagcccatgacaatgcttctctgtgactcaaaccaggaatttccaaagatttcaagccagggagaagggttcttggtgagtcgtggcacggcgccctagtcacaagctgtatccttccaggtcgattatagacggatcgcctga

SEQ ID NO: 309193 - DNA, 1308 bp, Homo sapiens
gcggccagggtagctatcgcggcggcggcggcggcggcggttgaactgactcggagcgaggagacccgagcgagcagacgcggccctggcgcccgccctgcgcactcaccatggcgatgcatttcatcttctcagatacagcggtgcttctgtttgatttctggagtgtccacagtcctgctggcatggccctttcggtgttggtgctcctgcttctggctgtactgtatgaaggcatcaaggttggcaaagccaagctgctcaaccaggtactggtgaacctgccaacctccatcagccagcagaccatcgcagagacagacggggactctgcaggctcagattcattccctgttggcagaacccaccacaggagcatcgcccattggacttcctgacctcttctgtctttgagggacagagaccaagctagatcctttttctcacctttctgcctttggaacacatgaagatcatctcgtctatggatcatgttgacaaactaagttttttttatttttcccattgaactcctagttggcaattttgcacattcatacaaaaaaatttttaatgaaatgatttcattgattcatgatggatggcagaaactgctgagacctatttccctttcttggggagagaataagtgacagctgattaaaggcagagacacaggactgctttcaggctcctggtttattctctgatagactgagctccttccaccagaaggcactgcctgcaggaagaagatgatctgatggccgtgggtgtctgggaagctcttcgtggcctcaatgccctcctttatcctcatctttcttctatgcagaacaaaaagctgcatctaataatgttcaatacttaatattctctatttattacttactgcttactcgtaatgatctagtggggaaacatgattcattcacttaaaatactgattaagccatggcaggtactgactgaagatgcaatccaaccaaagccattacattttttgagttagatgggactctctggatagttgaacctcttcactttataaaaaaggaaagagagaaaatcactgctgtatactaaatacctcacagattagatgaaaagatggttgtaagctttgggaattaaaaacaaatacattttagtaaatatatatttttaaatagtcaaaaaaacagaaccacacaaatcgtaacccgaaacaacaaaaaggggggggccccaaaaaaattcccccggggggggccccatttggccgcacccttttttgtgtaaagagggggcccaaaaggggggcgttaa

SEQ ID NO: 309194 - DNA, 1038 bp, Homo sapiens
gcggccagggtagctatcgcggcggcggcggcggcggcggttgaactgactcggagcgaggagacccgagcgagcagacgcggccctggcgcccgccctgcgcactcaccatggcgggttcacctgggctggagagaacgacagcttgcaagactcgttcgtctttgaagaagtcatatcattttcttcatcccatgaagaatgtcatagaatttaagatacaggaagctcagcctgggcaacatggctagaccccgtctctacaaaaattagccacaagtggtggcaggcgcctgtaatcccagctactcggaggctgaggcaggatgaggaggattgcttgagcccagaagttccaggctgcagtgagccatgaccttcggcctgggcaacagaacaagacgtcctcaaacaaacaaaacaaaaaaaaaaagatataggaagtgtatgtaggccatttagtgaaatgatcagccgtcctttaaaaagggaaatagatggaaagcacttgcaaaagttccccagccagtcagcctagcaactgggaccttcatctccttcccaacccttgtttacaaataaggaagcttttctcaaagtgtaagtaaccccaaatgaagaaatatagaagaaaacaagttccagggattgctccctccttcaccacagccccaccctgaaaaaagcacaaatcagttaaactttcagaggccaagattcatcccaagtaggaaaacaagattggggccctgccccttgcctatctgaccacaaagccctttaattgaaaactgtagcccagatcgcttctctcaagtcagggtgtgctgacttccatcttttcctctagcaaaaaggcaaaagtagaaagggttgagtgacaggtgagtcttcgtccctctggggcttcggactccgtgggtgtttccagctctgaacaaaccatacagttcatcttcccagctatctcctgcttctctggcttcagaaccatcctagccaactgctctctggccagggcaggtgtctctcaggcgg

SEQ ID NO: 309195 - DNA, 874 bp, Homo sapiens
gcggccagggtagctatcgcggcggcggcggcggcggcggttgaactgactcggagcgaggagacccgagcgagcagacgcggccctggcgcccgccctgcgcactcaccatggcgatgcatttcatcttctcagatacagcggtgcttctgtttgatttctggagtgtccacagtcctgctggcatggccctttcggtgttggtgctcctgcttctggctgtactgtatgaaggcatcaaggttggcaaagccaagctgctcaaccaggtactggtgaacctgccaacctccatcagccagcagaccatcgcagagacagacggggactctgcaggctcagattcattccctgttggcagaacccaccacaggtacaggcagtgggtatgggaaaggggcagaagcctcacattcaccctgagagacaggctggcccagacagcattagccccacttcacagagaggacagcgaggcccagggaaggaccaggacttgccaaagtggctacacatagccaagtgaactagagctcatgtctcctgatgcccaggccaaagcactctgtgaacagccagccacttgagaggctcagaaggctttctttagggaacagtgatcttcaggtgcaggcccctatctagcaaatgaggtggccacccaccctcccccaaatctcaccagttccatgggtcactaggctcccatatccaggaggggatctgcagctgtcctgaagcaatgtatcccacttggtgggaggaggatgacaagctctcctctcctcccttcccactcgaatcaggcaaccatttagggtccctgttctgccctctgtccagccccagcctcacctgtgcttaataagcctgc

SEQ ID NO: 309196 - DNA, 336 bp, Homo sapiens
tgtgcccctatgatgcagattcctttctctttcagatgcatttcatcttctcagatacagcggtgcttctgtttgatttctggagtgtccacagtcctgctggtaagaattggggacctcagacttgtagcttggaaagccttgtagtactaggcaagggagaatctgggttctcttgattctctgtgggcatttaagtgaggctgattcctctggcataaacactgagcaggaacttcacagttataattccatttgtaaccactccccttcagatcgcaaagggctccattatcttactgatcctcacaaaggccgagaggcagggaggcagct

SEQ ID NO: 309197 - DNA, 444 bp, Homo sapiens
gatttgtgcagcctgctgggggagtgggtggggtaatggtacgtggcttcttcaccctcagcccctggatttttcaggtggcttctcttcctgatctcaaagccacactccagctaagaaaagtctggtgaagacagtgaagaagttcggaactcagcaagggtggggaagaaggtgcaggatagaggtggatggagtggattccatgaacaggtggaggtgctggaagggaaacagtgctggcctggccaggtctccacaactctgcctcctttgacaggcatggccctttcggtgttggtgctcctgcttctggctgtactgtatgaaggcatcaaggttggcaaagccaagctgctcaaccaggtactggtgaacctgccaacctccatcagccagcagaccatcgcagagacagacggggactctgcaggctcagattca

SEQ ID NO: 309198 - DNA, 1572 bp, Homo sapiens
acctaacggcattccggaacattccacaagatggcgcccttgctttccaatcttcgggctacgggcggaggacgccttgccaggacgtcgacctcgctctgcaaggttcaggggccgacctcagacagaggctcgctctaggggcatgggcgggggccagacgggcctcgagtgggatcctggcacggttggccgatcggcccgggatcccggctgcgggcccgtgtctgccctagcgcgatgggctcgaatgcccggctccacgaatcccggcctttcacccccacggcctctcggcactgccccagctagacaccagcgagctcgtcacagcgcgggcaggcactgcggggcagctgcagacgagccttgtcatacggccggaggaggcctcgcctgcccgtgcggcgggctccgggcaccctgataccttgacacaggaggccccgggcggccgggaagggctgtgcgggggagggactgcgtctacacccgcgcccgactcgctcgggtcacggcactgccctgccaccaggcggctggggcgggggtgaggccaggcgtccgccctcgcgattctgttttctacgctgaggctcggagccttcgaagaacgggacagcggggcccacggacggctctgaaggccttcccgcggccgcaagagctctcggcggccggcgtttgaggcgcgcggctccgctgggaagcgagacccgggtggcgggacaagacttgcttcccggccacgcgcgctcggccggccgtggggcggggcataggccgtgacgtggtgtcgcgtatcgagtctccgcccccttcccgcctccccgtatataagacttcgccgagcactctcactcgcacaagtggaccggggtgttgggtgctagtcggcaccagaggcaagggtgcgaggaccacggccggctcggacgtgtgaccgcgcctagggggtggcagcgggcagtgcggggcggcaaggcgaccatggagcttttgcggactatcacctaccagccagccgccagcaccaaaatgtgcgagcaggcgctgggcaagggttgcggagcggactcgaagaagaagcggccgccgcagccccccgaggaatcgcagccacctcagtcccaggcgcaagtgcccccggcggcccctcaccaccatcaccaccattcgcactcggggccggagatctcgcggattatcgtcgaccccacgactgggaagcgctactgccggggcaaagtgctgggaaagggtggctttgcaaaatgttacgagatgacagatttgacaaataacaaagtctacgccgcaaaaattattcctcacagcagagtagctaaacctcatcaaagggaaaagattgacaaagaaatagagcttcacagaattcttcatcataagcatgtagtgcagttttaccactacttcgaggacaaagaaaacatttacattctcttggaatactgcagtagaagggaagggtaagtgtcaactcctatttgagaacatttgcttaccccgaattaacatggtattcaaagagtattttatctgggattacct

SEQ ID NO: 309199 - DNA, 3666 bp, Homo sapiens
acctaacggcattccggaacattccacaagatggcgcccttgctttccaatcttcgggctacgggcggaggacgccttgccaggacgtcgacctcgctctgcaaggttcaggggccgacctcagacagaggctcgctctaggggcatgggcgggggccagacgggcctcgagtgggatcctggcacggttggccgatcggcccgggatcccggctgcgggcccgtgtctgccctagcgcgatgggctcgaatgcccggctccacgaatcccggcctttcacccccacggcctctcggcactgccccagctagacaccagcgagctcgtcacagcgcgggcaggcactgcggggcagctgcagacgagccttgtcatacggccggaggaggcctcgcctgcccgtgcggcgggctccgggcaccctgataccttgacacaggaggccccgggcggccgggaagggctgtgcgggggagggactgcgtctacacccgcgcccgactcgctcgggtcacggcactgccctgccaccaggcggctggggcgggggtgaggccaggcgtccgccctcgcgattctgttttctacgctgaggctcggagccttcgaagaacgggacagcggggcccacggacggctctgaaggccttcccgcggccgcaagagctctcggcggccggcgtttgaggcgcgcggctccgctgggaagcgagacccgggtggcgggacaagacttgcttcccggccacgcgcgctcggccggccgtggggcggggcataggccgtgacgtggtgtcgcgtatcgagtctccgcccccttcccgcctccccgtatataagacttcgccgagcactctcactcgcacaagtggaccggggtgttgggtgctagtcggcaccagaggcaagggtgcgaggaccacggccggctcggacgtgtgaccgcgcctagggggtggcagcgggcagtgcggggcggcaaggcgaccatggagcttttgcggactatcacctaccagccagccgccagcaccaaaatgtgcgagcaggcgctgggcaagggttgcggagcggactcgaagaagaagcggccgccgcagccccccgaggaatcgcagccacctcagtcccaggcgcaagtgcccccggcggcccctcaccaccatcaccaccattcgcactcggggccggagatctcgcggattatcgtcgaccccacgactgggaagcgctactgccggggcaaagtgctgggaaagggtggctttgcaaaatgttacgagatgacagatttgacaaataacaaagtctacgccgcaaaaattattcctcacagcagagtagctaaacctcatcaaagggaaaagattgacaaagaaatagagcttcacagaattcttcatcataagcatgtagtgcagttttaccactacttcgaggacaaagaaaacatttacattctcttggaatactgcagtagaaggtcaatggctcatattttgaaagcaagaaaggtgttgacagagccagaagttcgatactacctcaggcagattgtgtctggactgaaataccttcatgaacaagaaatcttgcacagagatctcaaactagggaacttttttattaatgaagccatggaactaaaagttggggacttcggtctggcagccaggctagaacccttggaacacagaaggagaacgatatgtggtaccccaaattatctctctcctgaagtcctcaacaaacaaggacatggctgtgaatcagacatttgggccctgggctgtgtaatgtatacaatgttactagggaggcccccatttgaaactacaaatctcaaagaaacttataggtgcataagggaagcaaggtatacaatgccgtcctcattgctggctcctgccaagcacttaattgctagtatgttgtccaaaaacccagaggatcgtcccagtttggatgacatcattcgacatgacttttttttgcagggcttcactccggacagactgtcttctagctgttgtcatacagttccagatttccacttatcaagcccagctaagaatttctttaagaaagcagctgctgctctttttggtggcaaaaaagacaaagcaagatatattgacacacataatagagtgtctaaagaagatgaagacatctacaagcttaggcatgatttgaaaaagacttcaataactcagcaacccagcaaacacaggacagatgaggagctccagccacctaccaccacagttgccaggtctggaacacccgcagtagaaaacaagcagcagattggggatgctattcggatgatagtcagagggactcttggcagctgtagcagcagcagtgaatgccttgaagacagtaccatgggaagtgttgcagacacagtggcaagggttcttcggggatgtctggaaaacatgccggaagctgattgcattcccaaagagcagctgagcacatcatttcagtgggtcaccaaatgggttgattactctaacaaatatggctttgggtaccagctctcagaccacaccgtcggtgtccttttcaacaatggtgctcacatgagcctccttccagacaaaaaaacagttcactattacgcagagcttggccaatgctcagttttcccagcaacagatgctcctgagcaatttattagtcaagtgacggtgctgaaatacttttctcattacatggaggagaacctcatggatggtggagatctgcctagtgttactgatattcgaagacctcggctctacctccttcagtggctaaaatctgataaggccctaatgatgctctttaatgatggcacctttcaggtgaatttctaccatgatcatacaaaaatcatcatctgtagccaaaatgaagaataccttctcacctacatcaatgaggataggatatctacaactttcaggctgacaactctgctgatgtctggctgttcatcagaattaaaaaatcgaatggaatatgccctgaacatgctcttacaaagatgtaactgaaagacttttcgaatggaccctatgggactcctcttttccactgtgagatctacagggaagccaaaagaatgatctagagtatgttgaagaagatggacatgtggtggtacgaaaacaattcccctgtggcctgctggactgggtggaaccagaacaggctaaggcatacagttcttgactttggacaatccaagagtgaaccagaatgcagttttccttgagatacctgttttaaaaggtttttcagacaattttgcagaaaggtgcattgattcttaaattctctctgttgagagcatttcagccagaggactttggaactgtgaatatacttcctgaaggggagggagaagggaggaagctcccatgttgtttaaaggctgtaattggagcagcttttggctgcgtaactgtgaactatggccatatataattttttttcattaatttttgaagatacttgtggctggaaaagtgcattccttgttaataaactttttatttattacagcccaaagagcagtatttattatcaaaatgtctttttttttatgttgaccattttaaaccgttggcaataaagagtatgaaaacgcaagaaataatggtctcctgtct

SEQ ID NO: 309200 - DNA, 3562 bp, Homo sapiens
acctaacggcattccggaacattccacaagatggcgcccttgctttccaatcttcgggctacgggcggaggacgccttgccaggacgtcgacctcgctctgcaaggttcaggggccgacctcagacagaggctcgctctaggggcatgggcgggggccagacgggcctcgagtgggatcctggcacggttggccgatcggcccgggatcccggctgcgggcccgtgtctgccctagcgcgatgggctcgaatgcccggctccacgaatcccggcctttcacccccacggcctctcggcactgccccagctagacaccagcgagctcgtcacagcgcgggcaggcactgcggggcagctgcagacgagccttgtcatacggccggaggaggcctcgcctgcccgtgcggcgggctccgggcaccctgataccttgacacaggaggccccgggcggccgggaagggctgtgcgggggagggactgcgtctacacccgcgcccgactcgctcgggtcacggcactgccctgccaccaggcggctggggcgggggtgaggccaggcgtccgccctcgcgattctgttttctacgctgaggctcggagccttcgaagaacgggacagcggggcccacggacggctctgaaggccttcccgcggccgcaagagctctcggcggccggcgtttgaggcgcgcggctccgctgggaagcgagacccgggtggcgggacaagacttgcttcccggccacgcgcgctcggccggccgtggggcggggcataggccgtgacgtggtgtcgcgtatcgagtctccgcccccttcccgcctccccgtatataagacttcgccgagcactctcactcgcacaagtggaccggggtgttgggtgctagtcggcaccagaggcaagggtgcgaggaccacggccggctcggacgtgtgaccgcgcctagggggtggcagcgggcagtgcggggcggcaaggcgaccatggagcttttgcggactatcacctaccagccagccgccagcaccaaaatgtgcgagcaggcgctgggcaagggttgcggagcggactcgaagaagaagcggccgccgcagccccccgaggaatcgcagccacctcagtcccaggcgcaagtgcccccggcggcccctcaccaccatcaccaccattcgcactcggggccggagatctcgcggattatcgtcgaccccacgactgggaagcgctactgccggggcaaagtgctgggaaagggtggctttgcaaaatgttacgagatgacagatttgacaaataacaaagtctacgccgcaaaaattattcctcacagcagagtagctaaacctcatcaaagggaaaagattgacaaagaaatagagcttcacagaattcttcatcataagcatgtagtgcagttttaccactacttcgaggacaaagaaaacatttacattctcttggaatactgcagtagaaggtcaatggctcatattttgaaagcaagaaaggtgttgacagagccagaagttcgatactacctcaggcagattgtgtctggactgaaataccttcatgaacaagaaatcttgcacagagatctcaaactagggaacttttttattaatgaagccatggaactaaaagttggggacttcggtctggcagccaggctagaacccttggaacacagaaggagaacgatatgtggtaccccaaattatctctctcctgaagtcctcaacaaacaaggacatggctgtgaatcagacatttgggccctgggctgtgtaatgtatacaatgttactagggaggcccccatttgaaactacaaatctcaaagaaacttataggtgcataagggaagcaaggtatacaatgccgtcctcattgctggctcctgccaagcacttaattgctagtatgttgtccaaaaacccagaggatcgtcccagtttggatgacatcattcgacatgacttttttttgcagggcttcactccggacagactgtcttctagctgttgtcatacagttccagatttccacttatcaagcccagctaagaatttctttaagaaagcagctgctgctctttttggtggcaaaaaagacaaagcaagatatattgacacacataatagagtgtctaaagaagatgaagacatctacaagcttaggcatgatttgaaaaagacttcaataactcagcaacccagcaaacacaggacagatgaggagctccagccacctaccaccacagttgccaggtctggaacacccgcagtagaaaacaagcagcagattggggatgctattcggatgatagtcagagggactcttggcagctgtagcagcagcagtgaatgccttgaagacagtaccatgggaagtgttgcagacacagtggcaagggttcttcggggatgtctggaaaacatgccggaagctgattgcattcccaaagagcagctgagcacatcatttcagtgggtcaccaaatgggttgattactctaacaaatatggctttgggtaccagctctcagaccacaccgtcggtgtccttttcaacaatggtgctcacatgagcctccttccagacaaaaaaacagttcactattacgcagagcttggccaatgctcagttttcccagcaacagatgctcctgagcaatttattagtcaagtgacggtgctgaaatacttttctcattacatggaggagaacctcatggatggtggagatctgcctagtgttactgatattcgaagacctcggctctacctccttcagtggctaaaatctgataaggccctaatgatgctctttaatgatggcacctttcaggtgaatttctaccatgatcatacaaaaatcatcatctgtagccaaaatgaagaataccttctcacctacatcaatgaggataggatatctacaactttcaggctgacaactctgctgatgtctggctgttcatcagaattaaaaaatcgaatggaatatgccctgaacatgctcttacaaagatgtaactgaaagacttttcgaatggaccctatgggactcctcttttccactgtgagatctacagggaagccaaaagaatgatctagagtatgttgaagaagatggacatgtggtggtacgaaaacaattcccctgtggcctgctggactgggtggaaccagaacaggctaaggcatacagttcttgactttggacaatccaagagtgaaccagaatgcagttttccttgagatacctgttttaaaaggtttttcagacaattttgcagaaaggtgcattgattcttaaattctctctgttgagagcatttcagccagaggactttggaactgtgaatatacttcctgaaggggagggagaagggaggaagctcccatgttgtttaaaggctgtaattggagcagcttttggctgcgtaactgtgaactatggccatatataattttttttcattaatttttgaagatacttgtggctggaaaagtgcattccttgttaataaactttttatttattacagccc

SEQ ID NO: 309201 - DNA, 655 bp, Homo sapiens
ctctagagcgatcccccttgcgggtctgataggatatctacaactttcaggctgacaactctgctgatgtctggctgttcatcagaattaaaaaatcgaatggaatatgccctgaacatgctcttacaaagatgtaactgaaagacttttcgaatggaccctatgggactcctcttttccactgtgagatctacagggaagccaaaagaatgatctagagtatgttgaagaagatggacatgtggtggtacgaaaacaattcccctgtggcctgctggactgggtggaaccagaacaggctaaggcatacagttcttgactttggacaatccaagagtgaaccagaatgcagttttccttgagatacctgttttaaaaggtttttcagacaattttgcagaaaggtgcattgattcttaaattctctctgttgagagcatttcagccagaggactttggaactgtgaatatacttcctgaaggggagggagaagggaggaagctcccatgttgtttaaaggctgtaattggagcagcttttggctgcgtaactgtgaactatggccatatataattttttttcattaatttttgaagatacttgtggctggaaaagtgcattccttgttaataaactttttatttattacagccc

SEQ ID NO: 309202 - DNA, 1488 bp, Homo sapiens
acctaacggcattccggaacattccacaagatggcgcccttgctttccaatcttcgggctacgggcggaggacgccttgccaggacgtcgacctcgctctgcaaggttcaggggccgacctcagacagaggctcgctctaggggcatgggcgggggccagacgggcctcgagtgggatcctggcacggttggccgatcggcccgggatcccggctgcgggcccgtgtctgccctagcgcgatgggctcgaatgcccggctccacgaatcccggcctttcacccccacggcctctcggcactgccccagctagacaccagcgagctcgtcacagcgcgggcaggcactgcggggcagctgcagacgagccttgtcatacggccggaggaggcctcgcctgcccgtgcggcgggctccgggcaccctgataccttgacacaggaggccccgggcggccgggaagggctgtgcgggggagggactgcgtctacacccgcgcccgactcgctcgggtcacggcactgccctgccaccaggcggctggggcgggggtgaggccaggcgtccgccctcgcgattctgttttctacgctgaggctcggagccttcgaagaacgggacagcggggcccacggacggctctgaaggccttcccgcggccgcaagagctctcggcggccggcgtttgaggcgcgcggctccgctgggaagcgagacccgggtggcgggacaagacttgcttcccggccacgcgcgctcggccggccgtggggcggggcataggccgtgacgtggtgtcgcgtatcgagtctccgcccccttcccgcctccccgtatataagacttcgccgagcactctcactcgcacaagtggaccggggtgttgggtgctagtcggcaccagaggcaagggtgcgaggaccacggccggctcggacgtgtgaccgcgcctagggggtggcagcgggcagtgcggggcggcaaggcgaccatggagcttttgcggactatcacctaccagccagccgccagcaccaaaatgtgcgagcaggcgctgggcaagggttgcggagcggactcgaagaagaagcggccgccgcagccccccgaggaatcgcagccacctcagtcccaggcgcaagtgcccccggcggcccctcaccaccatcaccaccattcgcactcggggccggagatctcgcggattatcgtcgaccccacgactgggaagcgctactgccggggcaaagtgctgggaaagggtggctttgcaaaatgttacgagatgacagatttgacaaataacaaagtctacgccgcaaaaattattcctcacagcagagtagctaaacctcatcaaagggaaaaggtgcgtatgactcttgagtaaagtattttctttgtgtgcaaggatggcccttccctgttaggaaaatgtcttctgcatgtgtaatcactggcttttccgaggtgactggaagctaataag

SEQ ID NO: 309203 - DNA, 2596 bp, Homo sapiens
gcattgtggctccagtagtgacttttacattttaaatctaaatagaagctggaggctttgctggggtactcataggcataaaatatgtaatttattatagagttaaatgctacaaagacagatctaattaataggcctattttcctttttaagttctactcataatttcttcatagtttttatgagtagaacttaaaaaggaaaataggcctattaattagatttgacaaataacaaagtctacgccgcaaaaattattcctcacagcagagtagctaaacctcatcaaagggaaaagattgacaaagaaatagagcttcacagaattcttcatcataagcatgtagtgcagttttaccactacttcgaggacaaagaaaacatttacattctcttggaatactgcagtagaaggtcaatggctcatattttgaaagcaagaaaggtgttgacagagccagaagttcgatactacctcaggcagattgtgtctggactgaaataccttcatgaacaagaaatcttgcacagagatctcaaactagggaacttttttattaatgaagccatggaactaaaagttggggacttcggtctggcagccaggctagaacccttggaacacagaaggagaacgatatgtggtaccccaaattatctctctcctgaagtcctcaacaaacaaggacatggctgtgaatcagacatttgggccctgggctgtgtaatgtatacaatgttactagggaggcccccatttgaaactacaaatctcaaagaaacttataggtgcataagggaagcaaggtatacaatgccgtcctcattgctggctcctgccaagcacttaattgctagtatgttgtccaaaaacccagaggatcgtcccagtttggatgacatcattcgacatgacttttttttgcagggcttcactccggacagactgtcttctagctgttgtcatacagttccagatttccacttatcaagcccagctaagaatttctttaagaaagcagctgctgctctttttggtggcaaaaaagacaaagcaagatatattgacacacataatagagtgtctaaagaagatgaagacatctacaagcttaggcatgatttgaaaaagacttcaataactcagcaacccagcaaacacaggacagatgaggagctccagccacctaccaccacagttgccaggtctggaacacccgcagtagaaaacaagcagcagattggggatgctattcggatgatagtcagagggactcttggcagctgtagcagcagcagtgaatgccttgaagacagtaccatgggaagtgttgcagacacagtggcaagggttcttcggggatgtctggaaaacatgccggaagctgattgcattcccaaagagcagctgagcacatcatttcagtgggtcaccaaatgggttgattactctaacaaatatggctttgggtaccagctctcagaccacaccgtcggtgtccttttcaacaatggtgctcacatgagcctccttccagacaaaaaaacagttcactattacgcagagcttggccaatgctcagttttcccagcaacagatgctcctgagcaatttattagtcaagtgacggtgctgaaatacttttctcattacatggaggagaacctcatggatggtggagatctgcctagtgttactgatattcgaagacctcggctctacctccttcagtggctaaaatctgataaggccctaatgatgctctttaatgatggcacctttcaggtgaatttctaccatgatcatacaaaaatcatcatctgtagccaaaatgaagaataccttctcacctacatcaatgaggataggatatctacaactttcaggctgacaactctgctgatgtctggctgttcatcagaattaaaaaatcgaatggaatatgccctgaacatgctcttacaaagatgtaactgaaagacttttcgaatggaccctatgggactcctcttttccactgtgagatctacagggaagccaaaagaatgatctagagtatgttgaagaagatggacatgtggtggtacgaaaacaattcccctgtggcctgctggactgggtggaaccagaacaggctaaggcatacagttcttgactttggacaatccaagagtgaaccagaatgcagttttccttgagatacctgttttaaaaggtttttcagacaattttgcagaaaggtgcattgattcttaaattctctctgttgagagcatttcagccagaggactttggaactgtgaatatacttcctgaaggggagggagaagggaggaagctcccatgttgtttaaaggctgtaattggagcagcttttggctgcgtaactgtgaactatggccatatataattttttttcattaatttttgaagatacttgtggctggaaaagtgcattccttgttaataaactttttatttattacagcccaaagagcagtatttattatcaaaatgtctttttttttatgttgaccattttaaaccgttggcaataaagagtatgaaaacgcaagaaataatggtctcctgtct

SEQ ID NO: 309204 - DNA, 4248 bp, Homo sapiens
acctaacggcattccggaacattccacaagatggcgcccttgctttccaatcttcgggctacgggcggaggacgccttgccaggacgtcgacctcgctctgcaaggttcaggggccgacctcagacagaggctcgctctaggggcatgggcgggggccagacgggcctcgagtgggatcctggcacggttggccgatcggcccgggatcccggctgcgggcccgtgtctgccctagcgcgatgggctcgaatgcccggctccacgaatcccggcctttcacccccacggcctctcggcactgccccagctagacaccagcgagctcgtcacagcgcgggcaggcactgcggggcagctgcagacgagccttgtcatacggccggaggaggcctcgcctgcccgtgcggcgggctccgggcaccctgataccttgacacaggaggccccgggcggccgggaagggctgtgcgggggagggactgcgtctacacccgcgcccgactcgctcgggtcacggcactgccctgccaccaggcggctggggcgggggtgaggccaggcgtccgccctcgcgattctgttttctacgctgaggctcggagccttcgaagaacgggacagcggggcccacggacggctctgaaggccttcccgcggccgcaagagctctcggcggccggcgtttgaggcgcgcggctccgctgggaagcgagacccgggtggcgggacaagacttgcttcccggccacgcgcgctcggccggccgtggggcggggcataggccgtgacgtggtgtcgcgtatcgagtctccgcccccttcccgcctccccgtatataagacttcgccgagcactctcactcgcacaagtggaccggggtgttgggtgctagtcggcaccagaggcaagggtgcgaggaccacggccggctcggacgtgtgaccgcgcctagggggtggcagcgggcagtgcggggcggcaaggcgaccatggagcttttgcggactatcacctaccagccagccgccagcaccaaaatgtgcgagcaggcgctgggcaagggttgcggagcggactcgaagaagaagcggccgccgcagccccccgaggaatcgcagccacctcagtcccaggcgcaagtgcccccggcggcccctcaccaccatcaccaccattcgcactcggggccggagatctcgcggattatcgtcgaccccacgactgggaagcgctactgccggggcaaagtgctgggaaagggtggctttgcaaaatgttacgagatgacagatttgacaaataacaaagtctacgccgcaaaaattattcctcacagcagagtagctaaacctcatcaaagggaaaagattgacaaagaaatagagcttcacagaattcttcatcataagcatgtagtgcagttttaccactacttcgaggacaaagaaaacatttacattctcttggaatactgcagtagaaggtcaatggctcatattttgaaagcaagaaaggtgttgacagagccagaagttcgatactacctcaggcagattgtgtctggactgaaataccttcatgaacaagaaatcttgcacagagatctcaaactagggaacttttttattaatgaagccatggaactaaaagttggggacttcggtctggcagccaggctagaacccttggaacacagaaggagaacgatatgtggtaccccaaattatctctctcctgaagtcctcaacaaacaaggacatggctgtgaatcagacatttgggccctgggctgtgtaatgtatacaatgttactagggaggcccccatttgaaactacaaatctcaaagaaacttataggtgcataagggaagcaaggtatacaatgccgtcctcattgctggctcctgccaagcacttaattgctagtatgttgtccaaaaacccagaggatcgtcccagtttggatgacatcattcgacatgacttttttttgcagggcttcactccggacagactgtcttctagctgttgtcatacagttccagatttccacttatcaagcccagctaagaatttctttaagaaagcagctgctgctctttttggtggcaaaaaagacaaagcaagatatattgacacacataatagagtgtctaaagaagatgaagacatctacaagcttaggcatgatttgaaaaagacttcaataactcagcaacccagcaaacacaggacagatgaggtgtgttgggaaagagtaaagtagatactcacgctttacgttatttccactctttattaattagcacttggactatgattatcatggttcaaatatgtcatatttacttaaagtttttcttcaaaccctttgaaagggaagttaaaactaaaaggaagtcttttagttttacagtgcatgcaagtgagtttactgcgttatcttttatctggcttgtgtccattgctttttgatgagctttcccagcaattgcctcactctcatcttaatctggaattctcacccttaaatgaatttagatgcttgactcattgcataaatcttctctcttctaaggagctccagccacctaccaccacagttgccaggtctggaacacccgcagtagaaaacaagcagcagattggggatgctattcggatgatagtcagagggactcttggcagctgtagcagcagcagtgaatgtaagtggttgtcaatcgtattttaaataatgaaactcgaaatgccagtgctaaatacataataatttaagtcaatttactttgtagcttaatttaacatagaagtagtaagattacaggaattggaaaataatcttgagttctatgtctttcgaattaatggagtgaaacttagcatctaccaaagcctgaggttttattgctaaaatattgtataacttgaaacatttctgtctgacttttcaggccttgaagacagtaccatgggaagtgttgcagacacagtggcaagggttcttcggggatgtctggaaaacatgccggaagctgattgcattcccaaagagcagctgagcacatcatttcagtgggtcaccaaatgggttgattactctaacaaatatggctttgggtaccagctctcagaccacaccgtcggtgtccttttcaacaatggtgctcacatgagcctccttccagacaaaaaaacagttcactattacgcagagcttggccaatgctcagttttcccagcaacagatgctcctgagcaatttattagtcaagtgacggtgctgaaatacttttctcattacatggaggagaacctcatggatggtggagatctgcctagtgttactgatattcgaagacctcggctctacctccttcagtggctaaaatctgataaggccctaatgatgctctttaatgatggcacctttcaggtgaatttctaccatgatcatacaaaaatcatcatctgtagccaaaatgaagaataccttctcacctacatcaatgaggataggatatctacaactttcaggctgacaactctgctgatgtctggctgttcatcagaattaaaaaatcgaatggaatatgccctgaacatgctcttacaaagatgtaactgaaagacttttcgaatggaccctatgggactcctcttttccactgtgagatctacagggaagccaaaagaatgatctagagtatgttgaagaagatggacatgtggtggtacgaaaacaattcccctgtggcctgctggactgggtggaaccagaacaggctaaggcatacagttcttgactttggacaatccaagagtgaaccagaatgcagttttccttgagatacctgttttaaaaggtttttcagacaattttgcagaaaggtgcattgattcttaaattctctctgttgagagcatttcagccagaggactttggaactgtgaatatacttcctgaaggggagggagaagggaggaagctcccatgttgtttaaaggctgtaattggagcagcttttggctgcgtaactgtgaactatggccatatataattttttttcattaatttttgaagatacttgtggctggaaaagtgcattccttgttaataaactttttatttattacagcccaaagagcagtatttattatcaaaatgtctttttttttatgttgaccattttaaaccgttggcaataaagagtatgaaaacgcaagaaataatggtctcctgtct

SEQ ID NO: 309205 - DNA, 1868 bp, Homo sapiens
ctcaatcgagctcggcccaaattcatgaagagagacaacttgtaaattaaacaacacaatggtgcataagggaagcaaggtatacaatgccgtcctcattgctggctcctgccaagcacttaattgctagtatgttgtccaaaaacccagaggatcgtcccagtttggatgacatcattcgacatgacttttttttgcagggcttcactccggacagactgtcttctagctgttgtcatacagttccagatttccacttatcaagcccagctaagaatttctttaagaaagcagctgctgctctttttggtggcaaaaaagacaaagcaagatatattgacacacataatagagtgtctaaagaagatgaagacatctacaagcttaggcatgatttgaaaaagacttcaataactcagcaacccagcaaacacaggacagatgaggagctccagccacctaccaccacagttgccaggtctggaacacccgcagtagaaaacaagcagcagattggggatgctattcggatgatagtcagagggactcttggcagctgtagcagcagcagtgaatgccttgaagacagtaccatgggaagtgttgcagacacagtggcaagggttcttcggggatgtctggaaaacatgccggaagctgattgcattcccaaagagcagctgagcacatcatttcagtgggtcaccaaatgggttgattactctaacaaatatggctttgggtaccagctctcagaccacaccgtcggtgtccttttcaacaatggtgctcacatgagcctccttccagacaaaaaaacagttcactattacgcagagcttggccaatgctcagttttcccagcaacagatgctcctgagcaatttattagtcaagtgacggtgctgaaatacttttctcattacatggaggagaacctcatggatggtggagatctgcctagtgttactgatattcgaagacctcggctctacctccttcagtggctaaaatctgataaggccctaatgatgctctttaatgatggcacctttcaggtgaatttctaccatgatcatacaaaaatcatcatctgtagccaaaatgaagaataccttctcacctacatcaatgaggataggatatctacaactttcaggctgacaactctgctgatgtctggctgttcatcagaattaaaaaatcgaatggaatatgccctgaacatgctcttacaaagatgtaactgaaagacttttcgaatggaccctatgggactcctcttttccactgtgagatctacagggaagccaaaagaatgatctagagtatgttgaagaagatggacatgtggtggtacgaaaacaattcccctgtggcctgctggactgggtggaaccagaacaggctaaggcatacagttcttgactttggacaatccaagagtgaaccagaatgcagttttccttgagatacctgttttaaaaggtttttcagacaattttgcagaaaggtgcattgattcttaaattctctctgttgagagcatttcagccagaggactttggaactgtgaatatacttcctgaaggggagggagaagggaggaagctcccatgttgtttaaaggctgtaattggagcagcttttggctgcgtaactgtgaactatggccatatataattttttttcattaatttttgaagatacttgtggctggaaaagtgcattccttgttaataaactttttatttattacagcccaaagagcagtatttattatcaaaatgtctttttttttatgttgaccattttaaaccgttggcaataaagagtatgaaaacgcaagaaataatggtctcctgtct

SEQ ID NO: 309206 - DNA, 965 bp, Homo sapiens
  misc_feature (42)..(42): n is a, c, g, or t
gctgacctagaggatcccgactagtccaaccatacctcatgnatggtggagatctgcctagtgttactgatattcgaagacctcggctctacctccttcagtggctaaaatctgataaggccctaatgatgctctttaatgatggcacctttcaggtgaatttctaccatgatcatacaaaaatcatcatctgtagccaaaatgaagaataccttctcacctacatcaatgaggataggatatctacaactttcaggctgacaactctgctgatgtctggctgttcatcagaattaaaaaatcgaatggaatatgccctgaacatgctcttacaaagatgtaactgaaagacttttcgaatggaccctatgggactcctcttttccactgtgagatctacagggaagccaaaagaatgatctagagtatgttgaagaagatggacatgtggtggtacgaaaacaattcccctgtggcctgctggactgggtggaaccagaacaggctaaggcatacagttcttgactttggacaatccaagagtgaaccagaatgcagttttccttgagatacctgttttaaaaggtttttcagacaattttgcagaaaggtgcattgattcttaaattctctctgttgagagcatttcagccagaggactttggaactgtgaatatacttcctgaaggggagggagaagggaggaagctcccatgttgtttaaaggctgtaattggagcagcttttggctgcgtaactgtgaactatggccatatataattttttttcattaatttttgaagatacttgtggctggaaaagtgcattccttgttaataaactttttatttattacagcccaaagagcagtatttattatcaaaatgtctttttttttatgttgaccattttaaaccgttggcaataaagagtatgaaaacgcaagaaataatggtctcctgtct

SEQ ID NO: 309207 - DNA, 1016 bp, Homo sapiens
cttgcttaagtttgagaggattttcttagaataataatagagtgcatgctacaaaatctttgtaggcactaactcactctcctaatctcttccagggtggagatctgcctagtgttactgatattcgaagacctcggctctacctccttcagtggctaaaatctgataaggccctaatgatgctctttaatgatggcacctttcaggtgaatttctaccatgatcatacaaaaatcatcatctgtagccaaaatgaagaataccttctcacctacatcaatgaggataggatatctacaactttcaggctgacaactctgctgatgtctggctgttcatcagaattaaaaaatcgaatggaatatgccctgaacatgctcttacaaagatgtaactgaaagacttttcgaatggaccctatgggactcctcttttccactgtgagatctacagggaagccaaaagaatgatctagagtatgttgaagaagatggacatgtggtggtacgaaaacaattcccctgtggcctgctggactgggtggaaccagaacaggctaaggcatacagttcttgactttggacaatccaagagtgaaccagaatgcagttttccttgagatacctgttttaaaaggtttttcagacaattttgcagaaaggtgcattgattcttaaattctctctgttgagagcatttcagccagaggactttggaactgtgaatatacttcctgaaggggagggagaagggaggaagctcccatgttgtttaaaggctgtaattggagcagcttttggctgcgtaactgtgaactatggccatatataattttttttcattaatttttgaagatacttgtggctggaaaagtgcattccttgttaataaactttttatttattacagcccaaagagcagtatttattatcaaaatgtctttttttttatgttgaccattttaaaccgttggcaataaagagtatgaaaacgcaagaaataatggtctcctgtct

SEQ ID NO: 309208 - DNA, 759 bp, Homo sapiens
ctctagagcgatcccccttgcgggtctgataggatatctacaactttcaggctgacaactctgctgatgtctggctgttcatcagaattaaaaaatcgaatggaatatgccctgaacatgctcttacaaagatgtaactgaaagacttttcgaatggaccctatgggactcctcttttccactgtgagatctacagggaagccaaaagaatgatctagagtatgttgaagaagatggacatgtggtggtacgaaaacaattcccctgtggcctgctggactgggtggaaccagaacaggctaaggcatacagttcttgactttggacaatccaagagtgaaccagaatgcagttttccttgagatacctgttttaaaaggtttttcagacaattttgcagaaaggtgcattgattcttaaattctctctgttgagagcatttcagccagaggactttggaactgtgaatatacttcctgaaggggagggagaagggaggaagctcccatgttgtttaaaggctgtaattggagcagcttttggctgcgtaactgtgaactatggccatatataattttttttcattaatttttgaagatacttgtggctggaaaagtgcattccttgttaataaactttttatttattacagcccaaagagcagtatttattatcaaaatgtctttttttttatgttgaccattttaaaccgttggcaataaagagtatgaaaacgcaagaaataatggtctcctgtct

SEQ ID NO: 309209 - DNA, 2054 bp, Homo sapiens
acctaacggcattccggaacattccacaagatggcgcccttgctttccaatcttcgggctacgggcggaggacgccttgccaggacgtcgacctcgctctgcaaggttcaggggccgacctcagacagaggctcgctctaggggcatgggcgggggccagacgggcctcgagtgggatcctggcacggttggccgatcggcccgggatcccggctgcgggcccgtgtctgccctagcgcgatgggctcgaatgcccggctccacgaatcccggcctttcacccccacggcctctcggcactgccccagctagacaccagcgagctcgtcacagcgcgggcaggcactgcggggcagctgcagacgagccttgtcatacggccggaggaggcctcgcctgcccgtgcggcgggctccgggcaccctgataccttgacacaggaggccccgggcggccgggaagggctgtgcgggggagggactgcgtctacacccgcgcccgactcgctcgggtcacggcactgccctgccaccaggcggctggggcgggggtgaggccaggcgtccgccctcgcgattctgttttctacgctgaggctcggagccttcgaagaacgggacagcggggcccacggacggctctgaaggccttcccgcggccgcaagagctctcggcggccggcgtttgaggcgcgcggctccgctgggaagcgagacccgggtggcgggacaagacttgcttcccggccacgcgcgctcggccggccgtggggcggggcataggccgtgacgtggtgtcgcgtatcgagtctccgcccccttcccgcctccccgtatataagacttcgccgagcactctcactcgcacaagtggaccggggtgttgggtgctagtcggcaccagaggcaagggtgcgaggaccacggccggctcggacgtgtgaccgcgcctagggggtggcagcgggcagtgcggggcggcaaggcgaccatggagcttttgcggactatcacctaccagccagccgccagcaccaaaatgtgcgagcaggcgctgggcaagggttgcggagcggactcgaagaagaagcggccgccgcagccccccgaggaatcgcagccacctcagtcccaggcgcaagtgcccccggcggcccctcaccaccatcaccaccattcgcactcggggccggagatctcgcggattatcgtcgaccccacgactgggaagcgctactgccggggcaaagtgctgggaaagggtggctttgcaaaatgttacgagatgacagatttgacaaataacaaagtctacgccgcaaaaattattcctcacagcagagtagctaaacctcatcaaagggaaaagattgacaaagaaatagagcttcacagaattcttcatcataagcatgtagtgcagttttaccactacttcgaggacaaagaaaacatttacattctcttggaatactgcagtagaaggctacagggaagccaaaagaatgatctagagtatgttgaagaagatggacatgtggtggtacgaaaacaattcccctgtggcctgctggactgggtggaaccagaacaggctaaggcatacagttcttgactttggacaatccaagagtgaaccagaatgcagttttccttgagatacctgttttaaaaggtttttcagacaattttgcagaaaggtgcattgattcttaaattctctctgttgagagcatttcagccagaggactttggaactgtgaatatacttcctgaaggggagggagaagggaggaagctcccatgttgtttaaaggctgtaattggagcagcttttggctgcgtaactgtgaactatggccatatataattttttttcattaatttttgaagatacttgtggctggaaaagtgcattccttgttaataaactttttatttattacagcccaaagagcagtatttattatcaaaatgtctttttttttatgttgaccattttaaaccgttggcaataaagagtatgaaaacgcaagaaataatggtctcctgtct

SEQ ID NO: 309210 - DNA, 2505 bp, Homo sapiens
acctaacggcattccggaacattccacaagatggcgcccttgctttccaatcttcgggctacgggcggaggacgccttgccaggacgtcgacctcgctctgcaaggttcaggggccgacctcagacagaggctcgctctaggggcatgggcgggggccagacgggcctcgagtgggatcctggcacggttggccgatcggcccgggatcccggctgcgggcccgtgtctgccctagcgcgatgggctcgaatgcccggctccacgaatcccggcctttcacccccacggcctctcggcactgccccagctagacaccagcgagctcgtcacagcgcgggcaggcactgcggggcagctgcagacgagccttgtcatacggccggaggaggcctcgcctgcccgtgcggcgggctccgggcaccctgataccttgacacaggaggccccgggcggccgggaagggctgtgcgggggagggactgcgtctacacccgcgcccgactcgctcgggtcacggcactgccctgccaccaggcggctggggcgggggtgaggccaggcgtccgccctcgcgattctgttttctacgctgaggctcggagccttcgaagaacgggacagcggggcccacggacggctctgaaggccttcccgcggccgcaagagctctcggcggccggcgtttgaggcgcgcggctccgctgggaagcgagacccgggtggcgggacaagacttgcttcccggccacgcgcgctcggccggccgtggggcggggcataggccgtgacgtggtgtcgcgtatcgagtctccgcccccttcccgcctccccgtatataagacttcgccgagcactctcactcgcacaagtggaccggggtgttgggtgctagtcggcaccagaggcaagggtgcgaggaccacggccggctcggacgtgtgaccgcgcctagggggtggcagcgggcagtgcggggcggcaaggcgaccatggagcttttgcggactatcacctaccagccagccgccagcaccaaaatgtgcgagcaggcgctgggcaagggttgcggagcggactcgaagaagaagcggccgccgcagccccccgaggaatcgcagccacctcagtcccaggcgcaagtgcccccggcggcccctcaccaccatcaccaccattcgcactcggggccggagatctcgcggattatcgtcgaccccacgactgggaagcgctactgccggggcaaagtgctgggaaagggtggctttgcaaaatgttacgagatgacagatttgacaaataacaaagtctacgccgcaaaaattattcctcacagcagagtagctaaacctcatcaaagggaaaagattgacaaagaaatagagcttcacagaattcttcatcataagcatgtagtgcagttttaccactacttcgaggacaaagaaaacatttacattctcttggaatactgcagtagaaggtcaatggctcatattttgaaagcaagaaaggtgttgacagagccagaagttcgatactacctcaggcagattgtgtctggactgaaataccttcatgaacaagaaatcttgcacagagatctcaaactagggaacttttttattaatgaagccatggaactaaaagttggggacttcggtctggcagccaggctagaacccttggaacacagaaggagaacgatatgtggtaccccaaattatctctctcctgaagtcctcaacaaacaaggacatggctgtgaatcagacatttgggccctgggctgtgtaatgtatacaatgttactagggaggcccccatttgaaactacaaatctcaaagaaacttataggtgcataagggaagcaaggtatacaatgccgtcctcattgctggctcctgccaagcacttaattgctagtatgttgtccaaaaacccagaggatcgtcccagtttggatgacatcattcgacatgacttttttttgcagggcttcactccggacagactgtcttctagctgttgtcatacagttccagatttccacttatcaagcccagctaagaatttctttaagaaagcagctgctgctctttttggtggcaaaaaagacaaagcaagatatattgacacacataatagagtgtctaaagaagatgaagacatctacaagcttaggcatgatttgaaaaagacttcaataactcagcaacccagcaaacacaggacagatgaggaagctcccatgttgtttaaaggctgtaattggagcagcttttggctgcgtaactgtgaactatggccatatataattttttttcattaatttttgaagatacttgtggctggaaaagtgcattccttgttaataaactttttatttattacagcccaaagagcagtatttattatcaaaatgtctttttttttatgttgaccattttaaaccgttggcaataaagagtatgaaaacgcaagaaataatggtctcctgtct

SEQ ID NO: 309211 - DNA, 898 bp, Homo sapiens
agcgtgggcgcttccgataacaacactcggagctggggctgtggctatttgttgctgcgccgccaccgcccgagtcatgttccgcgatcttctcaggctctcctagcagcatccatcgccgccaccctatcttcactggcttcaccttctccttctctcttcgttgctgagcgacaagcttcctagcgctatgactgtcgtctccgtcccgcagcgggagccgctcgtcctgggtggccgccttgcgccgcttggcttttcctcccgaggttttaaaatcaaagatgggaaaatcggagaaaattgcccttccccatggccagcttgttcatggtatacacttgtatgagcaaccaaagataaacagacagaaaagcaaatataacttgccactaaccaagatcacctctgcaaaaagaaatgaaaacaacttttggcaggattctgtttcatctgacagaattcagaagcaggaaaaaaagccttttaaaaataccgagaacattaaaaattcgcatttgaagaaatcagcatttctaactgaagtgagccaaaaggaaaattatgctggggcaaagtttagtgatccaccttctcctagtgttcttccaaagcctcctagtcactggatgggaagcactgttgaaaattccaaccaaaacagggagctgatggcagtacacttaaaaacgctcctcaaagttcaaacttagatttcagatttcagtatgtgtgtaaaacataatttttcccatatccctggactcttgagaaaattggtacagaaatggaaatttgccttgttgcaacatacaattgcaaaagatgagtttaaaaaatatttccattcccaaaccacgccgtgggaattttaaaattcttttaaaatttttgtggt

SEQ ID NO: 309212 - DNA, 1542 bp, Homo sapiens
aggaggcgaggccgggtgggggcagctggggaaggactgggcccggctttcggcctcccggctatcgggagccccagtcctagtcggtgaaacgcggagacggcctctaacgtcccgccgtagggggtggagtgggctccgagcggctgggtttcgtttggttggagttgtgccaaaatgtgaggtgcccggtgtgggacgcgcagtccagttggggctctgcccgcctcgggcctgacctacttagtggttccaagttaagagttggcaggagccgcacaaaactgattttattacttttgccactgtggtacttcgtgttagtgtgtccagagtaagttttcagaagagttagcaattgaattgacttagcccgtctgattgcagtgctattgcattaggataaaatggatagaagtttaaataggattaagtctacgaaatgatttcaaagtcttgtcagaataacgttttatggacttaagttcaatgacttaatcttcgtaataatgaaatgaaaaagttcccgttatttagtgaagaatgttgcattgaattagagatttgcggtttatctgtgcccttgggaaaaaatttgcccaccttgtttctttaaattatcgtctcaatgtctcccttttaaaattccacgacttttgaaatatccgtgattacctaaaagcttttgtgcttgtttcctggcctgttttctagaacaggtactaactagggagctctggcagtgaaccttattgacgtggaaagttgtggtcctctttcgtgtcgtgtcttgcttactaccgcgttacaagtgttggtagtgcagtgatctagtggattaccttacgcttttccatcctttcaagacttcctataaggcccacttaagttgggaaagattaaggtgagtgaagcagcgttcttgaagcagttactaaaccagaaaggaggtacacagcaaagattgtttctggcactcgtatttggaagagagctcattagtcttccttacagttgtagaaaggtggacttgggttatttcagactttttttagtttgacattttagaactggttcacgttgcatactggtaactagcagtggtgattaactgcatttttagtggcgaacaagagtgaacttaaaagtcaagggaaatttaagttttttgttgttttttttttcttgagacagagtctgcctctatcgcactccaggctggaatgcagtggcacgatcgatctctgctcactgcatcctccccttcccaggctgaagggatcccgcctcagccagcctcccgaggcgcgtgttaccacgccgggctgatttttatatttgtagtagacatggggtttcgctatgttgcccaggctggtctcgaactccttgagcttgagcgatctgcttgccttgacctcccaaagtgctgggattacaggcgtgagccaccatgcccaattaaagtttttgtaattttcagcttttattttagatcaaggaggtacttgtgcaggtttgctacatgggtatatttcgtga

SEQ ID NO: 309213 - DNA, 2683 bp, Homo sapiens
agcgtgggcgcttccgataacaacactcggagctggggctgtggctatttgttgctgcgccgccaccgcccgagtcatgttccgcgatcttctcaggctctcctagcagcatccatcgccgccaccctatcttcactggcttcaccttctccttctctcttcgttgctgagcgacaagcttcctagcgctatgactgtcgtctccgtcccgcagcgggagccgctcgtcctgggtggccgccttgcgccgcttggcttttcctcccgaggttactttggggccctcccgatggtgaccacggctccgcctcctttaccccggatcccggacccccgggcactgcccccgaccctcttcctccctcatttcctagggggagatggcccgtgtctgaccccccagcctcgcgctccagcagctctgcccaaccgcagcctcgccgtggcgggaggcactcctcgggcagcgccgaagaagcggcgaaagaagaaggtgcgggccagccccgcagggcagctgcccagccgcttccaccagtaccagcagcaccggccgagtctggagggcggccggagccccgcgaccggcccgagcggagcgcaggaggtcccgggcccggccgccgccttggccccgagtcctgcagccgcagccggcacggagggagccagccccgaccttgccccgctgcggcccgcggctcccggccaaacccccctcaggaaagaggttttaaaatcaaagatgggaaaatcggagaaaattgcccttccccatggccagcttgttcatggtatacacttgtatgagcaaccaaagataaacagacagaaaagcaaatataacttgccactaaccaagatcacctctgcaaaaagaaatgaaaacaacttttggcaggattctgtttcatctgacagaattcagaagcaggaaaaaaagccttttaaaaataccgagaacattaaaaattcgcatttgaagaaatcagcatttctaactgaagtgagccaaaaggaaaattatgctggggcaaagtttagtgatccaccttctcctagtgttcttccaaagcctcctagtcactggatgggaagcactgttgaaaattccaaccaaaacagggagctgatggcagtacacttaaaaacgctcctcaaagttcaaacttagatttcagatttcagtatgtgtgtaaaacataatttttcccatatccctggactcttgagaaaattggtacagaaatggaaatttgccttgttgcaacatacaattgcaaaagatgagtttaaaaaattacatacaaacagcttgtattatattttatattttgtaaatactgtataccatgtattatgtgtatattgttcatacttgagaggtatattatagttttgttatgaaagtatgtattttgccctgcccacattgcaggtgttttgtatatatacaatggataaattttaagtgtgtgctaaggcacatggaagaccgattttatttgcacaaggtactgagatttttttcaagaaacagctgtcaaatctcaaggtgaagatctaaatgtgaacagtttactaatgcactactgaagtttaaatctgtggcacaatcaatgtaagcatggggtttgtttctctaaattgatttgtaatctgaaattactgaacaactcctattcccatttttgctaaactcaatttctggttttggtatatatccattccagcttaatgcctctaattttaatgccaacaaaattggttgtaatcaaattttaaaataataataatttggcccccccttttaaaatagtcttgactctttgtgtgtgactgtttctcatgtttgaatgtgtgactaggagatgattttgtgtggttggatttttttgacttctactttactggctgagtgtgagccgccatgcctggccataatctacattttcttaccaggagcagcattgaggtttttgagcatagtacttgactactctagaggctgagacgggagcatctcttgagcctgagaagtggagattgcaattgagctaggatcaggccactgcactccagcctgggtaacagacgctgtctcaaaaaaaaggccaagagaaagtaagggagacagattttgagtgggaatgttaagcaatcaggtcaagtaaagaagatcgaatatacaaaggaacttctgtttgatgttttgtgtgagtcaccattccttccttacaaatgcagatacaccttcctcacaaatggaagggaagctcatttagaagtttagtttgaagatgcccccaatttttagtcaccaattttagcttttgttagtaatgtgttgtaaatattaatactaatgactgactacagtgagttctgacatctctcccaaatcagtttgtgattctagaaagggacacattaacaggttttaacaacacatttttgcacatggttataaaaattcctacacaatgtaatataagtcctaccgcctcaaccacccttctttccttgtccaacatttctcagctcttgtcattttgagcagtatgtctgcagtttaatgtgtgagggcttatgtgtaacgtatgttcaggaaatagaaggataaatggcagagctgaaagtttaggtgggatggggagaaaagacaaatataactaaaatacaa

SEQ ID NO: 309214 - DNA, 2629 bp, Homo sapiens
agcgtgggcgcttccgataacaacactcggagctggggctgtggctatttgttgctgcgccgccaccgcccgagtcatgttccgcgatcttctcaggctctcctagcagcatccatcgccgccaccctatcttcactggcttcaccttctccttctctcttcgttgctgagcgacaagcttcctagcgctatgactgtcgtctccgtcccgcagcgggagccgctcgtcctgggtggccgccttgcgccgcttggcttttcctcccgaggttactttggggccctcccgatggtgaccacggctccgcctcctttaccccggatcccggacccccgggcactgcccccgaccctcttcctccctcatttcctagggggagatggcccgtgtctgaccccccagcctcgcgctccagcagctctgcccaaccgcagcctcgccgtggcgggaggcactcctcgggcagcgccgaagaagcggcgaaagaagaaggtgcgggccagccccgcagggcagctgcccagccgcttccaccagtaccagcagcaccggccgagtctggagggcggccggagccccgcgaccggcccgagcggagcgcaggaggtcccgggcccggccgccgccttggccccgagtcctgcagccgcagccggcacggagggagccagccccgaccttgccccgctgcggcccgcggctcccggccaaacccccctcaggaaagaggttttaaaatcaaagatgggaaaatcggagaaaattgcccttccccatggccagcttgttcatggtatacacttgtatgagcaaccaaagataaacagacagaaaagcaaatataacttgccactaaccaagatcacctctgcaaaaagaaatgaaaacaacttttggcaggattctgtttcatctgacagaattcagaagcaggaaaaaaagccttttaaaaataccgagaacattaaaaattcgcatttgaagaaatcagcatttctaactgaagtgagccaaaaggaaaattatgctggggcaaagtttagtgatccaccttctcctagtgttcttccaaagcctcctagtcactggatgggaagcactgttgaaaattccaaccaaaacagggagctgatggcagtacacttaaaaacgctcctcaaagttcaaacttagatttcagatttcagtatgtgtgtaaaacataatttttcccatatccctggactcttgagaaaattggtacagaaatggaaatttgccttgttgcaacatacaattgcaaaagatgagtttaaaaaattacatacaaacagcttgtattatattttatattttgtaaatactgtataccatgtattatgtgtatattgttcatacttgagaggtatattatagttttgttatgaaagtatgtattttgccctgcccacattgcaggtgttttgtatatatacaatggataaattttaagtgtgtgctaaggcacatggaagaccgattttatttgcacaaggtactgagatttttttcaagaaacagctgtcaaatctcaaggtgaagatctaaatgtgaacagtttactaatgcactactgaagtttaaatctgtggcacaatcaatgtaagcatggggtttgtttctctaaattgatttgtaatctgaaattactgaacaactcctattcccatttttgctaaactcaatttctggttttggtatatatccattccagcttaatgcctctaattttaatgccaacaaaattggttgtaatcaaattttaaaataataataatttggcccccccttttaaaatagtcttgactctttgtgtgtgactgtttctcatgtttgaatgtgtgactaggagatgattttgtgtggttggatttttttgacttctactttactggctgagtgtgagccgccatgcctggccataatctacattttcttaccaggagcagcattgaggtttttgagcatagtacttgactactctagaggctgagacgggagcatctcttgagcctgagaagtggagattgcaattgagctaggatcaggccactgcactccagcctgggtaacagacgctgtctcaaaacaggtcaagtaaagaagatcgaatatacaaaggaacttctgtttgatgttttgtgtgagtcaccattccttccttacaaatgcagatacaccttcctcacaaatggaagggaagctcatttagaagtttagtttgaagatgcccccaatttttagtcaccaattttagcttttgttagtaatgtgttgtaaatattaatactaatgactgactacagtgagttctgacatctctcccaaatcagtttgtgattctagaaagggacacattaacaggttttaacaacacatttttgcacatggttataaaaattcctacacaatgtaatataagtcctaccgcctcaaccacccttctttccttgtccaacatttctcagctcttgtcattttgagcagtatgtctgcagtttaatgtgtgagggcttatgtgtaacgtatgttcaggaaatagaaggataaatggcagagctgaaagtttaggtgggatggggagaaaagacaaatataactaaaatacaa

SEQ ID NO: 309215 - DNA, 2335 bp, Homo sapiens
  misc_feature (4)..(4): n is a, c, g, or t
  misc_feature (75)..(75): n is a, c, g, or t
  misc_feature (82)..(82): n is a, c, g, or t
  misc_feature (86)..(86): n is a, c, g, or t
  misc_feature (100)..(100): n is a, c, g, or t
cacnccctcttacccggtccgaccccggacgccccacctttctcctcattctagggagtggccgttttaccccanctcggtncagngtttgccaaccgancttcgcgtgcggagcaccttcggcgcgcggagagcgcgaagagaagtgcgggccagccccgcagggcagctgcccagccgcttccaccagtaccagcagcaccggccgagtctggagggcggccggagccccgcgaccggcccgagcggagcgcaggaggtcccgggcccggccgccgccttggccccgagtcctgcagccgcagccggcacggagggagccagccccgaccttgccccgctgcggcccgcggctcccggccaaacccccctcaggaaagaggttttaaaatcaaagatgggaaaatcggagaaaattgcccttccccatggccagcttgttcatggtatacacttgtatgagcaaccaaagataaacagacagaaaagcaaatataacttgccactaaccaagatcacctctgcaaaaagaaatgaaaacaacttttggcaggattctgtttcatctgacagaattcagaagcaggaaaaaaagccttttaaaaataccgagaacattaaaaattcgcatttgaagaaatcagcatttctaactgaagtgagccaaaaggaaaattatgctggggcaaagtttagtgatccaccttctcctagtgttcttccaaagcctcctagtcactggatgggaagcactgttgaaaattccaaccaaaacagggagctgatggcagtacacttaaaaacgctcctcaaagttcaaacttagatttcagatttcagtatgtgtgtaaaacataatttttcccatatccctggactcttgagaaaattggtacagaaatggaaatttgccttgttgcaacatacaattgcaaaagatgagtttaaaaaattacatacaaacagcttgtattatattttatattttgtaaatactgtataccatgtattatgtgtatattgttcatacttgagaggtatattatagttttgttatgaaagtatgtattttgccctgcccacattgcaggtgttttgtatatatacaatggataaattttaagtgtgtgctaaggcacatggaagaccgattttatttgcacaaggtactgagatttttttcaagaaacagctgtcaaatctcaaggtgaagatctaaatgtgaacagtttactaatgcactactgaagtttaaatctgtggcacaatcaatgtaagcatggggtttgtttctctaaattgatttgtaatctgaaattactgaacaactcctattcccatttttgctaaactcaatttctggttttggtatatatccattccagcttaatgcctctaattttaatgccaacaaaattggttgtaatcaaattttaaaataataataatttggcccccccttttaaaatagtcttgactctttgtgtgtgactgtttctcatgtttgaatgtgtgactaggagatgattttgtgtggttggatttttttgacttctactttactggctgagtgtgagccgccatgcctggccataatctacattttcttaccaggagcagcattgaggtttttgagcatagtacttgactactctagaggctgagacgggagcatctcttgagcctgagaagtggagattgcaattgagctaggatcaggccactgcactccagcctgggtaacagacgctgtctcaaaaaaaaggccaagagaaagtaagggagacagattttgagtgggaatgttaagcaatcaggtcaagtaaagaagatcgaatatacaaaggaacttctgtttgatgttttgtgtgagtcaccattccttccttacaaatgcagatacaccttcctcacaaatggaagggaagctcatttagaagtttagtttgaagatgcccccaatttttagtcaccaattttagcttttgttagtaatgtgttgtaaatattaatactaatgactgactacagtgagttctgacatctctcccaaatcagtttgtgattctagaaagggacacattaacaggttttaacaacacatttttgcacatggttataaaaattcctacacaatgtaatataagtcctaccgcctcaaccacccttctttccttgtccaacatttctcagctcttgtcattttgagcagtatgtctgcagtttaatgtgtgagggcttatgtgtaacgtatgttcaggaaatagaaggataaatggcagagctgaaagtttaggtgggatggggagaaaagacaaatataactaaaatacaa

SEQ ID NO: 309216 - DNA, 2857 bp, Homo sapiens
aggaggcgaggccgggtgggggcagctggggaaggactgggcccggctttcggcctcccggctatcgggagccccagtcctagtcggtgaaacgcggagacggcctctaacgtcccgccgtagggggtggagtgggctccgagcggctgggtttcgtttggttggagttgtgccaaaatgtgaggtgcccggtgtgggacgcgcagtccagttggggctctgcccgcctcgggcctgacctacttagtggttccaagttaagagttggcaggagccgcacaaaactgattttattacttttgccactgtggtacttcgtgttagtgtgtccagagtaagttttcagaagagttagcaattgaattgacttagcccgtctgattgcagtgctattgcattaggataaaatggatagaagtttaaataggattaagtctacgaaatgatttcaaagtcttgtcagaataacgttttatggacttaagttcaatgacttaatcttcgtaataatgaaatgaaaaagttcccgttatttagtgaagaatgttgcattgaattagagatttgcggtttatctgtgcccttgggaaaaaatttgcccaccttgtttctttaaattatcgtctcaatgtctcccttttaaaattccacgacttttgaaatatccgtgattacctaaaagcttttgtgcttgtttcctggcctgttttctagaacaggtactaactagggagctctggcagtgaaccttattgacgtggaaagttgtggtcctctttcgtgtcgtgtcttgcttactaccgcgttacaagtgttggtagtgcagtgatctagtggattaccttacgcttttccatcctttcaagacttcctataaggcccacttaagttgggaaagattaaggttttaaaatcaaagatgggaaaatcggagaaaattgcccttccccatggccagcttgttcatggtatacacttgtatgagcaaccaaagataaacagacagaaaagcaaatataacttgccactaaccaagatcacctctgcaaaaagaaatgaaaacaacttttggcaggattctgtttcatctgacagaattcagaagcaggaaaaaaagccttttaaaaataccgagaacattaaaaattcgcatttgaagaaatcagcatttctaactgaagtgagccaaaaggaaaattatgctggggcaaagtttagtgatccaccttctcctagtgttcttccaaagcctcctagtcactggatgggaagcactgttgaaaattccaaccaaaacagggagctgatggcagtacacttaaaaacgctcctcaaagttcaaacttagatttcagatttcagtatgtgtgtaaaacataatttttcccatatccctggactcttgagaaaattggtacagaaatggaaatttgccttgttgcaacatacaattgcaaaagatgagtttaaaaaattacatacaaacagcttgtattatattttatattttgtaaatactgtataccatgtattatgtgtatattgttcatacttgagaggtatattatagttttgttatgaaagtatgtattttgccctgcccacattgcaggtgttttgtatatatacaatggataaattttaagtgtgtgctaaggcacatggaagaccgattttatttgcacaaggtactgagatttttttcaagaaacagctgtcaaatctcaaggtgaagatctaaatgtgaacagtttactaatgcactactgaagtttaaatctgtggcacaatcaatgtaagcatggggtttgtttctctaaattgatttgtaatctgaaattactgaacaactcctattcccatttttgctaaactcaatttctggttttggtatatatccattccagcttaatgcctctaattttaatgccaacaaaattggttgtaatcaaattttaaaataataataatttggcccccccttttaaaatagtcttgactctttgtgtgtgactgtttctcatgtttgaatgtgtgactaggagatgattttgtgtggttggatttttttgacttctactttactggctgagtgtgagccgccatgcctggccataatctacattttcttaccaggagcagcattgaggtttttgagcatagtacttgactactctagaggctgagacgggagcatctcttgagcctgagaagtggagattgcaattgagctaggatcaggccactgcactccagcctgggtaacagacgctgtctcaaaaaaaaggccaagagaaagtaagggagacagattttgagtgggaatgttaagcaatcaggtcaagtaaagaagatcgaatatacaaaggaacttctgtttgatgttttgtgtgagtcaccattccttccttacaaatgcagatacaccttcctcacaaatggaagggaagctcatttagaagtttagtttgaagatgcccccaatttttagtcaccaattttagcttttgttagtaatgtgttgtaaatattaatactaatgactgactacagtgagttctgacatctctcccaaatcagtttgtgattctagaaagggacacattaacaggttttaacaacacatttttgcacatggttataaaaattcctacacaatgtaatataagtcctaccgcctcaaccacccttctttccttgtccaacatttctcagctcttgtcattttgagcagtatgtctgcagtttaatgtgtgagggcttatgtgtaacgtatgttcaggaaatagaaggataaatggcagagctgaaagtttaggtgggatggggagaaaagacaaatataactaaaatacaa

SEQ ID NO: 309217 - DNA, 2212 bp, Homo sapiens
atatccatgttgtacccagtgtttagctcccaaattcacttgtaagtgagaacttgcgatatttggttttctgtttctgcattaattcgtctagggtaatggcccccagctacatacgtgttgtcacaaagaacataattttgttcttttctatggctgtgggcaaacttaaacacaacaaaactagatatgtgatatgaggttcataactgatttttatctagaaactatatttacttttgtgttcttgtctttgtaggttttaaaatcaaagatgggaaaatcggagaaaattgcccttccccatggccagcttgttcatggtatacacttgtatgagcaaccaaagataaacagacagaaaagcaaatataacttgccactaaccaagatcacctctgcaaaaagaaatgaaaacaacttttggcaggattctgtttcatctgacagaattcagaagcaggaaaaaaagccttttaaaaataccgagaacattaaaaattcgcatttgaagaaatcagcatttctaactgaagtgagccaaaaggaaaattatgctggggcaaagtttagtgatccaccttctcctagtgttcttccaaagcctcctagtcactggatgggaagcactgttgaaaattccaaccaaaacagggagctgatggcagtacacttaaaaacgctcctcaaagttcaaacttagatttcagatttcagtatgtgtgtaaaacataatttttcccatatccctggactcttgagaaaattggtacagaaatggaaatttgccttgttgcaacatacaattgcaaaagatgagtttaaaaaattacatacaaacagcttgtattatattttatattttgtaaatactgtataccatgtattatgtgtatattgttcatacttgagaggtatattatagttttgttatgaaagtatgtattttgccctgcccacattgcaggtgttttgtatatatacaatggataaattttaagtgtgtgctaaggcacatggaagaccgattttatttgcacaaggtactgagatttttttcaagaaacagctgtcaaatctcaaggtgaagatctaaatgtgaacagtttactaatgcactactgaagtttaaatctgtggcacaatcaatgtaagcatggggtttgtttctctaaattgatttgtaatctgaaattactgaacaactcctattcccatttttgctaaactcaatttctggttttggtatatatccattccagcttaatgcctctaattttaatgccaacaaaattggttgtaatcaaattttaaaataataataatttggcccccccttttaaaatagtcttgactctttgtgtgtgactgtttctcatgtttgaatgtgtgactaggagatgattttgtgtggttggatttttttgacttctactttactggctgagtgtgagccgccatgcctggccataatctacattttcttaccaggagcagcattgaggtttttgagcatagtacttgactactctagaggctgagacgggagcatctcttgagcctgagaagtggagattgcaattgagctaggatcaggccactgcactccagcctgggtaacagacgctgtctcaaaaaaaaggccaagagaaagtaagggagacagattttgagtgggaatgttaagcaatcaggtcaagtaaagaagatcgaatatacaaaggaacttctgtttgatgttttgtgtgagtcaccattccttccttacaaatgcagatacaccttcctcacaaatggaagggaagctcatttagaagtttagtttgaagatgcccccaatttttagtcaccaattttagcttttgttagtaatgtgttgtaaatattaatactaatgactgactacagtgagttctgacatctctcccaaatcagtttgtgattctagaaagggacacattaacaggttttaacaacacatttttgcacatggttataaaaattcctacacaatgtaatataagtcctaccgcctcaaccacccttctttccttgtccaacatttctcagctcttgtcattttgagcagtatgtctgcagtttaatgtgtgagggcttatgtgtaacgtatgttcaggaaatagaaggataaatggcagagctgaaagtttaggtgggatggggagaaaagacaaatataactaaaatacaa

SEQ ID NO: 309218 - DNA, 2562 bp, Homo sapiens
agcgtgggcgcttccgataacaacactcggagctggggctgtggctatttgttgctgcgccgccaccgcccgagtcatgttccgcgatcttctcaggctctcctagcagcatccatcgccgccaccctatcttcactggcttcaccttctccttctctcttcgttgctgagcgacaagcttcctagcgctatgactgtcgtctccgtcccgcagcgggagccgctcgtcctgggtggccgccttgcgccgcttggcttttcctcccgaggttactttggggccctcccgatggtgaccacggctccgcctcctttaccccggatcccggacccccgggcactgcccccgaccctcttcctccctcatttcctagggggagatggcccgtgtctgaccccccagcctcgcgctccagcagctctgcccaaccgcagcctcgccgtggcgggaggcactcctcgggcagcgccgaagaagcggcgaaagaagaaggtgcgggccagccccgcagggcagctgcccagccgcttccaccagtaccagcagcaccggccgagtctggagggcggccggagccccgcgaccggcccgagcggagcgcaggaggtcccgggcccggccgccgccttggccccgagtcctgcagccgcagccggcacggagggagccagccccgaccttgccccgctgcggcccgcggctcccggccaaacccccctcaggaaagaggttttaaaatcaaagatgggaaaatcggagaaaattgcccttccccatggccagcttgttcatggtatacacttgtatgagcaaccaaagataaacagacagaaaagcaaatataacttgccactaaccaagatcacctctgcaaaaagaaatgaaaacaacttttggcaggattctgtttcatctgacagaattcagaagcaggaaaaaaagccttttaaaaataccgagaacattaaaaattcgcatttgaagaaatcagcatttctaactgaagtgagccaaaaggaaaattaaaaacgctcctcaaagttcaaacttagatttcagatttcagtatgtgtgtaaaacataatttttcccatatccctggactcttgagaaaattggtacagaaatggaaatttgccttgttgcaacatacaattgcaaaagatgagtttaaaaaattacatacaaacagcttgtattatattttatattttgtaaatactgtataccatgtattatgtgtatattgttcatacttgagaggtatattatagttttgttatgaaagtatgtattttgccctgcccacattgcaggtgttttgtatatatacaatggataaattttaagtgtgtgctaaggcacatggaagaccgattttatttgcacaaggtactgagatttttttcaagaaacagctgtcaaatctcaaggtgaagatctaaatgtgaacagtttactaatgcactactgaagtttaaatctgtggcacaatcaatgtaagcatggggtttgtttctctaaattgatttgtaatctgaaattactgaacaactcctattcccatttttgctaaactcaatttctggttttggtatatatccattccagcttaatgcctctaattttaatgccaacaaaattggttgtaatcaaattttaaaataataataatttggcccccccttttaaaatagtcttgactctttgtgtgtgactgtttctcatgtttgaatgtgtgactaggagatgattttgtgtggttggatttttttgacttctactttactggctgagtgtgagccgccatgcctggccataatctacattttcttaccaggagcagcattgaggtttttgagcatagtacttgactactctagaggctgagacgggagcatctcttgagcctgagaagtggagattgcaattgagctaggatcaggccactgcactccagcctgggtaacagacgctgtctcaaaaaaaaggccaagagaaagtaagggagacagattttgagtgggaatgttaagcaatcaggtcaagtaaagaagatcgaatatacaaaggaacttctgtttgatgttttgtgtgagtcaccattccttccttacaaatgcagatacaccttcctcacaaatggaagggaagctcatttagaagtttagtttgaagatgcccccaatttttagtcaccaattttagcttttgttagtaatgtgttgtaaatattaatactaatgactgactacagtgagttctgacatctctcccaaatcagtttgtgattctagaaagggacacattaacaggttttaacaacacatttttgcacatggttataaaaattcctacacaatgtaatataagtcctaccgcctcaaccacccttctttccttgtccaacatttctcagctcttgtcattttgagcagtatgtctgcagtttaatgtgtgagggcttatgtgtaacgtatgttcaggaaatagaaggataaatggcagagctgaaagtttaggtgggatggggagaaaagacaaatataactaaaatacaa

SEQ ID NO: 309219 - DNA, 1808 bp, Homo sapiens
agcgtgggcgcttccgataacaacactcggagctggggctgtggctatttgttgctgcgccgccaccgcccgagtcatgttccgcgatcttctcaggctctcctagcagcatccatcgccgccaccctatcttcactggcttcaccttctccttctctcttcgttgctgagcgacaagcttcctagcgctatgactgtcgtctccgtcccgcagcgggagccgctcgtcctgggtggccgccttgcgccgcttggcttttcctcccgaggttactttggggccctcccgatggtgaccacggctccgcctcctttaccccggatcccggacccccgggcactgcccccgaccctcttcctccctcatttcctagggggagatggcccgtgtctgaccccccagcctcgcgctccagcagctctgcccaaccgcagcctcgccgtggcgggaggcactcctcgggcagcgccgaagaagcggcgaaagaagaaggtgcgggccagccccgcagggcagctgcccagccgcttccaccagtaccagcagcaccggccgagtctggagggcggccggagccccgcgaccggcccgagcggagcgcaggaggtcccgggcccggccgccgccttggccccgagtcctgcagccgcagccggcacggagggagccagccccgaccttgccccgctgcggcccgcggctcccggccaaacccccctcaggaaagaggttttaaaatcaaagatgggaaaatcggagaaaattgcccttccccatggccagcttgttcatggtatacacttgtatgagcaaccaaagataaacagacagaaaagcaaatataacttgccactaaccaagatcacctctgcaaaaagaaatgaaaacaacttttggcaggattctgtttcatctgacagaattcagaagcaggaaaaaaagccttttaaaaataccgagaacattaaaaattcgcatttgaagaaatcagcatttctaactgaagtgagccaaaaggaaaattatgctggggcaaagtttagtgatccaccttctcctagtgttcttccaaagcctcctagtcactggatgggaagcactgttgaaaattccaaccaaaacagggagctgatggcagtacacttaaaaacgctcctcaaagttcaaacttagatttcagatttcagtatgtgtgtaaaacataatttttcccatatccctggactcttgagaaaattggtacagaaatggaaatttgccttgttgcaacatacaattgcaaaagatgagtttaaaaaattacatacaaacagcttgtattatattttatattttgtaaatactgtataccatgtattatgtgtatattgttcatacttgagaggtatattatagttttgttatgaaagtatgtattttgccctgcccacattgcaggtgttttgtatatatacaatggataaattttaagtgtgtgctaaggcacatggaagaccgattttatttgcacaaggtactgagatttttttcaagaaacagctgtcaaatctcaaggtgaagatctaaatgtgaacagtttactaatgcactactgaagtttaaatctgtggcacaatcaatgtaagcatggggtttgtttctctaaattgatttgtaatctgaaattactgaacaactcctattcccatttttgctaaactcaatttctggttttggtatatatccattccagcttaatgcctctaattttaatgccaacaaaattggttgtaatcaaattttaaaataataataatttggccccccc

SEQ ID NO: 309220 - DNA, 2206 bp, Homo sapiens
agcgtgggcgcttccgataacaacactcggagctggggctgtggctatttgttgctgcgccgccaccgcccgagtcatgttccgcgatcttctcaggctctcctagcagcatccatcgccgccaccctatcttcactggcttcaccttctccttctctcttcgttgctgagcgacaagcttcctagcgctatgactgtcgtctccgtcccgcagcgggagccgctcgtcctgggtggccgccttgcgccgcttggcttttcctcccgaggttactttggggccctcccgatggtgaccacggctccgcctcctttaccccggatcccggacccccgggcactgcccccgaccctcttcctccctcatttcctaggttttaaaatcaaagatgggaaaatcggagaaaattgcccttccccatggccagcttgttcatggtatacacttgtatgagcaaccaaagataaacagacagaaaagcaaatataacttgccactaaccaagatcacctctgcaaaaagaaatgaaaacaacttttggcaggattctgtttcatctgacagaattcagaagcaggaaaaaaagccttttaaaaataccgagaacattaaaaattcgcatttgaagaaatcagcatttctaactgaagtgagccaaaaggaaaattaaaaacgctcctcaaagttcaaacttagatttcagatttcagtatgtgtgtaaaacataatttttcccatatccctggactcttgagaaaattggtacagaaatggaaatttgccttgttgcaacatacaattgcaaaagatgagtttaaaaaattacatacaaacagcttgtattatattttatattttgtaaatactgtataccatgtattatgtgtatattgttcatacttgagaggtatattatagttttgttatgaaagtatgtattttgccctgcccacattgcaggtgttttgtatatatacaatggataaattttaagtgtgtgctaaggcacatggaagaccgattttatttgcacaaggtactgagatttttttcaagaaacagctgtcaaatctcaaggtgaagatctaaatgtgaacagtttactaatgcactactgaagtttaaatctgtggcacaatcaatgtaagcatggggtttgtttctctaaattgatttgtaatctgaaattactgaacaactcctattcccatttttgctaaactcaatttctggttttggtatatatccattccagcttaatgcctctaattttaatgccaacaaaattggttgtaatcaaattttaaaataataataatttggcccccccttttaaaatagtcttgactctttgtgtgtgactgtttctcatgtttgaatgtgtgactaggagatgattttgtgtggttggatttttttgacttctactttactggctgagtgtgagccgccatgcctggccataatctacattttcttaccaggagcagcattgaggtttttgagcatagtacttgactactctagaggctgagacgggagcatctcttgagcctgagaagtggagattgcaattgagctaggatcaggccactgcactccagcctgggtaacagacgctgtctcaaaaaaaaggccaagagaaagtaagggagacagattttgagtgggaatgttaagcaatcaggtcaagtaaagaagatcgaatatacaaaggaacttctgtttgatgttttgtgtgagtcaccattccttccttacaaatgcagatacaccttcctcacaaatggaagggaagctcatttagaagtttagtttgaagatgcccccaatttttagtcaccaattttagcttttgttagtaatgtgttgtaaatattaatactaatgactgactacagtgagttctgacatctctcccaaatcagtttgtgattctagaaagggacacattaacaggttttaacaacacatttttgcacatggttataaaaattcctacacaatgtaatataagtcctaccgcctcaaccacccttctttccttgtccaacatttctcagctcttgtcattttgagcagtatgtctgcagtttaatgtgtgagggcttatgtgtaacgtatgttcaggaaatagaaggataaatggcagagctgaaagtttaggtgggatggggagaaaagacaaatataactaaaatacaa

SEQ ID NO: 309221 - DNA, 1924 bp, Homo sapiens
agcgtgggcgcttccgataacaacactcggagctggggctgtggctatttgttgctgcgccgccaccgcccgagtcatgttccgcgatcttctcaggctctcctagcagcatccatcgccgccaccctatcttcactggcttcaccttctccttctctcttcgttgctgagcgacaagcttcctagcgctatgactgtcgtctccgtcccgcagcgggagccgctcgtcctgggtggccgccttgcgccgcttggcttttcctcccgaggttactttggggccctcccgatggtgaccacggctccgcctcctttaccccggatcccggacccccgggcactgcccccgaccctcttcctccctcatttcctagggggagatggcccgtgtctgaccccccagcctcgcgctccagcagctctgcccaaccgcagcctcgccgtggcgggaggcactcctcgggcagcgccgaagaagcggcgaaagaagaaggtgcgggccagccccgcagggcagctgcccagccgcttccaccagtaccagcagcaccggccgagtctggagggcggccggagccccgcgaccggcccgagcggagcgcaggaggtcccgggcccggccgccgccttggccccgagtcctgcagccgcagccggcacggagggagccagccccgaccttgccccgctgcggcccgcggctcccggccaaacccccctcaggaaagaggttttaaaatcaaagatgggaaaatcggagaaaattgcccttccccatggccagcttgttcatggtatacacttgtatgagcaaccaaagataaacagacagaaaagcaaatataacttgccactaaccaagatcacctctgcaaaaagaaatgaaaacaacttttggcaggattctgtttcatctgacagaattcagaagcaggaaaaaaagccttttaaaaataccgagaacattaaaaattcgcatttgaagaaatcagcatttctaactgaagtgagccaaaaggaaaattatgctggggcaaagtttagtgatccaccttctcctagtgttcttccaaagcctcctagtcactggatgggaagcactgttgaaaattccaaccaaaacagggagctgatggcagtacacttaaaaacgctcctcaaagttcaaacttagatttcagatttcagtatgtgtgtaaaacataatttttcccatatccctggactcttgagaaaattggtacagaaatggaaatttgccttgttgcaacatacaattgcaaaagatgagtttaaaaaattacatacaaacagcttgtattatattttatattttgtaaatactgtataccatgtattatgtgtatattgttcatacttgagaggtatattatagttttgttatgaaagtatgtattttgccctgcccacattgcaggtgttttgtatatatacaatggataaattttaagtgtgtgctaaggcacatggaagaccgattttatttgcacaaggtactgagatttttttcaagaaacagctgtcaaatctcaaggtgaagatctaaatgtgaacagtttactaatgcactactgaagtttaaatctgtggcacaatcaatgtaagcatggggtttgtttctctaaattgatttgtaatctgaaattactgaacaactcctattcccatttttgctaaactcaatttctggttttggtatatatccattccagcttaatgccctatttattgcacaaatgttgtattaatttacatatatattgggcccagaaaaagagaagaaaaaaaattttggggcagcaaaaagttaaacatctttggggggcagagagaggaaggcatgtcagagctgacgaggggtccaacaaaggggagggtgaaagtgggatgtaagacaaaaagg

SEQ ID NO: 309222 - DNA, 2157 bp, Homo sapiens
atatccatgttgtacccagtgtttagctcccaaattcacttgtaagtgagaacttgcgatatttggttttctgtttctgcattaattcgtctagggtaatggcccccagctacatacgtgttgtcacaaagaacataattttgttcttttctatggctgtgggcaaacttaaacacaacaaaactagatatgtgatatgaggttcataactgatttttatctagaaactatatttacttttgtgttcttgtctttgtaggttttaaaatcaaagatgggaaaatcggagaaaattgcccttccccatggccagcttgttcatggtatacacttgtatgagcaaccaaagataaacagacagaaaagcaaatataacttgccactaaccaagatcacctctgcaaaaagaaatgaaaacaacttttggcaggattctgtttcatctgacagaattcagaagcaggaaaaaaagccttttaaaaataccgagaacattaaaaattcgcatttgaagaaatcagcatttctaactgaagtgagccaaaaggaaaattatgctggggcaaagtttagtgatccaccttctcctagtgttcttccaaagcctcctagtcactggatgggaagcactgttgaaaattccaaccaaaacagggagctgatggcagtacacttaaaaacgctcctcaaagttcaaacttagatttcagatttcagtatgtgtgtaaaacataatttttcccatatccctggactcttgagaaaattggtacagaaatggaaatttgccttgttgcaacatacaattgcaaaagatgagtttaacatgtattatgtgtatattgttcatacttgagaggtatattatagttttgttatgaaagtatgtattttgccctgcccacattgcaggtgttttgtatatatacaatggataaattttaagtgtgtgctaaggcacatggaagaccgattttatttgcacaaggtactgagatttttttcaagaaacagctgtcaaatctcaaggtgaagatctaaatgtgaacagtttactaatgcactactgaagtttaaatctgtggcacaatcaatgtaagcatggggtttgtttctctaaattgatttgtaatctgaaattactgaacaactcctattcccatttttgctaaactcaatttctggttttggtatatatccattccagcttaatgcctctaattttaatgccaacaaaattggttgtaatcaaattttaaaataataataatttggcccccccttttaaaatagtcttgactctttgtgtgtgactgtttctcatgtttgaatgtgtgactaggagatgattttgtgtggttggatttttttgacttctactttactggctgagtgtgagccgccatgcctggccataatctacattttcttaccaggagcagcattgaggtttttgagcatagtacttgactactctagaggctgagacgggagcatctcttgagcctgagaagtggagattgcaattgagctaggatcaggccactgcactccagcctgggtaacagacgctgtctcaaaaaaaaggccaagagaaagtaagggagacagattttgagtgggaatgttaagcaatcaggtcaagtaaagaagatcgaatatacaaaggaacttctgtttgatgttttgtgtgagtcaccattccttccttacaaatgcagatacaccttcctcacaaatggaagggaagctcatttagaagtttagtttgaagatgcccccaatttttagtcaccaattttagcttttgttagtaatgtgttgtaaatattaatactaatgactgactacagtgagttctgacatctctcccaaatcagtttgtgattctagaaagggacacattaacaggttttaacaacacatttttgcacatggttataaaaattcctacacaatgtaatataagtcctaccgcctcaaccacccttctttccttgtccaacatttctcagctcttgtcattttgagcagtatgtctgcagtttaatgtgtgagggcttatgtgtaacgtatgttcaggaaatagaaggataaatggcagagctgaaagtttaggtgggatggggagaaaagacaaatataactaaaatacaa

SEQ ID NO: 309223 - DNA, 1359 bp, Homo sapiens
agcgtgggcgcttccgataacaacactcggagctggggctgtggctatttgttgctgcgccgccaccgcccgagtcatgttccgcgatcttctcaggctctcctagcagcatccatcgccgccaccctatcttcactggcttcaccttctccttctctcttcgttgctgagcgacaagcttcctagcgctatgactgtcgtctccgtcccgcagcgggagccgctcgtcctgggtggccgccttgcgccgcttggcttttcctcccgaggttactttggggccctcccgatggtgaccacggctccgcctcctttaccccggatcccggacccccgggcactgcccccgaccctcttcctccctcatttcctagggggagatggcccgtgtctgaccccccagcctcgcgctccagcagctctgcccaaccgcagcctcgccgtggcgggaggcactcctcgggcagcgccgaagaagcggcgaaagaagaaggtgcgggccagccccgcagggcagctgcccagccgcttccaccagtaccagcagcaccggccgagtctggagggcggccggagccccgcgaccggcccgagcggagcgcaggaggtcccgggcccggccgccgccttggccccgagtcctgcagccgcagccggcacggagggagccagccccgaccttgccccgctgcggcccgcggctcccggccaaacccccctcaggaaagaggttttaaaatcaaagatgggaaaatcggagaaaattgcccttccccatggccagcttgttcatggtatacacttgtatgagcaaccaaagataaacagacagaaaagcaaatataacttgccactaaccaagatcacctctgcaaaaagaaatgaaaacaacttttggcaggattctgtttcatctgacagaattcagaagcaggaaaaaaagccttttaaaaataccgagaacattaaaaattcgcatttgaagaaatcagcatttctaactgaagtgagccaaaaggaaaattatgctggggcaaagtttagtgatccaccttctcctagtgttcttccaaagcctcctagtcactggatgggaagcactgttgaaaattccaaccaaaacagggagctgatggcagtacacttaaaaacgctcctcaaagttcaaacttagatttcagatttcagtatgtgtgtaaaacataatttttcccatatccctggactcttgagaaaattggtacagaaatggaaatttgccttgttgcaacatacaattgcaaaagatgagtttaaaaaatatttccattcccaaaccacgccgtgggaattttaaaattcttttaaaatttttgtggt

SEQ ID NO: 309224 - DNA, 2643 bp, Homo sapiens
acttccgggaacgccggggaaccgcagtagccgcctgctagtggcgctgctagccggccggcgcaggctgccgagcgggtgagcgcgcaggccaggccaaagccctggtacccgcgcggtgcgggcctcagtctgcggccatgggggcgtccgcgcggctgctgcgagcggtgatcatgggggccccgggctcgggcaagggcaccgtgtcgtcgcgcatcactacacacttcgagctgaagcacctctccagcggggacctgctccgggacaacatgctgcggggcacagaaattggcgtgttagccaaggctttcattgaccaagggaaactcatcccagatgatgtcatgactcggctggcccttcatgagctgaaaaatctcacccagtatagctggctgttggatggttttccaaggacacttccacaggcagaagccctagatagagcttatcagatcgacacagtgattaacctgaatgtgccctttgaggtcattaaacaacgccttactgctcgctggattcatcccgccagtggccgagtctataacattgaattcaaccctcccaaaactgtgggcattgatgacctgactggggagcctctcattcagcgtgaggatgataaaccagagacggttatcaagagactaaaggcttatgaagaccaaacaaagccagtcctggaatattaccagaaaaaaggggtgctggaaacattctccggaacagaaaccaacaagatttggccctatgtatatgctttcctacaaactaaagttccacaaagaagccagaaagcttcagttactccatgaggagaaatgtgtgtaactattaatagtaagatgggcaaacctcctagtccttgcatttagaagctgcttttcctaagacttctagtatgtatgaattctttgaaaattatattacttttatttctactgattttattttggatactaaggatgtgccaaatgattcggatactaagatgcatcgtttgaaatcatctagtgtgttgtatgcagttatcctcaaaaacatcagcgatgtctgaacctttaaaacatctgttagagcaaaattaaaagagcatttggtagtaatctaactttttgttcagttaataagtggttgataaagtttccatatttttctggaaaagttaaaaaaagttacatgtcatttggagaaaatacgtaatcagaaatttgtgcatagattgatgccaaaaaagacatttccagcattgtggaacatggtgagacactatataaaattccagaaagaaagcaactggatttacagatttattgtgagacacaaattcactgctgcctttacactaagaaatgtatatgttaaccatatatgctgtatttattttgtcgttaagcatactttcagtttactcagaattttcaatttgctataaagatgtatcaattagcatatagaaaaatattactttaagatgacttgtttcctttgaaaatacctgtgtactgagggttatgatttgtgtcaaaaattgacataagtgcttttacaagcaccaaagttgaatgaattttcaacaaaatgtaattaaagtctatgttttcagttatgactcaggttaagaaatgtgttttaggatctacttgctggtttttctttttgatccaaatgtgtgatctgccctgataaataacaagttatagtaccatctcccccgccaataaaaaagagaagaaaaaagagaaacccgtggcactatgtaaataaagtaagcatactttgttgttagtaaatagatgaggcatgcctgggaaatgctcccttggcataaatagcaatcaattataattagtaaacaggtgtaccaataaaaagaatttacatgataggttaacaaggaccaggaaagtgagtttcctgaaggagttctttgttcctgatcaaagaaattgatacctgttagcattcactgccaccatattttaaggagaaagaactctattggtgtcgtctgagcagccatttaaaaattggaatctaaaggatggttgctgatgtactgtgtggtctggtagaagtggggaaatatgagagatggaggaaaaacttgattatgtcttccatggcatatttactcttactttacttcgtgccaaatcaaatgaaacaagccgtcttacaagtcgttattgcctttaaaaatctgttccgtttttttcccaggtacttaaaatacaagtgccagtaagtggttcttatgtgttttggggggaaaattttatttcccttttcttctgatatttaaaaaattcatcgatctttcaagatgaaccaaggttttttaaaagaaatataggaaacacttcattctttataaaactttctataatgccttatttgaatgttaatcttatgtgctttctaaaaaatgttgtgaaataccaaacttatggattatcactaggttatcaagcatatattagtctttatcagaataaaatgaaatttcataactgtggctattactttgttcttggtccttcacagggcctgctccatcccaccttcctttctgctgcctgatgtctcaatggcttctgaatgactgttctaataaatgatcttaaaacagtc

SEQ ID NO: 309225 - DNA, 350 bp, Homo sapiens
tgcgtgtagtgggtggatctgcaattgtattcctgtttcaagccccgttttcttgcagctcttcggcactgcaaacctaaccgctaatggcgctgtgggtggagaaacgtttgttaggtagcgttatatattgttatctggtgttccctataccgaaaacggcgggtcctggccgccgggaggtactcagaccaggcttcttacatcatggttgcaggatggctgctacagctctggacatcacatcaaaatatggcagaagctaaagcaggaagacagagaaggaggcaaaacagctttattcacttgtggctctcatatgaagaataaagatatttctcgaaaccttc

SEQ ID NO: 309226 - DNA, 456 bp, Homo sapiens
aatgctgttagtttttctcctacctctttcactacttctcctcagtcttcttcccttctagctgacctctaactttagagttcctcatattttggccagtgaggagaatcctgtttattcctgtggctttaaataacatctgtgtatctataattctcaaattgaaatccaagtcctgaccttacccctgtgctccagactcatgtctacccgctgatttgtcatctcattttaatggttcatacacatcttaaatttaacacatccaaacccttgatctcaccgccttccccaaacttctttgggtcttctccgtgtcaatcaatggctgctacagctctggacatcacatcaaaatatggcagaagctaaagcaggaagacagagaaggaggcaaaacagctttattcacttgtggctctcatatgaagaataaagatatttctcgaaaccttc

SEQ ID NO: 309227 - DNA, 2696 bp, Homo sapiens
acttccgggaacgccggggaaccgcagtagccgcctgctagtggcgctgctagccggccggcgcaggctgccgagcgggtgagcgcgcaggccaggccaaagccctggtacccgcgcggtgcgggcctcagtctgcggccatgggggcgtccgcgcggctgctgcgagcggtgatcatgggggccccgggctcgggcaagggcaccgtgtcgtcgcgcatcactacacacttcgagctgaagcacctctccagcggggacctgctccgggacaacatgctgcggggcacagaaattggcgtgttagccaaggctttcattgaccaagggaaactcatcccagatgatgtcatgactcggctggcccttcatgagctgaaaaatctcacccagtatagctggctgttggatggttttccaaggacacttccacaggcagaagccctagatagagcttatcagatcgacacagtgattaacctgaatgtgccctttgaggtcattaaacaacgccttactgctcgctggattcatcccgccagtggccgagtctataacattgaattcaaccctcccaaaactgtgggcattgatgacctgactggggagcctctcattcagcgtgaggatgataaaccagagacggttatcaagagactaaaggcttatgaagaccaaacaaagccagtcctggaatattaccagaaaaaaggggtgctggaaacattctccggaacagaaaccaacaagatttggccctatgtatatgctttcctacaaactaaagttccacaaagaagccagaaagcttcagttactccatgaggagaaatgtgtgtaactattaatagtaagatgggcaaacctcctagtccttgcatttagaagctgcttttcctaagacttctagtatgtatgaattctttgaaaattatattacttttatttctactgattttattttggatactaaggatgtgccaaatgattcggatactaagatgcatcgtttgaaatcatctagtgtgttgtatgcagttatcctcaaaaacatcagcgatgtctgaacctttaaaacatctgttagagcaaaattaaaagagcatttggtagtaatctaactttttgttcagttaataagtggttgataaagtttccatatttttctggaaaagttaaaaaaagttacatgtcatttggagaaaatacgtaatcagaaatttgtgcatagattgatgccaaaaaagacatttccagcattgtggaacatggtgagacactatataaaattccagaaagaaagcaactggatttacagatttattgtgagacacaaattcactgctgcctttacactaagaaatgtatatgttaaccatatatgctgtatttattttgtcgttaagcatactttcagtttactcagaattttcaatttgctataaagatgtatcaattagcatatagaaaaatattactttaagatgacttgtttcctttgaaaatacctgtgtactgagggttatgatttgtgtcaaaaattgacataagtgcttttacaagcaccaaagttgaatgaattttcaacaaaatgtaattaaagtctatgttttcagttatgactcaggttaagaaatgtgttttaggatctacttgctggtttttctttttgatccaaatgtgtgatctgccctgataaataacaagttatagtaccatctcccccgccaataaaaaagagaagaaaaaagagaaacccgtggcactatgtaaataaagtaagcatactttgttgttagtaaatagatgaggcatgcctgggaaatgctcccttggcataaatagcaatcaattataattagtaaacaggtgtaccaataaaaagaatttacatgataggttaacaaggaccaggaaagtgagtttcctgaaggagttctttgttcctgatcaaagaaattgatacctgttagcattcactgccaccatattttaaggagaaagaactctattggtgtcgtctgagcagccatttaaaaattggaatctaaaggatggttgctgatgtactgtgtggtctggtagaagtggggaaatatgagagatggaggaaaaacttgattatgtcttccatggcatatttactcttactttacttcgtgccaaatcaaatgaaacaagccgtcttacaagtcgttattgcctttaaaaatctgttccgtttttttcccaggtacttaaaatacaagtgccagtaagtggttcttatgtgttttggggggaaaattttatttcccttttcttctgatatttaaaaaattcatcgatctttcaagatgaaccaaggttttttaaaagaaatataggaaacacttcattctttataaaactttctataatgccttatttgaatgttaatcttatgtgctttctaaaaaatgttgtgaaataccaaacttatggattatcactaggttatcaagcatatattagtctttatcagaataaaatgaaatttcataactgtggctattactttgttcttggtccttcacagggcctgctccatcccaccttcctttctgctgcctgatgtctcaatggcttctgaatgactgttctaataaatgatcttaaaacagtcaaaaaaaaaaaaaaaaacacttgtggcgccatggccaaaaacttttaacactg

SEQ ID NO: 309228 - DNA, 2572 bp, Homo sapiens
acttccgggaacgccggggaaccgcagtagccgcctgctagtggcgctgctagccggccggcgcaggctgccgagcgggtgagcgcgcaggccaggccaaagccctggtacccgcgcggtgcgggcctcagtctgcggccatgggggcgtccgcgcggctgctgcgagcggtgatcatgggggccccgggctcgggcaagggcaccgtgtcgtcgcgcatcactacacacttcgagctgaagcacctctccagcggggacctgctccgggacaacatgctgcggggcacagaaattggcgtgttagccaaggctttcattgaccaagggaaactcatcccagatgatgtcatgactcggctggcccttcatgagctgaaaaatctcacccagtatagctggctgttggatggttttccaaggacacttccacaggcagaagccctagatagagcttatcagatcgacacagtgattaacctgaatgtgccctttgaggtcattaaacaacgccttactgctcgctggattcatcccgccagtggccgagtctataacattgaattcaaccctcccaaaactgtgggcattgatgacctgactggggagcctctcattcagcgtgaggatgataaaccagagacggttatcaagagactaaaggcttatgaagaccaaacaaagccagtcctggaatattaccagaaaaaaggggtgctggaaacattctccggaacagaaaccaacaagatttggccctatgtatatgctttcctacaaactaaagttccacaaagaagccagaaagcttcagttactccatgaggagaaatgtgtgtaactattaatagtaagatgggcaaacctcctagtccttgcatttagaagctgcttttcctaagacttctagtatgtatgaattctttgaaaattatattacttttatttctactgattttattttggatactaaggatgtgccaaatgattcggatactaagatgcatcgtttgaaatcatctagtgtgttgtatgcagttatcctcaaaaacatcagcgatgtctgaacctttaaaacatctgttagagcaaaattaaaagagcatttggtagtaatctaactttttgttcagttaataagtggttgataaagtttccatatttttctggaaaagttaaaaaaagttacatgtcatttggagaaaatacgtaatcagaaatttgtgcatagattgatgccaaaaaagacatttccagcattgtggaacatggtgagacactatataaaattccagaaagaaagcaactggatttacagatttattgtgagacacaaattcactgctgcctttacactaagaaatgtatatgttaaccatatatgctgtatttattttgtcgttaagcatactttcagtttactcagaattttcaatttgctataaagatgtatcaattagcatatagaaaaatattactttaagatgacttgtttcctttgaaaatacctgtgtactgagggttatgatttgtgtcaaaaattgacataagtgcttttacaagcaccaaagttgaatgaattttcaacaaaatgtaattaaagtctatgttttcagttatgactcaggttaagaaatgtgttttaggatctacttgctggtttttctttttgatccaaatgtgtgatctgccctgataaataacaagttatagtaccatctcccccgccaataaaaaagagaagaaaaaagagaaacccgtggcactatgtaaataaagtaagcatactttgttgttagtaaatagatgaggcatgcctgggaaatgctcccttggcataaatagcaatcaattataattagtaaacaggtgtaccaataaaaagaatttacatgataggttaacaaggaccaggaaagtgagtttcctgaaggagttctttgttcctgatcaaagaaattgatacctgttagcattcactgccaccatattttaaggagaaagaactctattggtgtcgtctgagcagccatttaaaaattggaatctaaaggatggttgctgatgtactgtgtggtctggtagaagtggggaaatatgagagatggaggaaaaacttgattatgtcttccatggcatatttactcttactttacttcgtgccaaatcaaatgaaacaagccgtcttacaagtcgttattgcctttaaaaatctgttccgtttttttcccaggtacttaaaatacaagtgccagtaagtggttcttatgtgttttggggggaaaattttatttcccttttcttctgatatttaaaaaattcatcgatctttcaagatgaaccaaggttttttaaaagaaatataggaaacacttcattctttataaaactttctataatgccttatttgaatgttaatcttatgtgctttctaaaaaatgttgtgaaataccaaacttatggattatcactaggttatcaagcatatattagtctttatcagaataaaatgaaatttcataaaaaaaaaaaaaaaaaattgtggggccgcccggcccagggaaaaatttaaa

SEQ ID NO: 309229 - DNA, 236 bp, Homo sapiens
aggcggacaggagtcaccagatggcaaaaaatgttgtgaaataccaaacttatggattatcactaggttatcaagcatatattagtctttatcagaataaaatgaaatttcataactgtggctattactttgttcttggtccttcacagggcctgctccatcccaccttcctttctgctgcctgatgtctcaatggcttctgaatgactgttctaataaatgatcttaaaacagtc

SEQ ID NO: 309230 - DNA, 1107 bp, Homo sapiens
acttccgggaacgccggggaaccgcagtagccgcctgctagtggcgctgctagccggccggcgcaggctgccgagcgggtgagcgcgcaggccaggccaaagccctggtacccgcgcggtgcgggcctcagtctgcggccatgggggcgtccgcgcggctgctgcgagcggtgatcatgggggccccgggctcgggcaagggcaccgtgtcgtcgcgcatcactacacacttcgagctgaagcacctctccagcggggacctgctccgggacaacatgctgcggggcacagaaattggcgtgttagccaaggctttcattgaccaagggaaactcatcccagatgatgtcatgactcggctggcccttcatgagctgaaaaatctcacccagtatagctggctgttggatggttttccaaggacacttccacaggcagaagccctagatagagcttatcagatcgacacagtgattaacctgaatgtgccctttgaggtcattaaacaacgccttactgctcgctggattcatcccgccagtggccgagtctataacattgaattcaaccctcccaaaactgtgggcattgatgacctgactggggagcctctcattcagcgtgaggatgataaaccagagacggttatcaagagactaaaggcttatgaagaccaaacaaagccagtcctggaatattaccagaaaaaaggggtgctggaaacattctccggaacagaaaccaacaagatttggccctatgtatatgctttcctacaaactaaagttccacaaagaagccagaaagcttcagttactccatgaggagaaatacagggcctcactctgttgcccagactagagtgcagtggcataattgggtcactgtaacgttgaactcctgggctcacgcaattcttctacctcagcctcccaagtagctgaaactacaggcttcttacatcatggttgcaggatggctgctacagctctggacatcacatcaaaatatggcagaagctaaagcaggaagacagagaaggaggcaaaacagctttattcacttgtggctctcatatgaagaataaagatatttctcgaaaccttc

SEQ ID NO: 309231 - DNA, 629 bp, Homo sapiens
tccactgaccaccctgagtagcatggttctacaggttaatggggtatattataatccaaatgactgaaatgtggcagacaaagagtgaagtcaaatacatttgagctcttttgattttgtatttatgtgaatggtctgcatttctcaatttcattggaatttatgattgtttcatgtcctatttaatgctttttgtttagctcgtttgacagcaagtttgtttaccagcaaataggactcggaccaattgaagaagacactattcttgtcatagatccaaataatgctgcagtactccagtccagtggaaaaaatctgttttacttgccacatggcttgagtatagataaagatgggaattattgggtcacagacgtggctctccatcaggtgttcaaactggatccaaacaataaagaaggccctgtattaatcctgggaaggagcatgcaaccaggcagtgaccagaatcacttctgtcaacccactgatgtggctgtggatccaggcactggagccatttatgtatcagatggttactgcaacagcaggattgtgcagttttcaccaagtggaaagttcatcacacagtggggagaaggtacccaataagactcttaatctccagt

SEQ ID NO: 309232 - DNA, 277 bp, Homo sapiens
  misc_feature (9)..(9): n is a, c, g, or t
  misc_feature (22)..(22): n is a, c, g, or t
  misc_feature (68)..(68): n is a, c, g, or t
tctaagccnttttttagtcacncataggccagacttagggctaggatgatgattaataagagggatgncataactattagtggcaggttaatttttttaaaatcactaacattatattgcaatgaaggaaataaaaaagtctctatttaaattcttttttaaattttcttcagttggtgtgtttttgggatgtcttatttttagatggttacactgttagaacactattttcagaatctgaatgtaatttgtgtaataaagtgttttcagagcatta

SEQ ID NO: 309233 - DNA, 4016 bp, Homo sapiens
caactaactccgcccgccgctccgccgcccgcaggctccggcttccgtcccggacagagcccgtggtcgcgcaggttctgaatgatgactgacgcgggtttgggtgatacccctcacagcccctgtcattccggagtcataaggcacccgcgcgtctagccccagcgccagggcacgcgagcggcgctggagggaggaaagcttccgcctgcgggccggacaaaagtcccgcctgcccacggctttttgcccgccgctcgtgaccgagacgcctcgccgcggccagctcgctgctctcgctggcggatggtgtgtggccgccgcaggacgcccgccgtgcccgggccatgaagtagcggctgctggcggcgccgctgcccaaccgccagccccagccccgcgctgcgctgcccggtcctctcccggcggggtcgtatcggcgtggacatggctggccgcgtccctagcctgctagttctccttgtttttccaagcagctgtttggctttccgaagcccactttctgtctttaagaggtttaaagaaactaccagaccattttccaatgaatgtcttggtaccaccagacccgtagttcctattgattcatcagattttgcattggatattcgcatgcctggggttacacctaaacagacatacttctgcatgtctatgcgaataccagtggatgaggaagccttcgtgattgacttcaagcctcgagccagcatggatactgtccatcacatgttactttttggatgcaatatgccttcatccactggaagttactggttttgtgatgaaggaacctgtacagataaagccaatattctgtatgcctgggcgagaaatgctccccctacccggctccccaaaggtgttggattcagagttggaggagagactggaagtaaatactttgtactacaggtacactatggggatattagtgcttttagagataataacaaggactgttctggtgtgtccttacacctcacacgtctgccacagcctttaattgctggcatgtaccttatgatgtctgttgacactgttatcccagcaggagaaaaagtggtgaattctgacatttcatgccattataaaaattatccaatgcatgtctttgcctatagagttcacactcaccatttaggtaaggtagtaagtggatacagagtaagaaatggacagtggacactgattggacggcagagccctcagctgccacaggctttctaccctgtggggcatccagttgatgtaagttttggtgacctactggctgcaagatgtgtattcactggtgaaggaaggacagaagccacacacattggtggcacgtctagtgatgaaatgtgcaacttatacattatgtattacatggaagccaagcatgcagtttctttcatgacctgtacccagaatgtagctccagatatgttcagaaccataccaccagaggccaacattccaattcccgtgaagtctgatatggttatgatgcatgaacatcataaagaaacagaatataaagataagattcctttactacagcagccaaaacgagaagaagaagaagtgttagaccagggtgatttctattcactactttccaagctgctaggagaaagggaagatgttgttcatgtgcacaaatataatcctacagaaaaggcagaatcagagtcagacctggtagctgagattgcaaatgtagtccaaaaaaaggatcttggtcgatctgatgccagagagggtgcagaacatgagaggggtaatgctattcttgtcagagacagaattcacaaattccacagactagtatctaccttgaggccaccagagagcagagttttctcattacagcagcccccacctggtgaaggcacctgggaaccagaacacacaggagatttccacatggaagaggcactggattggcctggagtatacttgttaccaggccaggtttctggggtggctctagaccctaagaataacctggtgattttccacagaggtgaccatgtctgggatggaaactcgtttgacagcaagtttgtttaccagcaaataggactcggaccaattgaagaagacactattcttgtcatagatccaaataatgctgcagtactccagtccagtggaaaaaatctgttttacttgccacatggcttgagtatagataaagatgggaattattgggtcacagacgtggctctccatcaggtgttcaaactggatccaaacaataaagaaggccctgtattaatcctgggaaggagcatgcaaccaggcagtgaccagaatcacttctgtcaacccactgatgtggctgtggatccaggcactggagccatttatgtatcagatggttactgcaacagcaggattgtgcagttttcaccaagtggaaagttcatcacacagtggggagaagagtcttcagggagcagtcctctgccaggccagttcactgttcctcacagcttggctcttgtgcctcttttgggccaattatgtgtggcagaccgggaaaatggtcggatccagtgttttaaaactgacaccaaagaatttgtgagagagattaagcattcatcatttggaagaaatgtatttgcaatttcatatataccaggcttgctctttgcagtgaatgggaagcctcattttggggaccaagaacctgtacaaggatttgtgatgaacttttccaatggggaaattatagacatcttcaagccagtgcgcaagcactttgatatgcctcatgatattgttgcatctgaagatgggactgtgtacattggagatgctcataccaacaccgtgtggaagttcaccttgactgagaaattggaacatcgatcagttaaaaaggctggcattgaggtccaggaaatcaaagaagccgaggcagttgttgaaaccaaaatggagaacaaacccacctcctcagaattgcagaagatgcaagagaaacagaaactgatcaaagagccaggctcgggagtgcctgttgttctcattacaacccttctggttattccggtggttgtcctgctggccattgccatatttattcggtggaaaaaatcaagggcctttggagagattctgaacacaaactcgagacgagttcaggaagagtactgggaagatttagaggaaagggaagtggaggcttaaaccttggtaatttctttgcaagccgtaagggctacagtcgaaaagggtttgaccggcttagcactgagggcagtgaccaagagaaagaggatgatggaagtgaatcagaagaggagtattcagcacctctgcctgcgctcgcaccttcctcctcctgaaaaccaagctttgatttagattgagtaagatttacccagaatgtcagattcctttccctttagcacgtttaaagttctgtgtatttaattgtaaactgtactagtctgtgtgggactgtacacactttatttacttcgttttggttaagttggcttctgtttctagttgaggagtttcctaaaagttcataacagtgccattgtctttatatgaacatagactagagaaaccgtcctctttttccatcataattctaatctaacaatggaagatttgcccatttacacttttgagactttttggtggatgtaaataaccccattctttgcttgaacacagtattttcccaatagcactttcattgccagtgtctttctttggtgcctttcctgttcagcattcttagcctgtggcagtaaagagaaactttgtgctacatgacgacaaagctgctaaatctcctatttttttaaaatcactaacattatattgcaatgaaggaaataaaaaagtctctatttaaattcttttttaaattttcttcagttggtgtgtttttgggatgtcttatttttagatggttacactgttagaacactattttcagaatctgaatgtaatttgtgtaataaagtgttttcagagcatta

SEQ ID NO: 309234 - DNA, 3701 bp, Homo sapiens
caactaactccgcccgccgctccgccgcccgcaggctccggcttccgtcccggacagagcccgtggtcgcgcaggttctgaatgatgactgacgcgggtttgggtgatacccctcacagcccctgtcattccggagtcataaggcacccgcgcgtctagccccagcgccagggcacgcgagcggcgctggagggaggaaagcttccgcctgcgggccggacaaaagtcccgcctgcccacggctttttgcccgccgctcgtgaccgagacgcctcgccgcggccagctcgctgctctcgctggcggatggtgtgtggccgccgcaggacgcccgccgtgcccgggccatgaagtagcggctgctggcggcgccgctgcccaaccgccagccccagccccgcgctgcgctgcccggtcctctcccggcggggtcgtatcggcgtggacatggctggccgcgtccctagcctgctagttctccttgtttttccaagcagctgtttggctttccgaagcccactttctgtctttaagaggtttaaagaaactaccagaccattttccaatgaatgtcttggtaccaccagacccgtagttcctattgattcatcagattttgcattggatattcgcatgcctggggttacacctaaacagtccgatacatacttctgcatgtctatgcgaataccagtggatgaggaagccttcgtgattgacttcaagcctcgagccagcatggatactgtccatcacatgttactttttggatgcaatatgccttcatccactggaagttactggttttgtgatgaaggaacctgtacagataaagccaatattctgtatgcctgggcgagaaatgctccccctacccggctccccaaaggtgttggattcagagttggaggagagactggaagtaaatactttgtactacaggtacactatggggatattagtgcttttagagataataacaaggactgttctggtgtgtccttacacctcacacgtctgccacagcctttaattgctggcatgtaccttatgatgtctgttgacactgttatcccagcaggagaaaaagtggtgaattctgacatttcatgccattataaaaattatccaatgcatgtctttgcctatagagttcacactcaccatttaggtaaggtagtaagtggatacagagtaagaaatggacagtggacactgattggacggcagagccctcagctgccacaggctttctaccctgtggggcatccagttgatgtaagttttggtgacctactggctgcaagatgtgtattcactggtgaaggaaggacagaagccacacacattggtggcacgtctagtgatgaaatgtgcaacttatacattatgtattacatggaagccaagcatgcagtttctttcatgacctgtacccagaatgtagctccagatatgttcagaaccataccaccagaggccaacattccaattcccgtgaagtctgatatggttatgatgcatgaacatcataaagaaacagaatataaagataagattcctttactacagcagccaaaacgagaagaagaagaagtgttagaccaggatttccacatggaagaggcactggattggcctggagtatacttgttaccaggccaggtttctggggtggctctagaccctaagaataacctggtgattttccacagaggtgaccatgtctgggatggaaactcgtttgacagcaagtttgtttaccagcaaataggactcggaccaattgaagaagacactattcttgtcatagatccaaataatgctgcagtactccagtccagtggaaaaaatctgttttacttgccacatggcttgagtatagataaagatgggaattattgggtcacagacgtggctctccatcaggtgttcaaactggatccaaacaataaagaaggccctgtattaatcctgggaaggagcatgcaaccaggcagtgaccagaatcacttctgtcaacccactgatgtggctgtggatccaggcactggagccatttatgtatcagatggttactgcaacagcaggattgtgcagttttcaccaagtggaaagttcatcacacagtggggagaagagtcttcagggagcagtcctctgccaggccagttcactgttcctcacagcttggctcttgtgcctcttttgggccaattatgtgtggcagaccgggaaaatggtcggatccagtgttttaaaactgacaccaaagaatttgtgagagagattaagcattcatcatttggaagaaatgtatttgcaatttcatatataccaggcttgctctttgcagtgaatgggaagcctcattttggggaccaagaacctgtacaaggatttgtgatgaacttttccaatggggaaattatagacatcttcaagccagtgcgcaagcactttgatatgcctcatgatattgttgcatctgaagatgggactgtgtacattggagatgctcataccaacaccgtgtggaagttcaccttgactgagaaattggaacatcgatcagttaaaaaggctggcattgaggtccaggaaatcaaagaagccgaggcagttgttgaaaccaaaatggagaacaaacccacctcctcagaattgcagaagatgcaagagaaacagaaactgatcaaagagccaggctcgggagtgcctgttgttctcattacaacccttctggttattccggtggttgtcctgctggccattgccatatttattcggtggaaaaaatcaagggcctttggagagattctgaacacaaactcgagacgagttcaggaagagtactgggaagatttagaggaaagggaagtggaggcttaaaccttggtaatttctttgcaagccgtaagggctacagtcgaaaagggtttgaccggcttagcactgagggcagtgaccaagagaaagaggatgatggaagtgaatcagaagaggagtattcagcacctctgcctgcgctcgcaccttcctcctcctgaaaaccaagctttgatttagattgagtaagatttacccagaatgtcagattcctttccctttagcacgtttaaagttctgtgtatttaattgtaaactgtactagtctgtgtgggactgtacacactttatttacttcgttttggttaagttggcttctgtttctagttgaggagtttcctaaaagttcataacagtgccattgtctttatatgaacatagactagagaaaccgtcctctttttccatcataattctaatctaacaatggaagatttgcccatttacacttttgagactttttggtggatgtaaataaccccattctttgcttgaacacagtattttcccaatagcactttcattgccagtgtctttctttggtgcctttcctgttcagcattcttagcctgtggcagtaaagagaaactttgtgctacatgacgacaaagctgctaaatctcctatttttttaaaatcactaacattatattgcaatgaaggaaataaaaaagtctctatttaaattcttttttaaattttcttcagttggtgtgtttttgggatgtcttatttttagatggttacactgttagaacactattttcagaatctgaatgtaatttgtgtaataaagtgttttcagagcatta

SEQ ID NO: 309235 - DNA, 4076 bp, Homo sapiens
caactaactccgcccgccgctccgccgcccgcaggctccggcttccgtcccggacagagcccgtggtcgcgcaggttctgaatgatgactgacgcgggtttgggtgatacccctcacagcccctgtcattccggagtcataaggcacccgcgcgtctagccccagcgccagggcacgcgagcggcgctggagggaggaaagcttccgcctgcgggccggacaaaagtcccgcctgcccacggctttttgcccgccgctcgtgaccgagacgcctcgccgcggccagctcgctgctctcgctggcggatggtgtgtggccgccgcaggacgcccgccgtgcccgggccatgaagtagcggctgctggcggcgccgctgcccaaccgccagccccagccccgcgctgcgctgcccggtcctctcccggcggggtcgtatcggcgtggacatggctggccgcgtccctagcctgctagttctccttgtttttccaagcagctgtttggctttccgaagcccactttctgtctttaagaggtttaaagaaactaccagaccattttccaatgaatgtcttggtaccaccagacccgtagttcctattgattcatcagattttgcattggatattcgcatgcctggggttacacctaaacagtccgatacatacttctgcatgtctatgcgaataccagtggatgaggaagccttcgtgattgacttcaagcctcgagccagcatggatactgtccatcacatgttactttttggatgcaatatgccttcatccactggaagttactggttttgtgatgaaggaacctgtacagataaagccaatattctgtatgcctgggcgagaaatgctccccctacccggctccccaaaggtgttggattcagagttggaggagagactggaagtaaatactttgtactacaggtacactatggggatattagtgcttttagagataataacaaggactgttctggtgtgtccttacacctcacacgtctgccacagcctttaattgctggcatgtaccttatgatgtctgttgacactgttatcccagcaggagaaaaagtggtgaattctgacatttcatgccattataaaaattatccaatgcatgtctttgcctatagagttcacactcaccatttaggtaaggtagtaagtggatacagagtaagaaatggacagtggacactgattggacggcagagccctcagctgccacaggctttctaccctgtggggcatccagttgatgtaagttttggtgacctactggctgcaagatgtgtattcactggtgaaggaaggacagaagccacacacattggtggcacgtctagtgatgaaatgtgcaacttatacattatgtattacatggaagccaagcatgcagtttctttcatgacctgtacccagaatgtagctccagatatgttcagaaccataccaccagaggccaacattccaattcccgtgaagtctgatatggttatgatgcatgaacatcataaagaaacagaatataaagataagattcctttactacagcagccaaaacgagaagaagaagaagtgttagaccagggtgatttctattcactactttccaagctgctaggagaaagggaagatgttgttcatgtgcacaaatataatcctacagaaaaggcagaatcagagtcagacctggtagctgagattgcaaatgtagtccaaaaaaaggatcttggtcgatctgatgccagagagggtgcagaacatgagaggggtaatgctattcttgtcagagacagaattcacaaattccacagactagtatctaccttgaggccaccagagagcagagttttctcattacagcagcccccacctggtgaaggcacctgggaaccagaacacacaggagctagaagagaagatatgaaatgtttccagtgcaaagaaatgataagtgttcaagatttccacatggaagaggcactggattggcctggagtatacttgttaccaggccaggtttctggggtggctctagaccctaagaataacctggtgattttccacagaggtgaccatgtctgggatggaaactcgtttgacagcaagtttgtttaccagcaaataggactcggaccaattgaagaagacactattcttgtcatagatccaaataatgctgcagtactccagtccagtggaaaaaatctgttttacttgccacatggcttgagtatagataaagatgggaattattgggtcacagacgtggctctccatcaggtgttcaaactggatccaaacaataaagaaggccctgtattaatcctgggaaggagcatgcaaccaggcagtgaccagaatcacttctgtcaacccactgatgtggctgtggatccaggcactggagccatttatgtatcagatggttactgcaacagcaggattgtgcagttttcaccaagtggaaagttcatcacacagtggggagaagagtcttcagggagcagtcctctgccaggccagttcactgttcctcacagcttggctcttgtgcctcttttgggccaattatgtgtggcagaccgggaaaatggtcggatccagtgttttaaaactgacaccaaagaatttgtgagagagattaagcattcatcatttggaagaaatgtatttgcaatttcatatataccaggcttgctctttgcagtgaatgggaagcctcattttggggaccaagaacctgtacaaggatttgtgatgaacttttccaatggggaaattatagacatcttcaagccagtgcgcaagcactttgatatgcctcatgatattgttgcatctgaagatgggactgtgtacattggagatgctcataccaacaccgtgtggaagttcaccttgactgagaaattggaacatcgatcagttaaaaaggctggcattgaggtccaggaaatcaaagaagccgaggcagttgttgaaaccaaaatggagaacaaacccacctcctcagaattgcagaagatgcaagagaaacagaaactgatcaaagagccaggctcgggagtgcctgttgttctcattacaacccttctggttattccggtggttgtcctgctggccattgccatatttattcggtggaaaaaatcaagggcctttggagagattctgaacacaaactcgagacgagttcaggaagagtactgggaagatttagaggaaagggaagtggaggcttaaaccttggtaatttctttgcaagccgtaagggctacagtcgaaaagggtttgaccggcttagcactgagggcagtgaccaagagaaagaggatgatggaagtgaatcagaagaggagtattcagcacctctgcctgcgctcgcaccttcctcctcctgaaaaccaagctttgatttagattgagtaagatttacccagaatgtcagattcctttccctttagcacgtttaaagttctgtgtatttaattgtaaactgtactagtctgtgtgggactgtacacactttatttacttcgttttggttaagttggcttctgtttctagttgaggagtttcctaaaagttcataacagtgccattgtctttatatgaacatagactagagaaaccgtcctctttttccatcataattctaatctaacaatggaagatttgcccatttacacttttgagactttttggtggatgtaaataaccccattctttgcttgaacacagtattttcccaatagcactttcattgccagtgtctttctttggtgcctttcctgttcagcattcttagcctgtggcagtaaagagaaactttgtgctacatgacgacaaagctgctaaatctcctatttttttaaaatcactaacattatattgcaatgaaggaaataaaaaagtctctatttaaattcttttttaaattttcttcagttggtgtgtttttgggatgtcttatttttagatggttacactgttagaacactattttcagaatctgaatgtaatttgtgtaataaagtgttttcagagcatta

SEQ ID NO: 309236 - DNA, 3755 bp, Homo sapiens
caactaactccgcccgccgctccgccgcccgcaggctccggcttccgtcccggacagagcccgtggtcgcgcaggttctgaatgatgactgacgcgggtttgggtgatacccctcacagcccctgtcattccggagtcataaggcacccgcgcgtctagccccagcgccagggcacgcgagcggcgctggagggaggaaagcttccgcctgcgggccggacaaaagtcccgcctgcccacggctttttgcccgccgctcgtgaccgagacgcctcgccgcggccagctcgctgctctcgctggcggatggtgtgtggccgccgcaggacgcccgccgtgcccgggccatgaagtagcggctgctggcggcgccgctgcccaaccgccagccccagccccgcgctgcgctgcccggtcctctcccggcggggtcgtatcggcgtggacatggctggccgcgtccctagcctgctagttctccttgtttttccaagcagctgtttggctttccgaagcccactttctgtctttaagaggtttaaagaaactaccagaccattttccaatgaatgtcttggtaccaccagacccgtagttcctattgattcatcagattttgcattggatattcgcatgcctggggttacacctaaacagtccgatacatacttctgcatgtctatgcgaataccagtggatgaggaagccttcgtgattgacttcaagcctcgagccagcatggatactgtccatcacatgttactttttggatgcaatatgccttcatccactggaagttactggttttgtgatgaaggaacctgtacagataaagccaatattctgtatgcctgggcgagaaatgctccccctacccggctccccaaaggtgttggattcagagttggaggagagactggaagtaaatactttgtactacaggtacactatggggatattagtgcttttagagataataacaaggactgttctggtgtgtccttacacctcacacgtctgccacagcctttaattgctggcatgtaccttatgatgtctgttgacactgttatcccagcaggagaaaaagtggtgaattctgacatttcatgccattataaaaattatccaatgcatgtctttgcctatagagttcacactcaccatttaggtaaggtagtaagtggatacagagtaagaaatggacagtggacactgattggacggcagagccctcagctgccacaggctttctaccctgtggggcatccagttgatgtaagttttggtgacctactggctgcaagatgtgtattcactggtgaaggaaggacagaagccacacacattggtggcacgtctagtgatgaaatgtgcaacttatacattatgtattacatggaagccaagcatgcagtttctttcatgacctgtacccagaatgtagctccagatatgttcagaaccataccaccagaggccaacattccaattcccgtgaagtctgatatggttatgatgcatgaacatcataaagaaacagaatataaagataagattcctttactacagcagccaaaacgagaagaagaagaagtgttagaccaggctagaagagaagatatgaaatgtttccagtgcaaagaaatgataagtgttcaagatttccacatggaagaggcactggattggcctggagtatacttgttaccaggccaggtttctggggtggctctagaccctaagaataacctggtgattttccacagaggtgaccatgtctgggatggaaactcgtttgacagcaagtttgtttaccagcaaataggactcggaccaattgaagaagacactattcttgtcatagatccaaataatgctgcagtactccagtccagtggaaaaaatctgttttacttgccacatggcttgagtatagataaagatgggaattattgggtcacagacgtggctctccatcaggtgttcaaactggatccaaacaataaagaaggccctgtattaatcctgggaaggagcatgcaaccaggcagtgaccagaatcacttctgtcaacccactgatgtggctgtggatccaggcactggagccatttatgtatcagatggttactgcaacagcaggattgtgcagttttcaccaagtggaaagttcatcacacagtggggagaagagtcttcagggagcagtcctctgccaggccagttcactgttcctcacagcttggctcttgtgcctcttttgggccaattatgtgtggcagaccgggaaaatggtcggatccagtgttttaaaactgacaccaaagaatttgtgagagagattaagcattcatcatttggaagaaatgtatttgcaatttcatatataccaggcttgctctttgcagtgaatgggaagcctcattttggggaccaagaacctgtacaaggatttgtgatgaacttttccaatggggaaattatagacatcttcaagccagtgcgcaagcactttgatatgcctcatgatattgttgcatctgaagatgggactgtgtacattggagatgctcataccaacaccgtgtggaagttcaccttgactgagaaattggaacatcgatcagttaaaaaggctggcattgaggtccaggaaatcaaagaagccgaggcagttgttgaaaccaaaatggagaacaaacccacctcctcagaattgcagaagatgcaagagaaacagaaactgatcaaagagccaggctcgggagtgcctgttgttctcattacaacccttctggttattccggtggttgtcctgctggccattgccatatttattcggtggaaaaaatcaagggcctttggagagattctgaacacaaactcgagacgagttcaggaagagtactgggaagatttagaggaaagggaagtggaggcttaaaccttggtaatttctttgcaagccgtaagggctacagtcgaaaagggtttgaccggcttagcactgagggcagtgaccaagagaaagaggatgatggaagtgaatcagaagaggagtattcagcacctctgcctgcgctcgcaccttcctcctcctgaaaaccaagctttgatttagattgagtaagatttacccagaatgtcagattcctttccctttagcacgtttaaagttctgtgtatttaattgtaaactgtactagtctgtgtgggactgtacacactttatttacttcgttttggttaagttggcttctgtttctagttgaggagtttcctaaaagttcataacagtgccattgtctttatatgaacatagactagagaaaccgtcctctttttccatcataattctaatctaacaatggaagatttgcccatttacacttttgagactttttggtggatgtaaataaccccattctttgcttgaacacagtattttcccaatagcactttcattgccagtgtctttctttggtgcctttcctgttcagcattcttagcctgtggcagtaaagagaaactttgtgctacatgacgacaaagctgctaaatctcctatttttttaaaatcactaacattatattgcaatgaaggaaataaaaaagtctctatttaaattcttttttaaattttcttcagttggtgtgtttttgggatgtcttatttttagatggttacactgttagaacactattttcagaatctgaatgtaatttgtgtaataaagtgttttcagagcatta

SEQ ID NO: 309237 - DNA, 3818 bp, Homo sapiens
caactaactccgcccgccgctccgccgcccgcaggctccggcttccgtcccggacagagcccgtggtcgcgcaggttctgaatgatgactgacgcgggtttgggtgatacccctcacagcccctgtcattccggagtcataaggcacccgcgcgtctagccccagcgccagggcacgcgagcggcgctggagggaggaaagcttccgcctgcgggccggacaaaagtcccgcctgcccacggctttttgcccgccgctcgtgaccgagacgcctcgccgcggccagctcgctgctctcgctggcggatggtgtgtggccgccgcaggacgcccgccgtgcccgggccatgaagtagcggctgctggcggcgccgctgcccaaccgccagccccagccccgcgctgcgctgcccggtcctctcccggcggggtcgtatcggcgtggacatggctggccgcgtccctagcctgctagttctccttgtttttccaagcagctgtttggctttccgaagcccactttctgtctttaagaggtttaaagaaactaccagaccattttccaatgaatgtcttggtaccaccagacccgtagttcctattgattcatcagattttgcattggatattcgcatgcctggggttacacctaaacagtccgatacatacttctgcatgtctatgcgaataccagtggatgaggaagccttcgtgattgacttcaagcctcgagccagcatggatactgtccatcacatgttactttttggatgcaatatgccttcatccactggaagttactggttttgtgatgaaggaacctgtacagataaagccaatattctgtatgcctgggcgagaaatgctccccctacccggctccccaaaggtgttggattcagagttggaggagagactggaagtaaatactttgtactacaggtacactatggggatattagtgcttttagagataataacaaggactgttctggtgtgtccttacacctcacacgtctgccacagcctttaattgctggcatgtaccttatgatgtctgttgacactgttatcccagcaggagaaaaagtggtgaattctgacatttcatgccattataaaaattatccaatgcatgtctttgcctatagagttcacactcaccatttaggtaaggtagtaagtggatacagagtaagaaatggacagtggacactgattggacggcagagccctcagctgccacaggctttctaccctgtggggcatccagttgatgtaagttttggtgacctactggctgcaagatgtgtattcactggtgaaggaaggacagaagccacacacattggtggcacgtctagtgatgaaatgtgcaacttatacattatgtattacatggaagccaagcatgcagtttctttcatgacctgtacccagaatgtagctccagatatgttcagaaccataccaccagaggccaacattccaattcccgtgaagtctgatatggttatgatgcatgaacatcataaagaaacagaatataaagataagattcctttactacagcagccaaaacgagaagaagaagaagtgttagaccagggtgatttctattcactactttccaagctgctaggagaaagggaagatgttgttcatgtgcacaaatataatcctacagaaaaggcagaatcagagtcagacctggtagctgagattgcaaatgtagtccaaaaaaaggatcttggtcgatctgatgccagagagggtgcagaacatgagaggggtaatgctattcttgtcagagacagaattcacaaattccacagactagtatctaccttgaggccaccagagagcagagttttctcattacagcagcccccacctggtgaaggcacctgggaaccagaacacacaggagatttccacatggaagaggcactggattggcctggagtatacttgttaccaggccaggtttctggggtggctctagaccctaagaataacctggtgattttccacagaggtgaccatgtctgggatggaaactcgtttgacagcaagtttgtttaccagcaaataggactcggaccaattgaagaagacactattcttgtcatagatccaaataatgctgcagtactccagtccagtggaaaaaatctgttttacttgccacatggcttgagtatagataaagatgggaattattgggtcacagacgtggctctccatcaggtgttcaaactggatccaaacaataaagaaggccctgtattaatcctgggaaggagcatgcaaccaggcagtgaccagaatcacttctgtcaacccactgatgtggctgtggatccaggcactggagccatttatgtatcagatggttactgcaacagcaggattgtgcagttttcaccaagtggaaagttcatcacacagtggggagaagagtcttcagggagcagtcctctgccaggccagttcactgttcctcacagcttggctcttgtgcctcttttgggccaattatgtgtggcagaccgggaaaatggtcggatccagtgttttaaaactgacaccaaagaatttgtgagagagattaagcattcatcatttggaagaaatgtatttgcaatttcatatataccaggcttgctctttgcagtgaatgggaagcctcattttggggaccaagaacctgtacaaggatttgtgatgaacttttccaatggggaaattatagacatcttcaagccagtgcgcaagcactttgatatgcctcatgatattgttgcatctgaagatgggactgtgtacattggagatgctcataccaacaccgtgtggaagttcaccttgactgagaaattggaacatcgatcagttaaaaaggctggcattgaggtccaggaaatcaaagagattctgaacacaaactcgagacgagttcaggaagagtactgggaagatttagaggaaagggaagtggaggcttaaaccttggtaatttctttgcaagccgtaagggctacagtcgaaaagggtttgaccggcttagcactgagggcagtgaccaagagaaagaggatgatggaagtgaatcagaagaggagtattcagcacctctgcctgcgctcgcaccttcctcctcctgaaaaccaagctttgatttagattgagtaagatttacccagaatgtcagattcctttccctttagcacgtttaaagttctgtgtatttaattgtaaactgtactagtctgtgtgggactgtacacactttatttacttcgttttggttaagttggcttctgtttctagttgaggagtttcctaaaagttcataacagtgccattgtctttatatgaacatagactagagaaaccgtcctctttttccatcataattctaatctaacaatggaagatttgcccatttacacttttgagactttttggtggatgtaaataaccccattctttgcttgaacacagtattttcccaatagcactttcattgccagtgtctttctttggtgcctttcctgttcagcattcttagcctgtggcagtaaagagaaactttgtgctacatgacgacaaagctgctaaatctcctatttttttaaaatcactaacattatattgcaatgaaggaaataaaaaagtctctatttaaattcttttttaaattttcttcagttggtgtgtttttgggatgtcttatttttagatggttacactgttagaacactattttcagaatctgaatgtaatttgtgtaataaagtgttttcagagcatta

SEQ ID NO: 309238 - DNA, 3645 bp, Homo sapiens
caactaactccgcccgccgctccgccgcccgcaggctccggcttccgtcccggacagagcccgtggtcgcgcaggttctgaatgatgactgacgcgggtttgggtgatacccctcacagcccctgtcattccggagtcataaggcacccgcgcgtctagccccagcgccagggcacgcgagcggcgctggagggaggaaagcttccgcctgcgggccggacaaaagtcccgcctgcccacggctttttgcccgccgctcgtgaccgagacgcctcgccgcggccagctcgctgctctcgctggcggatggtgtgtggccgccgcaggacgcccgccgtgcccgggccatgaagtagcggctgctggcggcgccgctgcccaaccgccagccccagccccgcgctgcgctgcccggtcctctcccggcggggtcgtatcggcgtggacatggctggccgcgtccctagcctgctagttctccttgtttttccaagcagctgtttggctttccgaagcccactttctgtctttaagaggtttaaagaaactaccagaccattttccaatgaatgtcttggtaccaccagacccgtagttcctattgattcatcagattttgcattggatattcgcatgcctggggttacacctaaacagtccgatacatacttctgcatgtctatgcgaataccagtggatgaggaagccttcgtgattgacttcaagcctcgagccagcatggatactgtccatcacatgttactttttggatgcaatatgccttcatccactggaagttactggttttgtgatgaaggaacctgtacagataaagccaatattctgtatgcctgggcgagaaatgctccccctacccggctccccaaaggtgttggattcagagttggaggagagactggaagtaaatactttgtactacaggtacactatggggatattagtgcttttagagataataacaaggactgttctggtgtgtccttacacctcacacgtctgccacagcctttaattgctggcatgtaccttatgatgtctgttgacactgttatcccagcaggagaaaaagtggtgaattctgacatttcatgccattataaaaattatccaatgcatgtctttgcctatagagttcacactcaccatttaggtaaggtagtaagtggatacagagtaagaaatggacagtggacactgattggacggcagagccctcagctgccacaggctttctaccctgtggggcatccagttgatgtaagttttggtgacctactggctgcaagatgtgtattcactggtgaaggaaggacagaagccacacacattggtggcacgtctagtgatgaaatgtgcaacttatacattatgtattacatggaagccaagcatgcagtttctttcatgacctgtacccagaatgtagctccagatatgttcagaaccataccaccagaggccaacattccaattcccgtgaagtctgatatggttatgatgcatgaacatcataaagaaacagaatataaagataagattcctttactacagcagccaaaacgagaagaagaagaagtgttagaccaggatttccacatggaagaggcactggattggcctggagtatacttgttaccaggccaggtttctggggtggctctagaccctaagaataacctggtgattttccacagaggtgaccatgtctgggatggaaactcgtttgacagcaagtttgtttaccagcaaataggactcggaccaattgaagaagacactattcttgtcatagatccaaataatgctgcagtactccagtccagtggaaaaaatctgttttacttgccacatggcttgagtatagataaagatgggaattattgggtcacagacgtggctctccatcaggtgttcaaactggatccaaacaataaagaaggccctgtattaatcctgggaaggagcatgcaaccaggcagtgaccagaatcacttctgtcaacccactgatgtggctgtggatccaggcactggagccatttatgtatcagatggttactgcaacagcaggattgtgcagttttcaccaagtggaaagttcatcacacagtggggagaagagtcttcagggagcagtcctctgccaggccagttcactgttcctcacagcttggctcttgtgcctcttttgggccaattatgtgtggcagaccgggaaaatggtcggatccagtgttttaaaactgacaccaaagaatttgtgagagagattaagcattcatcatttggaagaaatgtatttgcaatttcatatataccaggcttgctctttgcagtgaatgggaagcctcattttggggaccaagaacctgtacaaggatttgtgatgaacttttccaatggggaaattatagacatcttcaagccagtgcgcaagcactttgatatgcctcatgatattgttgcatctgaagatgggactgtgtacattggagatgctcataccaacaccgtgtggaagttcaccttgactgagaaattggaacatcgatcagttaaaaaggctggcattgaggtccaggaaatcaaagaagccgaggcagttgttgaaaccaaaatggagaacaaacccacctcctcagaattgcagaagatgcaagagaaacagaaactgatcaaagagccaggctcgggagtgcctgttgttctcattacaacccttctggttattccggtggttgtcctgctggccattgccatatttattcggtggaaaaaatcaagggcctttggaggaaagggaagtggaggcttaaaccttggtaatttctttgcaagccgtaagggctacagtcgaaaagggtttgaccggcttagcactgagggcagtgaccaagagaaagaggatgatggaagtgaatcagaagaggagtattcagcacctctgcctgcgctcgcaccttcctcctcctgaaaaccaagctttgatttagattgagtaagatttacccagaatgtcagattcctttccctttagcacgtttaaagttctgtgtatttaattgtaaactgtactagtctgtgtgggactgtacacactttatttacttcgttttggttaagttggcttctgtttctagttgaggagtttcctaaaagttcataacagtgccattgtctttatatgaacatagactagagaaaccgtcctctttttccatcataattctaatctaacaatggaagatttgcccatttacacttttgagactttttggtggatgtaaataaccccattctttgcttgaacacagtattttcccaatagcactttcattgccagtgtctttctttggtgcctttcctgttcagcattcttagcctgtggcagtaaagagaaactttgtgctacatgacgacaaagctgctaaatctcctatttttttaaaatcactaacattatattgcaatgaaggaaataaaaaagtctctatttaaattcttttttaaattttcttcagttggtgtgtttttgggatgtcttatttttagatggttacactgttagaacactattttcagaatctgaatgtaatttgtgtaataaagtgttttcagagcatta

SEQ ID NO: 309239 - DNA, 3748 bp, Homo sapiens
caactaactccgcccgccgctccgccgcccgcaggctccggcttccgtcccggacagagcccgtggtcgcgcaggttctgaatgatgactgacgcgggtttgggtgatacccctcacagcccctgtcattccggagtcataaggcacccgcgcgtctagccccagcgccagggcacgcgagcggcgctggagggaggaaagcttccgcctgcgggccggacaaaagtcccgcctgcccacggctttttgcccgccgctcgtgaccgagacgcctcgccgcggccagctcgctgctctcgctggcggatggtgtgtggccgccgcaggacgcccgccgtgcccgggccatgaagtagcggctgctggcggcgccgctgcccaaccgccagccccagccccgcgctgcgctgcccggtcctctcccggcggggtcgtatcggcgtggacatggctggccgcgtccctagcctgctagttctccttgtttttccaagcagctgtttggctttccgaagcccactttctgtctttaagaggtttaaagaaactaccagaccattttccaatgaatgtcttggtaccaccagacccgtagttcctattgattcatcagattttgcattggatattcgcatgcctggggttacacctaaacagtccgatacatacttctgcatgtctatgcgaataccagtggatgaggaagccttcgtgattgacttcaagcctcgagccagcatggatactgtccatcacatgttactttttggatgcaatatgccttcatccactggaagttactggttttgtgatgaaggaacctgtacagataaagccaatattctgtatgcctgggcgagaaatgctccccctacccggctccccaaaggtgttggattcagagttggaggagagactggaagtaaatactttgtactacaggtacactatggggatattagtgcttttagagataataacaaggactgttctggtgtgtccttacacctcacacgtctgccacagcctttaattgctggcatgtaccttatgatgtctgttgacactgttatcccagcaggagaaaaagtggtgaattctgacatttcatgccattataaaaattatccaatgcatgtctttgcctatagagttcacactcaccatttaggtaaggtagtaagtggatacagagtaagaaatggacagtggacactgattggacggcagagccctcagctgccacaggctttctaccctgtggggcatccagttgatgtaagttttggtgacctactggctgcaagatgtgtattcactggtgaaggaaggacagaagccacacacattggtggcacgtctagtgatgaaatgtgcaacttatacattatgtattacatggaagccaagcatgcagtttctttcatgacctgtacccagaatgtagctccagatatgttcagaaccataccaccagaggccaacattccaattcccgtgaagtctgatatggttatgatgcatgaacatcataaagagacagaattcacaaattccacagactagtatctaccttgaggccaccagagagcagagttttctcattacagcagcccccacctggtgaaggcacctgggaaccagaacacacaggagatttccacatggaagaggcactggattggcctggagtatacttgttaccaggccaggtttctggggtggctctagaccctaagaataacctggtgattttccacagaggtgaccatgtctgggatggaaactcgtttgacagcaagtttgtttaccagcaaataggactcggaccaattgaagaagacactattcttgtcatagatccaaataatgctgcagtactccagtccagtggaaaaaatctgttttacttgccacatggcttgagtatagataaagatgggaattattgggtcacagacgtggctctccatcaggtgttcaaactggatccaaacaataaagaaggccctgtattaatcctgggaaggagcatgcaaccaggcagtgaccagaatcacttctgtcaacccactgatgtggctgtggatccaggcactggagccatttatgtatcagatggttactgcaacagcaggattgtgcagttttcaccaagtggaaagttcatcacacagtggggagaagagtcttcagggagcagtcctctgccaggccagttcactgttcctcacagcttggctcttgtgcctcttttgggccaattatgtgtggcagaccgggaaaatggtcggatccagtgttttaaaactgacaccaaagaatttgtgagagagattaagcattcatcatttggaagaaatgtatttgcaatttcatatataccaggcttgctctttgcagtgaatgggaagcctcattttggggaccaagaacctgtacaaggatttgtgatgaacttttccaatggggaaattatagacatcttcaagccagtgcgcaagcactttgatatgcctcatgatattgttgcatctgaagatgggactgtgtacattggagatgctcataccaacaccgtgtggaagttcaccttgactgagaaattggaacatcgatcagttaaaaaggctggcattgaggtccaggaaatcaaagaagccgaggcagttgttgaaaccaaaatggagaacaaacccacctcctcagaattgcagaagatgcaagagaaacagaaactgatcaaagagccaggctcgggagtgcctgttgttctcattacaacccttctggttattccggtggttgtcctgctggccattgccatatttattcggtggaaaaaatcaagggcctttggagagattctgaacacaaactcgagacgagttcaggaagagtactgggaagatttagaggaaagggaagtggaggcttaaaccttggtaatttctttgcaagccgtaagggctacagtcgaaaagggtttgaccggcttagcactgagggcagtgaccaagagaaagaggatgatggaagtgaatcagaagaggagtattcagcacctctgcctgcgctcgcaccttcctcctcctgaaaaccaagctttgatttagattgagtaagatttacccagaatgtcagattcctttccctttagcacgtttaaagttctgtgtatttaattgtaaactgtactagtctgtgtgggactgtacacactttatttacttcgttttggttaagttggcttctgtttctagttgaggagtttcctaaaagttcataacagtgccattgtctttatatgaacatagactagagaaaccgtcctctttttccatcataattctaatctaacaatggaagatttgcccatttacacttttgagactttttggtggatgtaaataaccccattctttgcttgaacacagtattttcccaatagcactttcattgccagtgtctttctttggtgcctttcctgttcagcattcttagcctgtggcagtaaagagaaactttgtgctacatgacgacaaagctgctaaatctcctatttttttaaaatcactaacattatattgcaatgaaggaaataaaaaagtctctatttaaattcttttttaaattttcttcagttggtgtgtttttgggatgtcttatttttagatggttacactgttagaacactattttcagaatctgaatgtaatttgtgtaataaagtgttttcagagcatta

SEQ ID NO: 309240 - DNA, 3110 bp, Homo sapiens
tgactgattcacagggtcaggggaacttgatgaaaagcatgaaccactagcttaaagttgggaaagtccgatacatacttctgcatgtctatgcgaataccagtggatgaggaagccttcgtgattgacttcaagcctcgagccagcatggatactgtccatcacatgttactttttggatgcaatatgccttcatccactggaagttactggttttgtgatgaaggaacctgtacagataaagccaatattctgtatgcctgggcgagaaatgctccccctacccggctccccaaaggtgttggattcagagttggaggagagactggaagtaaatactttgtactacaggtacactatggggatattagtgcttttagagataataacaaggactgttctggtgtgtccttacacctcacacgtctgccacagcctttaattgctggcatgtaccttatgatgtctgttgacactgttatcccagcaggagaaaaagtggtgaattctgacatttcatgccattataaaaattatccaatgcatgtctttgcctatagagttcacactcaccatttaggtaaggtagtaagtggatacagagtaagaaatggacagtggacactgattggacggcagagccctcagctgccacaggctttctaccctgtggggcatccagttgatgtaagttttggtgacctactggctgcaagatgtgtattcactggtgaaggaaggacagaagccacacacattggtggcacgtctagtgatgaaatgtgcaacttatacattatgtattacatggaagccaagcatgcagtttctttcatgacctgtacccagaatgtagctccagatatgttcagaaccataccaccagaggccaacattccaattcccgtgaagtctgatatggttatgatgcatgaacatcataaagaaacagaatataaagataagattcctttactacagcagccaaaacgagaagaagaagaagtgttagaccaggatttccacatggaagaggcactggattggcctggagtatacttgttaccaggccaggtttctggggtggctctagaccctaagaataacctggtgattttccacagaggtgaccatgtctgggatggaaactcgtttgacagcaagtttgtttaccagcaaataggactcggaccaattgaagaagacactattcttgtcatagatccaaataatgctgcagtactccagtccagtggaaaaaatctgttttacttgccacatggcttgagtatagataaagatgggaattattgggtcacagacgtggctctccatcaggtgttcaaactggatccaaacaataaagaaggccctgtattaatcctgggaaggagcatgcaaccaggcagtgaccagaatcacttctgtcaacccactgatgtggctgtggatccaggcactggagccatttatgtatcagatggttactgcaacagcaggattgtgcagttttcaccaagtggaaagttcatcacacagtggggagaagagtcttcagggagcagtcctctgccaggccagttcactgttcctcacagcttggctcttgtgcctcttttgggccaattatgtgtggcagaccgggaaaatggtcggatccagtgttttaaaactgacaccaaagaatttgtgagagagattaagcattcatcatttggaagaaatgtatttgcaatttcatatataccaggcttgctctttgcagtgaatgggaagcctcattttggggaccaagaacctgtacaaggatttgtgatgaacttttccaatggggaaattatagacatcttcaagccagtgcgcaagcactttgatatgcctcatgatattgttgcatctgaagatgggactgtgtacattggagatgctcataccaacaccgtgtggaagttcaccttgactgagaaattggaacatcgatcagttaaaaaggctggcattgaggtccaggaaatcaaagaagccgaggcagttgttgaaaccaaaatggagaacaaacccacctcctcagaattgcagaagatgcaagagaaacagaaactgatcaaagagccaggctcgggagtgcctgttgttctcattacaacccttctggttattccggtggttgtcctgctggccattgccatatttattcggtggaaaaaatcaagggcctttggagagattctgaacacaaactcgagacgagttcaggaagagtactgggaagatttagaggaaagggaagtggaggcttaaaccttggtaatttctttgcaagccgtaagggctacagtcgaaaagggtttgaccggcttagcactgagggcagtgaccaagagaaagaggatgatggaagtgaatcagaagaggagtattcagcacctctgcctgcgctcgcaccttcctcctcctgaaaaccaagctttgatttagattgagtaagatttacccagaatgtcagattcctttccctttagcacgtttaaagttctgtgtatttaattgtaaactgtactagtctgtgtgggactgtacacactttatttacttcgttttggttaagttggcttctgtttctagttgaggagtttcctaaaagttcataacagtgccattgtctttatatgaacatagactagagaaaccgtcctctttttccatcataattctaatctaacaatggaagatttgcccatttacacttttgagactttttggtggatgtaaataaccccattctttgcttgaacacagtattttcccaatagcactttcattgccagtgtctttctttggtgcctttcctgttcagcattcttagcctgtggcagtaaagagaaactttgtgctacatgacgacaaagctgctaaatctcctatttttttaaaatcactaacattatattgcaatgaaggaaataaaaaagtctctatttaaattcttttttaaattttcttcagttggtgtgtttttgggatgtcttatttttagatggttacactgttagaacactattttcagaatctgaatgtaatttgtgtaataaagtgttttcagagcatta

SEQ ID NO: 309241 - DNA, 3593 bp, Homo sapiens
agcggagagcccgtggtcgcgcaggttctgaatgatgactgacgcgggtttgggtgatacccctcacagcccctgtcattccggagtcataaggcacccgcgcgtctagccccagcgccagggcacgcgagcggcgctggagggaggaaagcttccgcctgcgggccggacaaaagtcccgcctgcccacggctttttgcccgccgctcgtgaccgagacgcctcgccgcggccagctcgctgctctcgctggcggatggtgtgtggccgccgcaggacgcccgccgtgcccgggccatgaagtagcggctgctggcggcgccgctgcccaaccgccagccccagccccgcgctgcgctgcccggtcctctcccggcggggtcgtatcggcgtggacatggctggccgcgtccctagcctgctagttctccttgtttttccaagcagctgtttggctttccgaagcccactttctgtctttaagaggtttaaagaaactaccagaccattttccaatgaatgtcttggtaccaccagacccgtagttcctattgattcatcagattttgcattggatattcgcatgcctggggttacacctaaacagttgacttcaagcctcgagccagcatggatactgtccatcacatgttactttttggatgcaatatgccttcatccactggaagttactggttttgtgatgaaggaacctgtacagataaagccaatattctgtatgcctgggcgagaaatgctccccctacccggctccccaaaggtgttggattcagagttggaggagagactggaagtaaatactttgtactacaggtacactatggggatattagtgcttttagagataataacaaggactgttctggtgtgtccttacacctcacacgtctgccacagcctttaattgctggcatgtaccttatgatgtctgttgacactgttatcccagcaggagaaaaagtggtgaattctgacatttcatgccattataaaaattatccaatgcatgtctttgcctatagagttcacactcaccatttaggtaaggtagtaagtggatacagagtaagaaatggacagtggacactgattggacggcagagccctcagctgccacaggctttctaccctgtggggcatccagttgatgtaagttttggtgacctactggctgcaagatgtgtattcactggtgaaggaaggacagaagccacacacattggtggcacgtctagtgatgaaatgtgcaacttatacattatgtattacatggaagccaagcatgcagtttctttcatgacctgtacccagaatgtagctccagatatgttcagaaccataccaccagaggccaacattccaattcccgtgaagtctgatatggttatgatgcatgaacatcataaagaaacagaatataaagataagattcctttactacagcagccaaaacgagaagaagaagaagtgttagaccaggatttccacatggaagaggcactggattggcctggagtatacttgttaccaggccaggtttctggggtggctctagaccctaagaataacctggtgattttccacagaggtgaccatgtctgggatggaaactcgtttgacagcaagtttgtttaccagcaaataggactcggaccaattgaagaagacactattcttgtcatagatccaaataatgctgcagtactccagtccagtggaaaaaatctgttttacttgccacatggcttgagtatagataaagatgggaattattgggtcacagacgtggctctccatcaggtgttcaaactggatccaaacaataaagaaggccctgtattaatcctgggaaggagcatgcaaccaggcagtgaccagaatcacttctgtcaacccactgatgtggctgtggatccaggcactggagccatttatgtatcagatggttactgcaacagcaggattgtgcagttttcaccaagtggaaagttcatcacacagtggggagaagagtcttcagggagcagtcctctgccaggccagttcactgttcctcacagcttggctcttgtgcctcttttgggccaattatgtgtggcagaccgggaaaatggtcggatccagtgttttaaaactgacaccaaagaatttgtgagagagattaagcattcatcatttggaagaaatgtatttgcaatttcatatataccaggcttgctctttgcagtgaatgggaagcctcattttggggaccaagaacctgtacaaggatttgtgatgaacttttccaatggggaaattatagacatcttcaagccagtgcgcaagcactttgatatgcctcatgatattgttgcatctgaagatgggactgtgtacattggagatgctcataccaacaccgtgtggaagttcaccttgactgagaaattggaacatcgatcagttaaaaaggctggcattgaggtccaggaaatcaaagaagccgaggcagttgttgaaaccaaaatggagaacaaacccacctcctcagaattgcagaagatgcaagagaaacagaaactgatcaaagagccaggctcgggagtgcctgttgttctcattacaacccttctggttattccggtggttgtcctgctggccattgccatatttattcggtggaaaaaatcaagggcctttggagagattctgaacacaaactcgagacgagttcaggaagagtactgggaagatttagaggaaagggaagtggaggcttaaaccttggtaatttctttgcaagccgtaagggctacagtcgaaaagggtttgaccggcttagcactgagggcagtgaccaagagaaagaggatgatggaagtgaatcagaagaggagtattcagcacctctgcctgcgctcgcaccttcctcctcctgaaaaccaagctttgatttagattgagtaagatttacccagaatgtcagattcctttccctttagcacgtttaaagttctgtgtatttaattgtaaactgtactagtctgtgtgggactgtacacactttatttacttcgttttggttaagttggcttctgtttctagttgaggagtttcctaaaagttcataacagtgccattgtctttatatgaacatagactagagaaaccgtcctctttttccatcataattctaatctaacaatggaagatttgcccatttacacttttgagactttttggtggatgtaaataaccccattctttgcttgaacacagtattttcccaatagcactttcattgccagtgtctttctttggtgcctttcctgttcagcattcttagcctgtggcagtaaagagaaactttgtgctacatgacgacaaagctgctaaatctcctatttttttaaaatcactaacattatattgcaatgaaggaaataaaaaagtctctatttaaattcttttttaaattttcttcagttggtgtgtttttgggatgtcttatttttagatggttacactgttagaacactattttcagaatctgaatgtaatttgtgtaataaagtgttttcagagcatta

SEQ ID NO: 309242 - DNA, 3762 bp, Homo sapiens
caactaactccgcccgccgctccgccgcccgcaggctccggcttccgtcccggacagagcccgtggtcgcgcaggttctgaatgatgactgacgcgggtttgggtgatacccctcacagcccctgtcattccggagtcataaggcacccgcgcgtctagccccagcgccagggcacgcgagcggcgctggagggaggaaagcttccgcctgcgggccggacaaaagtcccgcctgcccacggctttttgcccgccgctcgtgaccgagacgcctcgccgcggccagctcgctgctctcgctggcggatggtgtgtggccgccgcaggacgcccgccgtgcccgggccatgaagtagcggctgctggcggcgccgctgcccaaccgccagccccagccccgcgctgcgctgcccggtcctctcccggcggggtcgtatcggcgtggacatggctggccgcgtccctagcctgctagttctccttgtttttccaagcagctgtttggctttccgaagcccactttctgtctttaagaggtttaaagaaactaccagaccattttccaatgaatgtcttggtaccaccagacccgtagttcctattgattcatcagattttgcattggatattcgcatgcctggggttacacctaaacagtccgatacatacttctgcatgtctatgcgaataccagtggatgaggaagccttcgtgattgacttcaagcctcgagccagcatggatactgtccatcacatgttactttttggatgcaatatgccttcatccactggaagttactggttttgtgatgaaggaacctgtacagataaagccaatattctgtatgcctgggcgagaaatgctccccctacccggctccccaaaggtgttggattcagagttggaggagagactggaagtaaatactttgtactacaggtacactatggggatattagtgcttttagagataataacaaggactgttctggtgtgtccttacacctcacacgtctgccacagcctttaattgctggcatgtaccttatgatgtctgttgacactgttatcccagcaggagaaaaagtggtgaattctgacatttcatgccattataaaaattatccaatgcatgtctttgcctatagagttcacactcaccatttaggtaaggtagtaagtggatacagagtaagaaatggacagtggacactgattggacggcagagccctcagctgccacaggctttctaccctgtggggcatccagttgatgtaagttttggtgacctactggctgcaagatgtgtattcactggtgaaggaaggacagaagccacacacattggtggcacgtctagtgatgaaatgtgcaacttatacattatgtattacatggaagccaagcatgcagtttctttcatgacctgtacccagaatgtagctccagatatgttcagaaccataccaccagaggccaacattccaattcccgtgaagtctgatatggttatgatgcatgaacatcataaagaaacagaatataaagataagattcctttactacagcagccaaaacgagaagaagaagaagtgttagaccagggtgatttctattcactactttccaagctgctaggagaaagggaagatgttgttcatgtgcacaaatataatcctacagaaaaggcagaatcagagtcagacctggtagctgagattgcaaatgtagtccaaaaaaaggatcttggtcgatctgatgccagagagggtgcagaacatgagaggggtaatgctattcttgtcagagacagaattcacaaattccacagactagtatctaccttgaggccaccagagagcagagttttctcattacagcagcccccacctggtgaaggcacctgggaaccagaacacacaggagatttccacatggaagaggcactggattggcctggagtatacttgttaccaggccaggtttctggggtggctctagaccctaagaataacctggtgattttccacagaggtgaccatgtctgggatggaaactcgtttgacagcaagtttgtttaccagcaaataggactcggaccaattgaagaagacactattcttgtcatagatccaaataatgctgcagtactccagtccagtggaaaaaatctgttttacttgccacatggcttgagtatagataaagatgggaattattgggtcacagacgtggctctccatcaggtgttcaaactggatccaaacaataaagaaggccctgtattaatcctgggaaggagcatgcaaccaggcagtgaccagaatcacttctgtcaacccactgatgtggctgtggatccaggcactggagccatttatgtatcagatggttactgcaacagcaggattgtgcagttttcaccaagtggaaagttcatcacacagtggggagaagagtcttcagggagcagtcctctgccaggccagttcactgttcctcacagcttggctcttgtgcctcttttgggccaattatgtgtggcagaccgggaaaatggtcggatccagtgttttaaaactgacaccaaagaatttgtgagagagattaagcattcatcatttggaagaaatgtatttgcaatttcatatataccaggcttgctctttgcagtgaatgggaagcctcattttggggaccaagaacctgtacaaggatttgtgatgaacttttccaatggggaaattatagacatcttcaagccagtgcgcaagcactttgatatgcctcatgatattgttgcatctgaagatgggactgtgtacattggagatgctcataccaacaccgtgtggaagttcaccttgactgagaaattggaacatcgatcagttaaaaaggctggcattgaggtccaggaaatcaaaggaaagggaagtggaggcttaaaccttggtaatttctttgcaagccgtaagggctacagtcgaaaagggtttgaccggcttagcactgagggcagtgaccaagagaaagaggatgatggaagtgaatcagaagaggagtattcagcacctctgcctgcgctcgcaccttcctcctcctgaaaaccaagctttgatttagattgagtaagatttacccagaatgtcagattcctttccctttagcacgtttaaagttctgtgtatttaattgtaaactgtactagtctgtgtgggactgtacacactttatttacttcgttttggttaagttggcttctgtttctagttgaggagtttcctaaaagttcataacagtgccattgtctttatatgaacatagactagagaaaccgtcctctttttccatcataattctaatctaacaatggaagatttgcccatttacacttttgagactttttggtggatgtaaataaccccattctttgcttgaacacagtattttcccaatagcactttcattgccagtgtctttctttggtgcctttcctgttcagcattcttagcctgtggcagtaaagagaaactttgtgctacatgacgacaaagctgctaaatctcctatttttttaaaatcactaacattatattgcaatgaaggaaataaaaaagtctctatttaaattcttttttaaattttcttcagttggtgtgtttttgggatgtcttatttttagatggttacactgttagaacactattttcagaatctgaatgtaatttgtgtaataaagtgttttcagagcatta

SEQ ID NO: 309243 - DNA, 3601 bp, Homo sapiens
caactaactccgcccgccgctccgccgcccgcaggctccggcttccgtcccggacagagcccgtggtcgcgcaggttctgaatgatgactgacgcgggtttgggtgatacccctcacagcccctgtcattccggagtcataaggcacccgcgcgtctagccccagcgccagggcacgcgagcggcgctggagggaggaaagcttccgcctgcgggccggacaaaagtcccgcctgcccacggctttttgcccgccgctcgtgaccgagacgcctcgccgcggccagctcgctgctctcgctggcggatggtgtgtggccgccgcaggacgcccgccgtgcccgggccatgaagtagcggctgctggcggcgccgctgcccaaccgccagccccagccccgcgctgcgctgcccggtcctctcccggcggggtcgtatcggcgtggacatggctggccgcgtccctagcctgctagttctccttgtttttccaagcagctgtttggctttccgaagcccactttctgtctttaagaggtttaaagaaactaccagaccattttccaatgaatgtcttggtaccaccagacccgtagttcctattgattcatcagattttgcattggatattcgcatgcctggggttacacctaaacagtccgatacatacttctgcatgtctatgcgaataccagtggatgaggaagccttcgtgattgacttcaagcctcgagccagcatggatactgtccatcacatgttactttttggatgcaatatgccttcatccactggaagttactggttttgtgatgaaggaacctgtacagataaagccaatattctgtatgcctgggcgagaaatgctccccctacccggctccccaaaggtgttggattcagagttggaggagagactggaagtaaatactttgtactacaggtacactatggggatattagtgcttttagagataataacaaggactgttctggtgtgtccttacacctcacacgtctgccacagcctttaattgctggcatgtaccttatgatgtctgttgacactgttatcccagcaggagaaaaagtggtgaattctgacatttcatgccattataaaaattatccaatgcatgtctttgcctatagagttcacactcaccatttaggtaaggtagtaagtggatacagagtaagaaatggacagtggacactgattggacggcagagccctcagctgccacaggctttctaccctgtggggcatccagttgatgtaagttttggtgacctactggctgcaagatgtgtattcactggtgaaggaaggacagaagccacacacattggtggcacgtctagtgatgaaatgtgcaacttatacattatgtattacatggaagccaagcatgcagtttctttcatgacctgtacccagaatgtagctccagatatgttcagaaccataccaccagaggccaacattccaattcccgtgaagtctgatatggttatgatgcatgaacatcataaagaaacagaatataaagataagattcctttactacagcagccaaaacgagaagaagaagaagtgttagaccaggatttccacatggaagaggcactggattggcctggagtatacttgttaccaggccaggtttctggggtggctctagaccctaagaataacctggtgattttccacagaggtgaccatgtctgggatggaaactcgtttgacagcaagtttgtttaccagcaaataggactcggaccaattgaagaagacactattcttgtcatagatccaaataatgctgcagtactccagtccagtggaaaaaatctgttttacttgccacatggcttgagtatagataaagatgggaattattgggtcacagacgtggctctccatcaggtgttcaaactggatccaaacaataaagaaggccctgtattaatcctgggaaggagcatgcaaccaggcagtgaccagaatcacttctgtcaacccactgatgtggctgtggatccaggcactggagccatttatgtatcagatggttactgcaacagcaggattgtgcagttttcaccaagtggaaagttcatcacacagtggggagaagagtcttcagggagcagtcctctgccaggccagttcactgttcctcacagcttggctcttgtgcctcttttgggccaattatgtgtggcagaccgggaaaatggtcggatccagtgttttaaaactgacaccaaagaatttgtgagagagattaagcattcatcatttggaagaaatgtatttgcaatttcatatataccaggcttgctctttgcagtgaatgggaagcctcattttggggaccaagaacctgtacaaggatttgtgatgaacttttccaatggggaaattatagacatcttcaagccagtgcgcaagaattggaacatcgatcagttaaaaaggctggcattgaggtccaggaaatcaaagaagccgaggcagttgttgaaaccaaaatggagaacaaacccacctcctcagaattgcagaagatgcaagagaaacagaaactgatcaaagagccaggctcgggagtgcctgttgttctcattacaacccttctggttattccggtggttgtcctgctggccattgccatatttattcggtggaaaaaatcaagggcctttggagagattctgaacacaaactcgagacgagttcaggaagagtactgggaagatttagaggaaagggaagtggaggcttaaaccttggtaatttctttgcaagccgtaagggctacagtcgaaaagggtttgaccggcttagcactgagggcagtgaccaagagaaagaggatgatggaagtgaatcagaagaggagtattcagcacctctgcctgcgctcgcaccttcctcctcctgaaaaccaagctttgatttagattgagtaagatttacccagaatgtcagattcctttccctttagcacgtttaaagttctgtgtatttaattgtaaactgtactagtctgtgtgggactgtacacactttatttacttcgttttggttaagttggcttctgtttctagttgaggagtttcctaaaagttcataacagtgccattgtctttatatgaacatagactagagaaaccgtcctctttttccatcataattctaatctaacaatggaagatttgcccatttacacttttgagactttttggtggatgtaaataaccccattctttgcttgaacacagtattttcccaatagcactttcattgccagtgtctttctttggtgcctttcctgttcagcattcttagcctgtggcagtaaagagaaactttgtgctacatgacgacaaagctgctaaatctcctatttttttaaaatcactaacattatattgcaatgaaggaaataaaaaagtctctatttaaattcttttttaaattttcttcagttggtgtgtttttgggatgtcttatttttagatggttacactgttagaacactattttcagaatctgaatgtaatttgtgtaataaagtgttttcagagcatta

SEQ ID NO: 309244 - DNA, 3630 bp, Homo sapiens
caactaactccgcccgccgctccgccgcccgcaggctccggcttccgtcccggacagagcccgtggtcgcgcaggttctgaatgatgactgacgcgggtttgggtgatacccctcacagcccctgtcattccggagtcataaggcacccgcgcgtctagccccagcgccagggcacgcgagcggcgctggagggaggaaagcttccgcctgcgggccggacaaaagtcccgcctgcccacggctttttgcccgccgctcgtgaccgagacgcctcgccgcggccagctcgctgctctcgctggcggatggtgtgtggccgccgcaggacgcccgccgtgcccgggccatgaagtagcggctgctggcggcgccgctgcccaaccgccagccccagccccgcgctgcgctgcccggtcctctcccggcggggtcgtatcggcgtggacatggctggccgcgtccctagcctgctagttctccttgtttttccaagcagctgtttggctttccgaagcccactttctgtctttaagaggtttaaagaaactaccagaccattttccaatgaatgtcttggtaccaccagacccgtagttcctattgattcatcagattttgcattggatattcgcatgcctggggttacacctaaacagtccgatacatacttctgcatgtctatgcgaataccagtggatgaggaagccttcgtgattgacttcaagcctcgagccagcatggatactgtccatcacatgttactttttggatgcaatatgccttcatccactggaagttactggttttgtgatgaaggaacctgtacagataaagccaatattctgtatgcctgggcgagaaatgctccccctacccggctccccaaaggtgttggattcagagttggaggagagactggaagtaaatactttgtactacaggtacactatggggatattagtgcttttagagataataacaaggactgttctggtgtgtccttacacctcacacgtctgccacagcctttaattgctggcatgtaccttatgatgtctgttgacactgttatcccagcaggagaaaaagtggtgaattctgacatttcatgccattataaaaattatccaatgcatgtctttgcctatagagttcacactcaccatttaggtaaggtagtaagtggatacagagtaagaaatggacagtggacactgattggacggcagagccctcagctgccacaggctttctaccctgtggggcatccagttgatgtaagttttggtgacctactggctgcaagatgtgtattcactggtgaaggaaggacagaagccacacacattggtggcacgtctagtgatgaaatgtgcaacttatacattatgtattacatggaagccaagcatgcagtttctttcatgacctgtacccagaatgtagctccagatatgttcagaaccataccaccagaggccaacattccaattcccgtgaagtctgatatggttatgatgcatgaacatcataaagaaacagaatataaagataagattcctttactacagcagccaaaacgagaagaagaagaagtgttagaccaggatttccacatggaagaggcactggattggcctggagtatacttgttaccaggccaggtttctggggtggctctagaccctaagaataacctggtgattttccacagaggtgaccatgtctgggatggaaactcgtttgacagcaagtttgtttaccagcaaataggactcggaccaattgaagaagacactattcttgtcatagatccaaataatgctgcagtactccagtccagtggaaaaaatctgttttacttgccacatggcttgagtatagataaagatgggaattattgggtcacagacgtggctctccatcaggtgttcaaactggatccaaacaataaagaaggccctgtattaatcctgggaaggagcatgcaaccaggcagtgaccagaatcacttctgtcaacccactgatgtggctgtggatccaggcactggagccatttatgtatcagatggttactgcaacagcaggattgtgcagttttcaccaagtggaaagttcatcacacagtggggagaagagtcttcagggagcagtcctctgccaggccagttcactgttcctcacagcttggctcttgtgcctcttttgggccaattatgtgtggcagaccgggaaaatggtcggatccagtgttttaaaactgacaccaaagaatttgtgagagagattaagcattcatcatttggaagaaatgtatttgcaatttcatatataccaggcttgctctttgcagtgaatgggaagcctcattttggggaccaagaacctgtacaaggatttgtgatgaacttttccaatggggaaattatagacatcttcaagccagtgcgcaagcactttgatatgcctcatgatattgttgcatctgaagatgggactgtgtacattggagatgctcataccaacaccgtgtggaagttcaccttgactgagaaattggaacatcgatcagttaaaaaggctggcattgaggtccaggaaatcaaagaaacagaaactgatcaaagagccaggctcgggagtgcctgttgttctcattacaacccttctggttattccggtggttgtcctgctggccattgccatatttattcggtggaaaaaatcaagggcctttggagagattctgaacacaaactcgagacgagttcaggaagagtactgggaagatttagaggaaagggaagtggaggcttaaaccttggtaatttctttgcaagccgtaagggctacagtcgaaaagggtttgaccggcttagcactgagggcagtgaccaagagaaagaggatgatggaagtgaatcagaagaggagtattcagcacctctgcctgcgctcgcaccttcctcctcctgaaaaccaagctttgatttagattgagtaagatttacccagaatgtcagattcctttccctttagcacgtttaaagttctgtgtatttaattgtaaactgtactagtctgtgtgggactgtacacactttatttacttcgttttggttaagttggcttctgtttctagttgaggagtttcctaaaagttcataacagtgccattgtctttatatgaacatagactagagaaaccgtcctctttttccatcataattctaatctaacaatggaagatttgcccatttacacttttgagactttttggtggatgtaaataaccccattctttgcttgaacacagtattttcccaatagcactttcattgccagtgtctttctttggtgcctttcctgttcagcattcttagcctgtggcagtaaagagaaactttgtgctacatgacgacaaagctgctaaatctcctatttttttaaaatcactaacattatattgcaatgaaggaaataaaaaagtctctatttaaattcttttttaaattttcttcagttggtgtgtttttgggatgtcttatttttagatggttacactgttagaacactattttcagaatctgaatgtaatttgtgtaataaagtgttttcagagcatta

SEQ ID NO: 309245 - DNA, 3963 bp, Homo sapiens
caactaactccgcccgccgctccgccgcccgcaggctccggcttccgtcccggacagagcccgtggtcgcgcaggttctgaatgatgactgacgcgggtttgggtgatacccctcacagcccctgtcattccggagtcataaggcacccgcgcgtctagccccagcgccagggcacgcgagcggcgctggagggaggaaagcttccgcctgcgggccggacaaaagtcccgcctgcccacggctttttgcccgccgctcgtgaccgagacgcctcgccgcggccagctcgctgctctcgctggcggatggtgtgtggccgccgcaggacgcccgccgtgcccgggccatgaagtagcggctgctggcggcgccgctgcccaaccgccagccccagccccgcgctgcgctgcccggtcctctcccggcggggtcgtatcggcgtggacatggctggccgcgtccctagcctgctagttctccttgtttttccaagcagctgtttggctttccgaagcccactttctgtctttaagaggtttaaagaaactaccagaccattttccaatgaatgtcttggtaccaccagacccgtagttcctattgattcatcagattttgcattggatattcgcatgcctggggttacacctaaacagacatacttctgcatgtctatgcgaataccagtggatgaggaagccttcgtgattgacttcaagcctcgagccagcatggatactgtccatcacatgttactttttggatgcaatatgccttcatccactggaagttactggttttgtgatgaaggaacctgtacagataaagccaatattctgtatgcctgggcgagaaatgctccccctacccggctccccaaaggtgttggattcagagttggaggagagactggaagtaaatactttgtactacaggtacactatggggatattagtgcttttagagataataacaaggactgttctggtgtgtccttacacctcacacgtctgccacagcctttaattgctggcatgtaccttatgatgtctgttgacactgttatcccagcaggagaaaaagtggtgaattctgacatttcatgccattataaaaattatccaatgcatgtctttgcctatagagttcacactcaccatttaggtaaggtagtaagtggatacagagtaagaaatggacagtggacactgattggacggcagagccctcagctgccacaggctttctaccctgtggggcatccagttgatgtaagttttggtgacctactggctgcaagatgtgtattcactggtgaaggaaggacagaagccacacacattggtggcacgtctagtgatgaaatgtgcaacttatacattatgtattacatggaagccaagcatgcagtttctttcatgacctgtacccagaatgtagctccagatatgttcagaaccataccaccagaggccaacattccaattcccgtgaagtctgatatggttatgatgcatgaacatcataaagaaacagaatataaagataagattcctttactacagcagccaaaacgagaagaagaagaagtgttagaccagggtgatttctattcactactttccaagctgctaggagaaagggaagatgttgttcatgtgcacaaatataatcctacagaaaaggcagaatcagagtcagacctggtagctgagattgcaaatgtagtccaaaaaaaggatcttggtcgatctgatgccagagagggtgcagaacatgagaggggtaatgctattcttgtcagagacagaattcacaaattccacagactagtatctaccttgaggccaccagagagcagagttttctcattacagcagcccccacctggtgaaggcacctgggaaccagaacacacaggagatttccacatggaagaggcactggattggcctggagtatacttgttaccaggccaggtttctggggtggctctagaccctaagaataacctggtgattttccacagaggtgaccatgtctgggatggaaactcgtttgacagcaagtttgtttaccagcaaataggactcggaccaattgaagaagacactattcttgtcatagatccaaataatgctgcagtactccagtccagtggaaaaaatctgttttacttgccacatggcttgagtatagataaagatgggaattattgggtcacagacgtggctctccatcaggtgttcaaactggatccaaacaataaagaaggccctgtattaatcctgggaaggagcatgcaaccaggcagtgaccagaatcacttctgtcaacccactgatgtggctgtggatccaggcactggagccatttatgtatcagatggttactgcaacagcaggattgtgcagttttcaccaagtggaaagttcatcacacagtggggagaagagtcttcagggagcagtcctctgccaggccagttcactgttcctcacagcttggctcttgtgcctcttttgggccaattatgtgtggcagaccgggaaaatggtcggatccagtgttttaaaactgacaccaaagaatttgtgagagagattaagcattcatcatttggaagaaatgtatttgcaatttcatatataccaggcttgctctttgcagtgaatgggaagcctcattttggggaccaagaacctgtacaaggatttgtgatgaacttttccaatggggaaattatagacatcttcaagccagtgcgcaagcactttgatatgcctcatgatattgttgcatctgaagatgggactgtgtacattggagatgctcataccaacaccgtgtggaagttcaccttgactgagaaattggaacatcgatcagttaaaaaggctggcattgaggtccaggaaatcaaagaagccgaggcagttgttgaaaccaaaatggagaacaaacccacctcctcagaattgcagaagatgcaagagaaacagaaactgatcaaagagccaggctcgggagtgcctgttgttctcattacaacccttctggttattccggtggttgtcctgctggccattgccatatttattcggtggaaaaaatcaagggcctttggagagattctgaacacaaactcgagacgagttcaggaagagtactgggaagatttagaggaaagggaagtggaggcttaaaccttggtaatttctttgcaagccgtaagggctacagtcgaaaagggtttgaccggcttagcactgagggcagtgaccaagagaaagaggatgatggaagtgaatcagaagaggagtattcagcacctctgcctgcgctcgcaccttcctcctcctgtttccctttagcacgtttaaagttctgtgtatttaattgtaaactgtactagtctgtgtgggactgtacacactttatttacttcgttttggttaagttggcttctgtttctagttgaggagtttcctaaaagttcataacagtgccattgtctttatatgaacatagactagagaaaccgtcctctttttccatcataattctaatctaacaatggaagatttgcccatttacacttttgagactttttggtggatgtaaataaccccattctttgcttgaacacagtattttcccaatagcactttcattgccagtgtctttctttggtgcctttcctgttcagcattcttagcctgtggcagtaaagagaaactttgtgctacatgacgacaaagctgctaaatctcctatttttttaaaatcactaacattatattgcaatgaaggaaataaaaaagtctctatttaaattcttttttaaattttcttcagttggtgtgtttttgggatgtcttatttttagatggttacactgttagaacactattttcagaatctgaatgtaatttgtgtaataaagtgttttcagagcatta

SEQ ID NO: 309246 - DNA, 3397 bp, Homo sapiens
caactaactccgcccgccgctccgccgcccgcaggctccggcttccgtcccggacagagcccgtggtcgcgcaggttctgaatgatgactgacgcgggtttgggtgatacccctcacagcccctgtcattccggagtcataaggcacccgcgcgtctagccccagcgccagggcacgcgagcggcgctggagggaggaaagcttccgcctgcgggccggacaaaagtcccgcctgcccacggctttttgcccgccgctcgtgaccgagacgcctcgccgcggccagctcgctgctctcgctggcggatggtgtgtggccgccgcaggacgcccgccgtgcccgggccatgaagtagcggctgctggcggcgccgctgcccaaccgccagccccagccccgcgctgcgctgcccggtcctctcccggcggggtcgtatcggcgtggacatggctggccgcgtccctagcctgctagttctccttgtttttccaagcagctgtttggctttccgaagcccactttctgtctttaagaggtttaaagaaactaccagaccattttccaatgaatgtcttggtaccaccagacccgtagttcctattgattcatcagattttgcattggatattcgcatgcctggggttacacctaaacagtccgatacatacttctgcatgtctatgcgaataccagtggatgaggaagccttcgtgattgacttcaagcctcgagccagcatggatactgtccatcacatgttactttttggatgcaatatgccttcatccactggaagttactggttttgtgatgaaggaacctgtacagataaagccaatattctgtatgcctgggcgagaaatgctccccctacccggctccccaaaggtgttggattcagagttggaggagagactggaagtaaatactttgtactacaggtacactatggggatattagtgcttttagagataataacaaggactgttctggtgtgtccttacacctcacacgtctgccacagcctttaattgctggcatgtaccttatgatgtctgttgacactgttatcccagcaggagaaaaagtggtgaattctgacatttcatgccattataaaaattatccaatgcatgtctttgcctatagagttcacactcaccatttaggtaaggtagtaagtggatacagagtaagaaatggacagtggacactgattggacggcagagccctcagctgccacaggctttctaccctgtggggcatccagttgatgtaagttttggtgacctactggctgcaagatgtgtattcactggtgaaggaaggacagaagccacacacattggtggcacgtctagtgatgaaatgtgcaacttatacattatgtattacatggaagccaagcatgcagtttctttcatgacctgtacccagaatgtagctccagatatgttcagaaccataccaccagaggccaacattccaattcccgtgaagtctgatatggttatgatgcatgaacatcataaagaaacagaatataaagataagattcctttactacagcagccaaaacgagaagaagaagaagtgttagaccaggatttccacatggaagaggcactggattggcctggagtatacttgttaccaggccaggtttctggggtggctctagaccctaagaataacctggtgattttccacagaggtgaccatgtctgggatggaaactcgtttgacagcaagtttgtttaccagcaaataggactcggaccaattgaagaagacactattcttgtcatagatccaaataatgctgcagtactccagtccagtggaaaaaatctgttttacttgccacatggcttgagtatagataaagatgggaattattgggtcacagacgtggctctccatcaggtgttcaaactggatccaaacaataaagaaggccctgtattaatcctgggaaggagcatgcaaccaggcagtgaccagaatcacttctgtcaacccactgatgtggctgtggatccaggcactggagccatttatgtatcagatggttactgcaacagcaggattgtgcagttttcaccaagtggaaagttcatcacacagtggggagaagagtcttcagggagcagtcctctgccaggccagttcactgttcctcacagcttggctcttgtgcctcttttgggccaattatgtgtggcagaccgggaaaatggtcggatccagtgttttaaaactgacaccaaagaatttgtgagagagattaagcattcatcatttggaagaaatgtatttgcaatttcatatataccaggcttgctctttgcagtgaatgggaagcctcattttggggaccaagaacctgtacaaggatttgtgatgaacttttccaatggggaaattatagacatcttcaagccagtgcgcaagaattggaacatcgatcagttaaaaaggctggcattgaggtccaggaaatcaaagagattctgaacacaaactcgagacgagttcaggaagagtactgggaagatttagaggaaagggaagtggaggcttaaaccttggtaatttctttgcaagccgtaagggctacagtcgaaaagggtttgaccggcttagcactgagggcagtgaccaagagaaagaggatgatggaagtgaatcagaagaggagtattcagcacctctgcctgcgctcgcaccttcctcctcctgaaaaccaagctttgatttagattgagtaagatttacccagaatgtcagattcctttccctttagcacgtttaaagttctgtgtatttaattgtaaactgtactagtctgtgtgggactgtacacactttatttacttcgttttggttaagttggcttctgtttctagttgaggagtttcctaaaagttcataacagtgccattgtctttatatgaacatagactagagaaaccgtcctctttttccatcataattctaatctaacaatggaagatttgcccatttacacttttgagactttttggtggatgtaaataaccccattctttgcttgaacacagtattttcccaatagcactttcattgccagtgtctttctttggtgcctttcctgttcagcattcttagcctgtggcagtaaagagaaactttgtgctacatgacgacaaagctgctaaatctcctatttttttaaaatcactaacattatattgcaatgaaggaaataaaaaagtctctatttaaattcttttttaaattttcttcagttggtgtgtttttgggatgtcttatttttagatggttacactgttagaacactattttcagaatctgaatgtaatttgtgtaataaagtgttttcagagcatta

SEQ ID NO: 309247 - DNA, 1425 bp, Homo sapiens
ctataccacccatcctgccattatttatacatgcactagtttggaaaaaataaaaactttttttaaaaaaaagaaaaaaatgattaccgggtgggagtgagcatgttttaccctttgtcaacgagcccagctggcatggcttttctggagtgcgaggggccagtgtcctctcccgataccacactttgatatgcctcatgatattgttgcatctgaagatgggactgtgtacattggagatgctcataccaacaccgtgtggaagttcaccttgactgagaaattggaacatcgatcagttaaaaaggctggcattgaggtccaggaaatcaaagaagccgaggcagttgttgaaaccaaaatggagaacaaacccacctcctcagaattgcagaagatgcaagagaaacagaaactgatcaaagagccaggctcgggagtgcctgttgttctcattacaacccttctggttattccggtggttgtcctgctggccattgccatatttattcggtggaaaaaatcaagggcctttggagagattctgaacacaaactcgagacgagttcaggaagagtactgggaagatttagaggaaagggaagtggaggcttaaaccttggtaatttctttgcaagccgtaagggctacagtcgaaaagggtttgaccggcttagcactgagggcagtgaccaagagaaagaggatgatggaagtgaatcagaagaggagtattcagcacctctgcctgcgctcgcaccttcctcctcctgaaaaccaagctttgatttagattgagtaagatttacccagaatgtcagattcctttccctttagcacgtttaaagttctgtgtatttaattgtaaactgtactagtctgtgtgggactgtacacactttatttacttcgttttggttaagttggcttctgtttctagttgaggagtttcctaaaagttcataacagtgccattgtctttatatgaacatagactagagaaaccgtcctctttttccatcataattctaatctaacaatggaagatttgcccatttacacttttgagactttttggtggatgtaaataaccccattctttgcttgaacacagtattttcccaatagcactttcattgccagtgtctttctttggtgcctttcctgttcagcattcttagcctgtggcagtaaagagaaactttgtgctacatgacgacaaagctgctaaatctcctatttttttaaaatcactaacattatattgcaatgaaggaaataaaaaagtctctatttaaattcttttttaaattttcttcagttggtgtgtttttgggatgtcttatttttagatggttacactgttagaacactattttcagaatctgaatgtaatttgtgtaataaagtgttttcagagcatta

SEQ ID NO: 309248 - DNA, 3931 bp, Homo sapiens
caactaactccgcccgccgctccgccgcccgcaggctccggcttccgtcccggacagagcccgtggtcgcgcaggttctgaatgatgactgacgcgggtttgggtgatacccctcacagcccctgtcattccggagtcataaggcacccgcgcgtctagccccagcgccagggcacgcgagcggcgctggagggaggaaagcttccgcctgcgggccggacaaaagtcccgcctgcccacggctttttgcccgccgctcgtgaccgagacgcctcgccgcggccagctcgctgctctcgctggcggatggtgtgtggccgccgcaggacgcccgccgtgcccgggccatgaagtagcggctgctggcggcgccgctgcccaaccgccagccccagccccgcgctgcgctgcccggtcctctcccggcggggtcgtatcggcgtggacatggctggccgcgtccctagcctgctagttctccttgtttttccaagcagctgtttggctttccgaagcccactttctgtctttaagaggtttaaagaaactaccagaccattttccaatgaatgtcttggtaccaccagacccgtagttcctattgattcatcagattttgcattggatattcgcatgcctggggttacacctaaacagacatacttctgcatgtctatgcgaataccagtggatgaggaagccttcgtgattgacttcaagcctcgagccagcatggatactgtccatcacatgttactttttggatgcaatatgccttcatccactggaagttactggttttgtgatgaaggaacctgtacagataaagccaatattctgtatgcctgggcgagaaatgctccccctacccggctccccaaaggtgttggattcagagttggaggagagactggaagtaaatactttgtactacaggtacactatggggatattagtgcttttagagataataacaaggactgttctggtgtgtccttacacctcacacgtctgccacagcctttaattgctggcatgtaccttatgatgtctgttgacactgttatcccagcaggagaaaaagtggtgaattctgacatttcatgccattataaaaattatccaatgcatgtctttgcctatagagttcacactcaccatttaggtaaggtagtaagtggatacagagtaagaaatggacagtggacactgattggacggcagagccctcagctgccacaggctttctaccctgtggggcatccagttgatgtaagttttggtgacctactggctgcaagatgtgtattcactggtgaaggaaggacagaagccacacacattggtggcacgtctagtgatgaaatgtgcaacttatacattatgtattacatggaagccaagcatgcagtttctttcatgacctgtacccagaatgtagctccagatatgttcagaaccataccaccagaggccaacattccaattcccgtgaagtctgatatggttatgatgcatgaacatcataaagaaacagaatataaagataagattcctttactacagcagccaaaacgagaagaagaagaagtgttagaccagggtgatttctattcactactttccaagctgctaggagaaagggaagatgttgttcatgtgcacaaatataatcctacagaaaaggcagaatcagagtcagacctggtagctgagattgcaaatgtagtccaaaaaaaggatcttggtcgatctgatgccagagagggtgcagaacatgagaggggtaatgctattcttgtcagagacagaattcacaaattccacagactagtatctaccttgaggccaccagagagcagagttttctcattacagcagcccccacctggtgaaggcacctgggaaccagaacacacaggagatttccacatggaagaggcactggattggcctggagtatacttgttaccaggccaggtttctggggtggctctagaccctaagaataacctggtgattttccacagaggtgaccatgtctgggatggaaactcgtttgacagcaagtttgtttaccagcaaataggactcggaccaattgaagaagacactattcttgtcatagatccaaataatgctgcagtactccagtccagtggaaaaaatctgttttacttgccacatggcttgagtatagataaagatgggaattattgggtcacagacgtggctctccatcaggtgttcaaactggatccaaacaataaagaaggccctgtattaatcctgggaaggagcatgcaaccaggcagtgaccagaatcacttctgtcaacccactgatgtggctgtggatccaggcactggagccatttatgtatcagatggttactgcaacagcaggattgtgcagttttcaccaagtggaaagttcatcacacagtggggagaagagtcttcagggagcagtcctctgccaggccagttcactgttcctcacagcttggctcttgtgcctcttttgggccaattatgtgtggcagaccgggaaaatggtcggatccagtgttttaaaactgacaccaaagaatttgtgagagagattaagcattcatcatttggaagaaatgtatttgcaatttcatatataccaggcttgctctttgcagtgaatgggaagcctcattttggggaccaagaacctgtacaaggatttgtgatgaacttttccaatggggaaattatagacatcttcaagccagtgcgcaagcactttgatatgcctcatgatattgttgcatctgaagatgggactgtgtacattggagatgctcataccaacaccgtgtggaagttcaccttgactgagaaattggaacatcgatcagttaaaaaggctggcattgaggtccaggaaatcaaagaagccgaggcagttgttgaaaccaaaatggagaacaaacccacctcctcagaattgcagaagatgcaagagaaacagaaactgatcaaagagccaggctcgggagtgcctgttgttctcattacaacccttctggttattccggtggttgtcctgctggccattgccatatttattcggtggaaaaaatcaagggcctttggagagattctgaacacaaactcgagacgagttcaggaagagtactgggaagatttagaggaaagggaagtggaggcttaaaccttggtaatttctttgcaagccgtaagggctacagtcgaaaagggtttgaccggcttagcactgagggcagtgaccaagagaaagaggatgatggaagtgaatcagaagaggagtattcagcacctctgcctgcgctcgcaccttcctcctcctgaaaaccaagctttgatttagattgagtaagatttacccagaatgtcagattcctttccctttagcacgtttaaagttctgtgtatttaattgtaaactgtactagtctgtgtgggactgtacacactttatttacttcgttttggttaagttggcttctgtttctagttgaggagtttcctaaaagttcataacagtgccattgtctttatatgaacatagactagagaaaccgtcctctttttccatcataattctaatctaacaatggaagatttgcccatttacacttttgagactttttggtggatgtaaatattggtgtgtttttgggatgtcttatttttagatggttacactgttagaacactattttcagaatctgaatgtaatttgtgtaataaagtgttttcagagcattagctgtcagtgtattttccagtttttgcgtatttgcagattttacatacaacttttataataattacacaaacccacaaatattagtgaaacttactcgatgtcttcaactaaaagaaatgtgtgtattgtacaaaatttagaagat

SEQ ID NO: 309249 - DNA, 1151 bp, Homo sapiens
tgtcagaggagaaaactgaagctcagagaagtaatttatcaagactgcacagccagtaagagacacgggcaggagtcaaacccagcttgggccctttatgtatgtctcagaaatataccgcctttcttaaaaattagaattgcatacagacaagagccaggccttgctttatcatttaccagttcctattttaagttggaagttgagtgcatgggttgagaaagatgactgggactcattttgaaatgtgccatctttttttagcagattctgaacacaaactcgagacgagttcaggaagagtactgggaagatttagaggaaagggaagtggaggcttaaaccttggtaatttctttgcaagccgtaagggctacagtcgaaaagggtttgaccggcttagcactgagggcagtgaccaagagaaagaggatgatggaagtgaatcagaagaggagtattcagcacctctgcctgcgctcgcaccttcctcctcctgaaaaccaagctttgatttagattgagtaagatttacccagaatgtcagattcctttccctttagcacgtttaaagttctgtgtatttaattgtaaactgtactagtctgtgtgggactgtacacactttatttacttcgttttggttaagttggcttctgtttctagttgaggagtttcctaaaagttcataacagtgccattgtctttatatgaacatagactagagaaaccgtcctctttttccatcataattctaatctaacaatggaagatttgcccatttacacttttgagactttttggtggatgtaaataaccccattctttgcttgaacacagtattttcccaatagcactttcattgccagtgtctttctttggtgcctttcctgttcagcattcttagcctgtggcagtaaagagaaactttgtgctacatgacgacaaagctgctaaatctcctatttttttaaaatcactaacattatattgcaatgaaggaaataaaaaagtctctatttaaattcttttttaaattttcttcagttggtgtgtttttgggatgtcttatttttagatggttacactgttagaacactattttcagaatctgaatgtaatttgtgtaataaagtgttttcagagcatta

SEQ ID NO: 309250 - DNA, 884 bp, Homo sapiens
agcaaggagttacgcggagaacaattgcatgaggggtaaccgagactgcgagatgaaagggaagtggaggcttaaaccttggtaatttctttgcaagccgtaagggctacagtcgaaaagggtttgaccggcttagcactgagggcagtgaccaagagaaagaggatgatggaagtgaatcagaagaggagtattcagcacctctgcctgcgctcgcaccttcctcctcctgaaaaccaagctttgatttagattgagtaagatttacccagaatgtcagattcctttccctttagcacgtttaaagttctgtgtatttaattgtaaactgtactagtctgtgtgggactgtacacactttatttacttcgttttggttaagttggcttctgtttctagttgaggagtttcctaaaagttcataacagtgccattgtctttatatgaacatagactagagaaaccgtcctctttttccatcataattctaatctaacaatggaagatttgcccatttacacttttgagactttttggtggatgtaaataaccccattctttgcttgaacacagtattttcccaatagcactttcattgccagtgtctttctttggtgcctttcctgttcagcattcttagcctgtggcagtaaagagaaactttgtgctacatgacgacaaagctgctaaatctcctatttttttaaaatcactaacattatattgcaatgaaggaaataaaaaagtctctatttaaattcttttttaaattttcttcagttggtgtgtttttgggatgtcttatttttagatggttacactgttagaacactattttcagaatctgaatgtaatttgtgtaataaagtgttttcagagcatta

SEQ ID NO: 309251 - DNA, 2624 bp, Homo sapiens
caactaactccgcccgccgctccgccgcccgcaggctccggcttccgtcccggacagagcccgtggtcgcgcaggttctgaatgatgactgacgcgggtttgggtgatacccctcacagcccctgtcattccggagtcataaggcacccgcgcgtctagccccagcgccagggcacgcgagcggcgctggagggaggaaagcttccgcctgcgggccggacaaaagtcccgcctgcccacggctttttgcccgccgctcgtgaccgagacgcctcgccgcggccagctcgctgctctcgctggcggatggtgtgtggccgccgcaggacgcccgccgtgcccgggccatgaagtagcggctgctggcggcgccgctgcccaaccgccagccccagccccgcgctgcgctgcccggtcctctcccggcggggtcgtatcggcgtggacatggctggccgcgtccctagcctgctagttctccttgtttttccaagcagctgtttggctttccgaagcccactttctgtctttaagaggtttaaagaaactaccagaccattttccaatgaatgtcttggtaccaccagacccgtagttcctattgattcatcagattttgcattggatattcgcatgcctggggttacacctaaacagtccgatacatacttctgcatgtctatgcgaataccagtggatgaggaagccttcgtgattgacttcaagcctcgagccagcatggatactgtccatcacatgttactttttggatgcaatatgccttcatccactggaagttactggttttgtgatgaaggaacctgtacagataaagccaatattctgtatgcctgggcgagaaatgctccccctacccggctccccaaaggtgttggattcagagttggaggagagactggaagtaaatactttgtactacaggtacactatggggatattagtgcttttagagataataacaaggactgttctggtgtgtccttacacctcacacgtctgccacagcctttaattgctggcatgtaccttatgatgtctgttgacactgttatcccagcaggagaaaaagtggtgaattctgacatttcatgccattataaaaattatccaatgcatgtctttgcctatagagttcacactcaccatttaggtaaggtagtaagtggatacagagtaagaaatggacagtggacactgattggacggcagagccctcagctgccacaggctttctaccctgtggggcatccagttgatgtaagttttggtgacctactggctgcaagatgtgtattcactggtgaaggaaggacagaagccacacacattggtggcacgtctagtgatgaaatgtgcaacttatacattatgtattacatggaagccaagcatgcagtttctttcatgacctgtacccagaatgtagctccagatatgttcagaaccataccaccagaggccaacattccaattcccgtgaagtctgatatggttatgatgcatgaacatcataaagaaacagaatataaagataagattcctttactacagcagccaaaacgagaagaagaagaagtgttagaccaggatttccacatggaagaggcactggattggcctggagtatacttgttaccaggccaggtttctggggtggctctagaccctaagaataacctggtgattttccacagaggtgaccatgtctgggatggaaactcgtttgacagcaagtttgtttaccagcaaataggactcggaccaattgaagaagacactattcttgtcatagatccaaataatgctgcagtactccagtccagtggaaaaaatctgttttacttgccacatggcttgagtatagataaagatgggaattattgggtcacagacgtggctctccatcaggtgttcaaactggatccaaacaataaagaaggccctgtattaatcctgggaaggagcatgcaaccaggcagtgaccagaatcacttctgtcaacccactgatgtggctgtggatccaggcactggagccatttatgtatcagatggttactgcaacagcaggattgtgcagttttcaccaagtggaaagttcatcacacagtggggagaagagtcttcagggagcagtcctctgccaggccagttcactgttcctcacagcttggctcttgtgcctcttttgggccaattatgtgtggcagaccgggaaaatggtcggatccagtgttttaaaactgacaccaaagaatttgtgagagagattaagcattcatcatttggaagaaatgtatttgcaatttcatatataccaggcttgctctttgcagtgaatgggaagcctcattttggggaccaagaacctgtacaaggatttgtgatgaacttttccaatggggaaattatagacatcttcaagccagtgcgcaagcactttgatatgcctcatgatattgttgcatctgaagatgggactgtgtacattggagatgctcataccaacaccgtgtggaagttcaccttgactgagagtatggttttcacagtattattgttcacattttccctcagtttgattgcttaaaagcatatgaaaca

SEQ ID NO: 309252 - DNA, 1739 bp, Homo sapiens
caactaactccgcccgccgctccgccgcccgcaggctccggcttccgtcccggacagagcccgtggtcgcgcaggttctgaatgatgactgacgcgggtttgggtgatacccctcacagcccctgtcattccggagtcataaggcacccgcgcgtctagccccagcgccagggcacgcgagcggcgctggagggaggaaagcttccgcctgcgggccggacaaaagtcccgcctgcccacggctttttgcccgccgctcgtgaccgagacgcctcgccgcggccagctcgctgctctcgctggcggatggtgtgtggccgccgcaggacgcccgccgtgcccgggccatgaagtagcggctgctggcggcgccgctgcccaaccgccagccccagccccgcgctgcgctgcccggtcctctcccggcggggtcgtatcggcgtggacatggctggccgcgtccctagcctgctagttctccttgtttttccaagcagctgtttggctttccgaagcccactttctgtctttaagaggtttaaagaaactaccagaccattttccaatgaatgtcttggtaccaccagacccgtagttcctattgattcatcagattttgcattggatattcgcatgcctggggttacacctaaacagtccgatacatacttctgcatgtctatgcgaataccagtggatgaggaagccttcgtgattgacttcaagcctcgagccagcatggatactgtccatcacatgttactttttggatgcaatatgccttcatccactggaagttactggttttgtgatgaaggaacctgtacagataaagccaatattctgtatgcctgggcgagaaatgctccccctacccggctccccaaaggtgttggattcagagttggaggagagactggaagtaaatactttgtactacaggtacactatggggatattagtgcttttagagataataacaaggactgttctggtgtgtccttacacctcacacgtctgccacagcctttaattgctggcatgtaccttatgatgtctgttgacactgttatcccagcaggagaaaaagtggtgaattctgacatttcatgccattataaaaattatccaatgcatgtctttgcctatagagttcacactcaccatttaggtaaggtagtaagtggatacagagtaagaaatggacagtggacactgattggacggcagagccctcagctgccacaggctttctaccctgtggggcatccagttgatgtaagttttggtgacctactggctgcaagatgtgtattcactggtgaaggaaggacagaagccacacacattggtggcacgtctagtgatgaaatgtgcaacttatacattatgtattacatggaagccaagcatgcagtttctttcatgacctgtacccagaatgtagctccagatatgttcagaaccataccaccagaggccaacattccaattcccgtgaagtctgatatggttatgatgcatgaacatcataaagaaacagaatataaagataagattcctttactacagcagccaaaacgagaagaagaagaagtgttagaccaggatttccacatggaagaggcactggattggcctggagtatacttgttaccaggccaggtttctggggtggctctagaccctaagaataacctggtgattttcccacgggcactcaactgaggaccctcgtt

SEQ ID NO: 309253 - DNA, 1464 bp, Homo sapiens
caactaactccgcccgccgctccgccgcccgcaggctccggcttccgtcccggacagagcccgtggtcgcgcaggttctgaatgatgactgacgcgggtttgggtgatacccctcacagcccctgtcattccggagtcataaggcacccgcgcgtctagccccagcgccagggcacgcgagcggcgctggagggaggaaagcttccgcctgcgggccggacaaaagtcccgcctgcccacggctttttgcccgccgctcgtgaccgagacgcctcgccgcggccagctcgctgctctcgctggcggatggtgtgtggccgccgcaggacgcccgccgtgcccgggccatgaagtagcggctgctggcggcgccgctgcccaaccgccagccccagccccgcgctgcgctgcccggtcctctcccggcggggtcgtatcggcgtggacatggctggccgcgtccctagcctgctagttctccttgtttttccaagcagctgtttggctttccgaagcccactttctgtctttaagaggtttaaagaaactaccagaccattttccaatgaatgtcttggtaccaccagacccgtagttcctattgattcatcagattttgcattggatattcgcatgcctggggttacacctaaacagtccgatacatacttctgcatgtctatgcgaataccagtggatgaggaagccttcgtgattgacttcaagcctcgagccagcatggatactgtccatcacatgttactttttggatgcaatatgccttcatccactggaagttactggttttgtgatgaaggaacctgtacagataaagccaatattctgtatgcctgggcgagaaatgctccccctacccggctccccaaaggtgttggattcagagttggaggagagactggaagtaaatactttgtactacaggtacactatggggatattagtgcttttagagataataacaaggactgttctggtgtgtccttacacctcacacgtctgccacagcctttaattgctggcatgtaccttatgatgtctgttgacactgttatcccagcaggagaaaaagtggtgaattctgacatttcatgccattataaaaattatccaatgcatgtctttgcctatagagttcacactcaccatttaggtaaggtagtaagtggatacagagtaagaaatggacagtggacactgattggacggcagtaaagagaaactttgtgctacatgacgacaaagctgctaaatctcctatttttttaaaatcactaacattatattgcaatgaaggaaataaaaaagtctctatttaaattcttttttaaattttcttcagttggtgtgtttttgggatgtcttatttttagatggttacactgttagaacactattttcagaatctgaatgtaatttgtgtaataaagtgttttcagagcatta

SEQ ID NO: 309254 - DNA, 1334 bp, Homo sapiens
caactaactccgcccgccgctccgccgcccgcaggctccggcttccgtcccggacagagcccgtggtcgcgcaggttctgaatgatgactgacgcgggtttgggtgatacccctcacagcccctgtcattccggagtcataaggcacccgcgcgtctagccccagcgccagggcacgcgagcggcgctggagggaggaaagcttccgcctgcgggccggacaaaagtcccgcctgcccacggctttttgcccgccgctcgtgaccgagacgcctcgccgcggccagctcgctgctctcgctggcggatggtgtgtggccgccgcaggacgcccgccgtgcccgggccatgaagtagcggctgctggcggcgccgctgcccaaccgccagccccagccccgcgctgcgctgcccggtcctctcccggcggggtcgtatcggcgtggacatggctggccgcgtccctagcctgctagttctccttgtttttccaagcagctgtttggctttccgaagcccactttctgtctttaagaggtttaaagaaactaccagaccattttccaatgaatgtcttggtaccaccagacccgtagttcctattgattcatcagattttgcattggatattcgcatgcctggggttacacctaaacagtccgatacatacttctgcatgtctatgcgaataccagtggatgaggaagccttcgtgattgacttcaagcctcgagccagcatggatactgtccatcacatgttactttttggatgcaatatgccttcatccactggaagttactggttttgtgatgaaggaacctgtacagataaagccaatattctgtatgcctgggcgagaaatgctccccctacccggctccccaaaggtgttggattcagagttggaggagagactggaagtaaatactttgtactacaggtacactatggggatattagtgcttttagagataataacaaggactgttctggtgtgtccttacacctcacacgtctgccacagcctttaattgctggcatgtaccttatgatgtctgttgacactgttatcccagcaggagaaaaagtggtgaattctgacatttcatgccattataaaaattatccaatgcatgtctttgcctatagagttcacactcaccatttagaaggaaggttgtagggatgatgataccaataagcaaatgatgaaacaaacaaaggccttccttctcaagatttggtgtgtgaactaggagtattttttttcccgagactgagcctcccactgtctgttgcccaggctagagtgcagtggcatgatcttgcctc

SEQ ID NO: 309255 - DNA, 1169 bp, Homo sapiens
caactaactccgcccgccgctccgccgcccgcaggctccggcttccgtcccggacagagcccgtggtcgcgcaggttctgaatgatgactgacgcgggtttgggtgatacccctcacagcccctgtcattccggagtcataaggcacccgcgcgtctagccccagcgccagggcacgcgagcggcgctggagggaggaaagcttccgcctgcgggccggacaaaagtcccgcctgcccacggctttttgcccgccgctcgtgaccgagacgcctcgccgcggccagctcgctgctctcgctggcggatggtgtgtggccgccgcaggacgcccgccgtgcccgggccatgaagtagcggctgctggcggcgccgctgcccaaccgccagccccagccccgcgctgcgctgcccggtcctctcccggcggggtcgtatcggcgtggacatggctggccgcgtccctagcctgctagttctccttgtttttccaagcagctgtttggctttccgaagcccactttctgtctttaagaggtttaaagaaactaccagaccattttccaatgaatgtcttggtaccaccagacccgtagttcctattgattcatcagattttgcattggatattcgcatgcctggggttacacctaaacaggctagcttgactttgagtttaaacctcactgcagaaggggagaaaaccaacagccttttgggcaccagctggtgggatatctattatactctttttgagaaaatggatccaagctcttcgcgaagcagctgtgcgattgctgggaagtgcctaaagaagatccccatccaactccaggagccccatggatttccttatcacctctgtgtggtcagcagccatggtccagcctaccttccctagtgctgtgatctgtccaccactacaggcccgaccctcgtctaattgaatctgtacagcagaatagacatagcaaatgagggttacttcttgagtcaaatacatttgattgggaagagctgcctggaaagtgttaagaattatgagaccacattgggacttgatgggaaacggtgcagcgacccataaacaacatctgccacgaatgtgaaagataaaagtcgctccagtggccagcctctagaaagaagaatcctgggtgaagattgatt

SEQ ID NO: 309256 - DNA, 1225 bp, Homo sapiens
agcggagagcccgtggtcgcgcaggttctgaatgatgactgacgcgggtttgggtgatacccctcacagcccctgtcattccggagtcataaggcacccgcgcgtctagccccagcgccagggcacgcgagcggcgctggagggaggaaagcttccgcctgcgggccggacaaaagtcccgcctgcccacggctttttgcccgccgctcgtgaccgagacgcctcgccgcggccagctcgctgctctcgctggcggatggtgtgtggccgccgcaggacgcccgccgtgcccgggccatgaagtagcggctgctggcggcgccgctgcccaaccgccagccccagccccgcgctgcgctgcccggtcctctcccggcggggtcgtatcggcgtggacatggctggccgcgtccctagcctgctagttctccttgtttttccaagcagctgtttggctttccgaagcccactttctgtctttaagaggtgggtgttcgttgttcgggtgctttctgtgcatgctgttgagaaatgtaatcacttttatgaacctgagtgttggcaaaatagacggggttgatgttctttgctggaatgacttggaattttaccacagtaacttcttgtgaagtcacccgtgcagaaaaagcccactgcattgtagccaagcagttctggctttcaaaactccaattagaagttgtgatttccaaaactaatcactccctctgggggaggtatttcaggaactacaatatattcgcttagttttgaatgcctgcttgtttataacagctcgaagaataaaatataaggatacatcagtgtcgaggagaagcagatcatagactgtaatagctcacaaggaaacactgagctgtatacaaacgcctcataattactttattaaatatttatgtacttgtacatttgtaattcacatcgcagtcttttatttcttcctcctaacagctctgcctcctagcaagattatggttggctttcttgtttctagctagtaattctggacactgaaaatagttacagaaatttttactgggtcatggttaatatttctgccattagaaaattggcatgcctgtgataatttgtaatgtattaatactatatcttcattaacttgaaacagatatatgttttgacatatttttatatgacataattttttataaattttcaataaaaacaagtttttattgaatgg

SEQ ID NO: 309257 - DNA, 307 bp, Homo sapiens
catgagaggggtaatgctattcttgtcagagacagaattcacaaattccacagactagtatctaccttgaggccaccagagagcagagttttctcattacagcagcccccacctggtgaaggcacctgggaaccagaacacacaggaggtgcgtgtagggtttcttttaagcagtaaagtgtgaaatgctacaatccacgttagcaaaacctgaagggaataagaattaatgggtgaaaaaattcatcaatgaaaaggacttatcattagaaaaaaattactcagatttgggctatcagataacatc

SEQ ID NO: 309258 - DNA, 835 bp, Homo sapiens
  misc_feature (107)..(107): n is a, c, g, or t
cccggggcctcctcttgtcccgaggagcacccccgctcccggtgtcttttggtttcgaccggccgactgggaggggccgtgggacgccattcccataatgctctggngcgtgccgccgccgtcgctgccacctcccctaccgctagtggaagaagatggcggaaggcggagcggcggatctggacacccagcggtctgacatcgcgacgctgctcaaaacctcgctccggaaaggggacacctggtacctagtcgatagtcgctggttcaaacagtggaaaaaatatgttggctttgacagttgggacaaataccagatgggagatcaaaatgtgtatcctggacccattgataactctggacttctcaaagatggtgatgcccagtcacttaaggaacaccttattgatgaattggattacatactgttgccaactgaaggttggaataaacttgtcagctggtacacattgatggaaggtcaagagccaatagcacgaaaggtggttgaacagggtatgtttgtaaagcactgcaaagtagaagtatatctcacagaattgaagctatgtgaaaatggaaacatgaataatgttgtaactcgaagatttagcaaagctgacacaataggtaatgcaagatcctgtcttgtttttaatccattgctattagatatttaattagaattatctttgtatatgctacttggatgataaccattttaaggatttatatatagacatttgatttccagctttgatacaatgtcttagagttaaattatttattgtttcttgtatggttttgcatttattaaatgaattttaacatttgt

SEQ ID NO: 309259 - DNA, 4758 bp, Homo sapiens
  misc_feature (107)..(107): n is a, c, g, or t
cccggggcctcctcttgtcccgaggagcacccccgctcccggtgtcttttggtttcgaccggccgactgggaggggccgtgggacgccattcccataatgctctggngcgtgccgccgccgtcgctgccacctcccctaccgctagtggaagaagatggcggaaggcggagcggcggatctggacacccagcggtctgacatcgcgacgctgctcaaaacctcgctccggaaaggggacacctggtacctagtcgatagtcgctggttcaaacagtggaaaaaatatgttggctttgacagttgggacaaataccagatgggagatcaaaatgtgtatcctggacccattgataactctggacttctcaaagatggtgatgcccagtcacttaaggaacaccttattgatgaattggattacatactgttgccaactgaaggttggaataaacttgtcagctggtacacattgatggaaggtcaagagccaatagcacgaaaggtggttgaacagggtatgtttgtaaagcactgcaaagtagaagtatatctcacagaattgaagctatgtgaaaatggaaacatgaataatgttgtaactcgaagatttagcaaagctgacacaatagatacaattgaaaaggaaataagaaaaatcttcagtattccagatgaaaaggagaccagattgtggaacaaatacatgagtaacacatttgaaccactgaataaaccagacagcaccattcaggatgctggtttataccaaggacaggtattagtgatagaacagaaaaatgaagatggaacatggccaaggggtccttctactcctaatgtgaaaaactcaaattactgtcttccatcatataccgcttataagaactatgattattcggaacctggaagaaacaatgaacagccaggcctctgtggcctaagtaacttgggaaatacgtgtttcatgaactcagctattcagtgtttgagcaacacacctccacttactgagtatttcctcaatgataagtatcaagaagaactgaattttgacaatcccttaggaatgagaggtgaaatagctaaatcttatgccgaactgatcaagcaaatgtggtctggaaagtttagctacgtcaccccaagagcctttaagacacaggtaggacgttttgcacctcagttctctggatatcagcagcaagactgtcaagaactgttagctttcctattagatggattacatgaggatttgaatagaattaggaaaaaaccatatatacaattaaaagatgcagatggaaggccagataaggtggttgccgaagaagcctgggaaaaccatttaaaacgaaatgattctatcatagtagatatatttcatggccttttcaaatcaactttagtttgtcctgagtgtgctaagatttcagtaacatttgatcctttttgttacttgacacttccattgcccatgaaaaaagaacgcaccttggaagtttacttagttagaatggatccgcttaccaaacctatgcagtacaaagtggttgtccccaaaattggaaacatattagatctttgtacagcattgtctgctttgtcaggaatacctgcagataagatgatagttactgatatatacaatcatagatttcacagaatattcgctatggatgaaaaccttagtagtattatggaacgggatgatatttatgtgtttgaaattaacatcaataggacagaagatacagagcacgtgattattcctgtttgcctaagagaaaaattcagacactcgagttatacccaccatactggttcttcactttttggtcagccctttcttatggctgtaccacgaaacaatactgaagacaaactttataatctcctgctcttgagaatgtgccgatatgtcaaaatatctactgaaactgaagaaactgaaggatccctacactgctgtaaggaccaaaatattaatgggaatggcccaaatggcatacatgaagaaggctcaccaagtgaaatggaaacagatgagccagatgatgaatccagccaggatcaagaacttccctcagagaatgaaaacagtcagtctgaagattcagttggaggagataatgattctgaaaatggattatgtactgaggatacttgcaaaggtcaactcacgggacacaaaaaacgattgtttacattccagttcaacaacttaggcaatactgatatcaactacatcaaagatgataccaggcatataagatttgatgataggcagcttaggctagatgaaagatcttttcttgctttggattgggatcctgatttgaaaaaaagatattttgatgaaaatgctgctgaggactttgaaaaacatgaaagtgtggagtataaacctcctaaaaaaccctttgtgaaattaaaagattgcattgaactttttacaacaaaagaaaagctaggtgctgaagatccctggtattgtccgaattgtaaagaacatcagcaagccacaaagaaattggatttatggtccctgcctccagtacttgtagtacatctcaagcgattttcttacagtcgatacatgagagacaagttggataccttagttgattttcctatcaatgacttggatatgtcggaattcttaattaatccaaatgcaggtccttgccgctataatctgattgctgtttccaaccactatggagggatgggaggaggacactatactgcttttgcaaaaaataaagatgatggaaaatggtactattttgatgacagtagtgtctccactgcatctgaagaccaaattgtgtccaaagcagcatatgtactcttctaccagagacaagacactttcagtggaactggcttttttcctcttgaccgagaaactaaaggtgcttcagctgccactggcatcccattagaaagtgatgaagatagcaatgataatgacaatgatatagaaaatgaaaactgtatgcacactaactaatgaaagtcctagaagccataaaagagacactttcctgctggtggtatctatggaaatgatgaagttacccaccacattaaaacaaaagtctgagatggggagtttcagataaccgaatgtaaatcctttatcagattttaacttgtgcagtacttgaagtgaaacacaatgaaaactttaacagaaattgtctcttaatacatttacagtcttgtatttacaagctaaatatatataggaaatcacaaataaatcccttttaagtttgctgctgttttgattaattatgtttcctttaattttttggatgtgagttgatgacaaatgttaaatttgtggatgttggtcatttattttgctctaataatactgcaagaaaactatggctgaacttagtttttggataatctagttcatgtgcattaggctgccgtatatactactatgatatttagctgcagtatcaatgtggcataaatactgcggcagcattcttcgaaaaccgcattttcaaatttatccccgtaatcaatgtgggcctattaaaaaaccaaatcatgatacaagaaacaaccttggaaaagttatttccctttgtaatacctttaaaaatccagagtattatattcattttactgccactgtggaaacaggttctagatttcatactccatctaaagtcatttttcagttacatgtaagtattatttactgctattgggatctattcttcagatattcaaaaacattttttgctttaaaatgcatatctttaattgggtgttggtccaaaattaaaatttttgctgtctgtttttctctaccccattttgtggtaatttggcaacttgagctctcccaattattgtaatataaggacagacataatagtattctgtacccatagtaataattgcatcaagcttagatgagaaatttttttcatatactggcctttaaatcattaatggacaattggctataaaggtaggtctgttaactttctttgtgtgttcctgatggaattcaccatagccttacagcttttctcagaaggtaacttgttataagagaaatggcatttgcatgttccagagtcagaacctgtacagtatataaagcataaacaccttgaatttgattttagttcaccacattcaaggatccaggatgccaaaaatatgtgtgaacatttgaaacatttttatttgctgctttttccctttgatatagttgaaagaatgtattgtaaattggcatacaatactgcctttaatagaaaacctaaatgctggggcacatttcacatatcgactacctgagaaattgctttgtgtcccactgttattaaagcaaaaagtataatgttcttcacttgaactaatcaaatacaatagattataaattgtgtattgtaaataaaagttcactctgtgagtgcacattttggtaaattatttatttatgttagcatttaaaagtttaaaaaaaatgcatttgaccaggataaatgaggtatgttgatcatggctttgctttatatcttgatattaaagctggtttatcatcctggtattttaaaagctgctttggggttttttttttcttttttttttttttaatgtaaactaacctcctgcatgacagaggttaaaattttgtctgcacttgagttcacttgagtttacatttgaaatgtgcatgtttatttatatagatttcaataaagctattcaaggcctta

SEQ ID NO: 309260 - DNA, 3369 bp, Homo sapiens
  misc_feature (107)..(107): n is a, c, g, or t
cccggggcctcctcttgtcccgaggagcacccccgctcccggtgtcttttggtttcgaccggccgactgggaggggccgtgggacgccattcccataatgctctggngcgtgccgccgccgtcgctgccacctcccctaccgctagtggaagaagatggcggaaggcggagcggcggatctggacacccagcggtctgacatcgcgacgctgctcaaaacctcgctccggaaaggggacacctggtacctagtcgatagtcgctggttcaaacagtggaaaaaatatgttggctttgacagttgggacaaataccagatgggagatcaaaatgtgtatcctggacccattgataactctggacttctcaaagatggtgatgcccagtcacttaaggaacaccttattgatgaattggattacatactgttgccaactgaaggttggaataaacttgtcagctggtacacattgatggaaggtcaagagccaatagcacgaaaggtggttgaacagggtatgtttgtaaagcactgcaaagtagaagtatatctcacagaattgaagctatgtgaaaatggaaacatgaataatgttgtaactcgaagatttagcaaagctgacacaatagatacaattgaaaaggaaataagaaaaatcttcagtattccagatgaaaaggagaccagattgtggaacaaatacatgagtaacacatttgaaccactgaataaaccagacagcaccattcaggatgctggtttataccaaggacaggtattagtgatagaacagaaaaatgaagatggaacatggccaaggggtccttctactcctaagtccccaggtgcatccaatttttcaactttaccaaagatctctccttcatctctatcaaataattataacaacatgaacaacagaaatgtgaaaaactcaaattactgtcttccatcatataccgcttataagaactatgattattcggaacctggaagaaacaatgaacagccaggcctctgtggcctaagtaacttgggaaatacgtgtttcatgaactcagctattcagtgtttgagcaacacacctccacttactgagtatttcctcaatgataagtatcaagaagaactgaattttgacaatcccttaggaatgagaggtgaaatagctaaatcttatgccgaactgatcaagcaaatgtggtctggaaagtttagctacgtcaccccaagagcctttaagacacaggtaggacgttttgcacctcagttctctggatatcagcagcaagactgtcaagaactgttagctttcctattagatggattacatgaggatttgaatagaattaggaaaaaaccatatatacaattaaaagatgcagatggaaggccagataaggtggttgccgaagaagcctgggaaaaccatttaaaacgaaatgattctatcatagtagatatatttcatggccttttcaaatcaactttagtttgtcctgagtgtgctaagatttcagtaacatttgatcctttttgttacttgacacttccattgcccatgaaaaaagaacgcaccttggaagtttacttagttagaatggatccgcttaccaaacctatgcagtacaaagtggttgtccccaaaattggaaacatattagatctttgtacagcattgtctgctttgtcaggaatacctgcagataagatgatagttactgatatatacaatcatagatttcacagaatattcgctatggatgaaaaccttagtagtattatggaacgggatgatatttatgtgtttgaaattaacatcaataggacagaagatacagagcacgtgattattcctgtttgcctaagagaaaaattcagacactcgagttatacccaccatactggttcttcactttttggtcagccctttcttatggctgtaccacgaaacaatactgaagacaaactttataatctcctgctcttgagaatgtgccgatatgtcaaaatatctactgaaactgaagaaactgaaggatccctacactgctgtaaggaccaaaatattaatgggaatggcccaaatggcatacatgaagaaggctcaccaagtgaaatggaaacagatgagccagatgatgaatccagccaggatcaagaacttccctcagagaatgaaaacagtcagtctgaagattcagttggaggagataatgattctgaaaatggattatgtactgaggatacttgcaaaggtcaactcacgggacacaaaaaacgattgtttacattccagttcaacaacttaggcaatactgatatcaactacatcaaagatgataccaggcatataagatttgatgataggcagcttaggctagatgaaagatcttttcttgctttggattgggatcctgatttgaaaaaaagatattttgatgaaaatgctgctgaggactttgaaaaacatgaaagtgtggagtataaacctcctaaaaaaccctttgtgaaattaaaagattgcattgaactttttacaacaaaagaaaagctaggtgctgaagatccctggtattgtccgaattgtaaagaacatcagcaagccacaaagaaattggatttatggtccctgcctccagtacttgtagtacatctcaagcgattttcttacagtcgatacatgagagacaagttggataccttagttgattttcctatcaatgacttggatatgtcggaattcttaattaatccaaatgcaggtccttgccgctataatctgattgctgtttccaaccactatggagggatgggaggaggacactatactgcttttgcaaaaaataaagatgatggaaaatggtactattttgatgacagtagtgtctccactgcatctgaagaccaaattgtgtccaaagcagcatatgtactcttctaccagagacaagacactttcagtggaactggcttttttcctcttgaccgagaaactaaaggtgcttcagctgccactggcatcccattagaaagtgatgaagatagcaatgataatgacaatgatatagaaaatgaaaactgtatgcacactaactaatgaaagtcctagaagccataaaagagacactttcctgctggtggtatctatggaaatgatgaagttacccaccacattaaaacaaaagtctgagatggggagtttcagataaccgaatgtaaatcctttatcagattttaacttgtgcagtacttgaagtgaaacacaatgaaaactttaacagaaattgtctcttaatacatttacagtcttgtatttacaagctaaatatatataggaaatcacaaataaatcccttttaagtttg

SEQ ID NO: 309261 - DNA, 3282 bp, Homo sapiens
  misc_feature (107)..(107): n is a, c, g, or t
cccggggcctcctcttgtcccgaggagcacccccgctcccggtgtcttttggtttcgaccggccgactgggaggggccgtgggacgccattcccataatgctctggngcgtgccgccgccgtcgctgccacctcccctaccgctagtggaagaagatggcggaaggcggagcggcggatctggacacccagcggtctgacatcgcgacgctgctcaaaacctcgctccggaaaggggacacctggtacctagtcgatagtcgctggttcaaacagtggaaaaaatatgttggctttgacagttgggacaaataccagatgggagatcaaaatgtgtatcctggacccattgataactctggacttctcaaagatggtgatgcccagtcacttaaggaacaccttattgatgaattggattacatactgttgccaactgaaggttggaataaacttgtcagctggtacacattgatggaaggtcaagagccaatagcacgaaaggtggttgaacagggtatgtttgtaaagcactgcaaagtagaagtatatctcacagaattgaagctatgtgaaaatggaaacatgaataatgttgtaactcgaagatttagcaaagctgacacaatagatacaattgaaaaggaaataagaaaaatcttcagtattccagatgaaaaggagaccagattgtggaacaaatacatgagtaacacatttgaaccactgaataaaccagacagcaccattcaggatgctggtttataccaaggacaggtattagtgatagaacagaaaaatgaagatggaacatggccaaggggtccttctactcctaatgtgaaaaactcaaattactgtcttccatcatataccgcttataagaactatgattattcggaacctggaagaaacaatgaacagccaggcctctgtggcctaagtaacttgggaaatacgtgtttcatgaactcagctattcagtgtttgagcaacacacctccacttactgagtatttcctcaatgataagtatcaagaagaactgaattttgacaatcccttaggaatgagaggtgaaatagctaaatcttatgccgaactgatcaagcaaatgtggtctggaaagtttagctacgtcaccccaagagcctttaagacacaggtaggacgttttgcacctcagttctctggatatcagcagcaagactgtcaagaactgttagctttcctattagatggattacatgaggatttgaatagaattaggaaaaaaccatatatacaattaaaagatgcagatggaaggccagataaggtggttgccgaagaagcctgggaaaaccatttaaaacgaaatgattctatcatagtagatatatttcatggccttttcaaatcaactttagtttgtcctgagtgtgctaagatttcagtaacatttgatcctttttgttacttgacacttccattgcccatgaaaaaagaacgcaccttggaagtttacttagttagaatggatccgcttaccaaacctatgcagtacaaagtggttgtccccaaaattggaaacatattagatctttgtacagcattgtctgctttgtcaggaatacctgcagataagatgatagttactgatatatacaatcatagatttcacagaatattcgctatggatgaaaaccttagtagtattatggaacgggatgatatttatgtgtttgaaattaacatcaataggacagaagatacagagcacgtgattattcctgtttgcctaagagaaaaattcagacactcgagttatacccaccatactggttcttcactttttggtcagccctttcttatggctgtaccacgaaacaatactgaagacaaactttataatctcctgctcttgagaatgtgccgatatgtcaaaatatctactgaaactgaagaaactgaaggatccctacactgctgtaaggaccaaaatattaatgggaatggcccaaatggcatacatgaagaaggctcaccaagtgaaatggaaacagatgagccagatgatgaatccagccaggatcaagaacttccctcagagaatgaaaacagtcagtctgaagattcagttggaggagataatgattctgaaaatggattatgtactgaggatacttgcaaaggtcaactcacgggacacaaaaaacgattgtttacattccagttcaacaacttaggcaatactgatatcaactacatcaaagatgataccaggcatataagatttgatgataggcagcttaggctagatgaaagatcttttcttgctttggattgggatcctgatttgaaaaaaagatattttgatgaaaatgctgctgaggactttgaaaaacatgaaagtgtggagtataaacctcctaaaaaaccctttgtgaaattaaaagattgcattgaactttttacaacaaaagaaaagctaggtgctgaagatccctggtattgtccgaattgtaaagaacatcagcaagccacaaagaaattggatttatggtccctgcctccagtacttgtagtacatctcaagcgattttcttacagtcgatacatgagagacaagttggataccttagttgattttcctatcaatgacttggatatgtcggaattcttaattaatccaaatgcaggtccttgccgctataatctgattgctgtttccaaccactatggagggatgggaggaggacactatactgcttttgcaaaaaataaagatgatggaaaatggtactattttgatgacagtagtgtctccactgcatctgaagaccaaattgtgtccaaagcagcatatgtactcttctaccagagacaagacactttcagtggaactggcttttttcctcttgaccgagaaactaaaggtgcttcagctgccactggcatcccattagaaagtgatgaagatagcaatgataatgacaatgatatagaaaatgaaaactgtatgcacactaactaatgaaagtcctagaagccataaaagagacactttcctgctggtggtatctatggaaatgatgaagttacccaccacattaaaacaaaagtctgagatggggagtttcagataaccgaatgtaaatcctttatcagattttaacttgtgcagtacttgaagtgaaacacaatgaaaactttaacagaaattgtctcttaatacatttacagtcttgtatttacaagctaaatatatataggaaatcacaaataaatcccttttaagtttg

SEQ ID NO: 309262 - DNA, 2362 bp, Homo sapiens
  misc_feature (107)..(107): n is a, c, g, or t
  misc_feature (1114)..(1114): n is a, c, g, or t
  misc_feature (1674)..(1674): n is a, c, g, or t
cccggggcctcctcttgtcccgaggagcacccccgctcccggtgtcttttggtttcgaccggccgactgggaggggccgtgggacgccattcccataatgctctggngcgtgccgccgccgtcgctgccacctcccctaccgctagtggaagaagatggcggaaggcggagcggcggatctggacacccagcggtctgacatcgcgacgctgctcaaaacctcgctccggaaaggggacacctggtacctagtcgatagtcgctggttcaaacagtggaaaaaatatgttggctttgacagttgggacaaataccagatgggagatcaaaatgtgtatcctggacccattgataactctggacttctcaaagatggtgatgcccagtcacttaaggaacaccttattgatgaattggattacatactgttgccaactgaaggttggaataaacttgtcagctggtacacattgatggaaggtcaagagccaatagcacgaaaggtggttgaacagggtatgtttgtaaagcactgcaaagtagaagtatatctcacagaattgaagctatgtgaaaatggaaacatgaataatgttgtaactcgaagatttagcaaagctgacacaatagatacaattgaaaaggaaataagaaaaatcttcagtattccagatgaaaaggagaccagattgtggaacaaatacatgagtaacacatttgaaccactgaataaaccagacagcaccattcaggatgctggtttataccaaggacaggtattagtgatagaacagaaaaatgaagatggaacatggccaaggggtccttctactcctaaaaagccactagagcagagttgctagtgaacagtttaatttccacatacgtcacagaaagagagctaaagggctctggttatcatccacagactgaccagtcaacccctaaataacctgatattaactccacaaatgttagctagattggaccatgtgtaatctgagtcagaagtcggaatcagaagagataaatgatgcgttatcactcaacagtaatgtctgcaacagtattgtaaaattgttgtactttacctgtcgaccacatccatccttanctctctgatcaccttactatttaaggacagtccctctactctacctgtagtatttatctcaatgcttcctggtccttgctttttcttttattatctcctctctcctacatatataaatgcctagcatagtgccacacatatggtaaacaccagtttattatttttatttcttttctaatgtcatcttccccctcagcctatgaatataaacacatcttcatctttaaaaccaaaaaccatatacttcctccatttaccatccttaagcttttttttctttgacagccacctacatttaaaaggctatacttaatgttgcttgccacccattcaggatttaacaaagttcttatttgtctttcttttaacctagtttatttgacctgtctttagtatttctttttgataaccatcttctaaagaaattctctgaatttgaatgcatgatacgaccttttatgccaaggactttgcctctctgaccagtcctttgtctgtctagctcggttcctctttagggttgccacatttagttttgcaaattgtgcacagctctaggnggcatcattcatatcatatgtagtctatgtgataggccctccttggcacggtgcagtgcagcttcactaactgtttgcagcagctctactcagaccttaaatgcattgacattcactaaatttctgtcagaagacctcttttatcataccatagtaggtgttcaaaattaggtgattctatgctaatcctctcccccagctcaaactgacacaaaatatgccattctgtatttctagactagaccacttttctgaattccagatttttcataaatttcatgtaggactcaccacctcaaattaaaccaaatctttttacccctccttctcccatcccctcaacctaaactgtcttcatttcctgtattgcctatttcaagtaccatccaagagccatcctgagttcctcctccagcctttcttctcttgtctagttagtcagcaagtcttgcagattctgcctcctcacctgaagttttcaaacagtacccctttacattcttgaaaattattaaagatccaaagaacttctgttatatgggttatagctgttaatatttgtcatattcgaaattgaaataagattttaaggtattttaaaataacagtacaaaaccattgtattttgacatgaataacacttttatgaaaataactatattccaaaacaataaaattaccaaaaagt

SEQ ID NO: 309263 - DNA, 2525 bp, Homo sapiens
  misc_feature (1277)..(1277): n is a, c, g, or t
  misc_feature (1837)..(1837): n is a, c, g, or t
ccaattttggtatatgtgctgctgaagcgagcactagaatgttatttttaaagctaagtttctgatattaggtacatgagggttaatgtatgtttcaaaatttctgtaataaagtttaaaaatgggttgcaagttttggtgcttagattcataattggctgaaaaaattattgtaatttcatttatttaaaatggaacattttgtgttatcaaatattatatgtaaaagtaagcagtcaaaataaggaaaaatagagctatgaaaaacaatttatatatagtataaatctacttaaactctcttttgtgtatctttaagtacctaacaccctacctggcatataggaagcatacagtaaatgctgttgaactgaactaatctgtatcttacaacagtaaaagtgtttaattttttaggagatttagaattttctttttctttcagaacttgtcttagaatgttgattagaaatggagagtgtaatgttggtctgttttagttactaagctaatttttgttttatgatgttaggttgtatgaagttacgttgttttacaatgttgggtttgaaaatataaaaatctttaaataactgttttgctgtctcaacgttcagacttaacttctctgtattttggttgcttaatatggtggtagatttccatgagtgttaaatgtttagttgacttactaaaagcaagttatgtttttctattgaagtaagaggctcaacttagccttgaattgcatgtttttagttgaaacatattgggcatagggaaattcagatactacaaacttccatttgtcaggagtaaggctgaattttctgtcttcatgaaaccacttcagctaaatggaagtcttacctttttctgtctgagggcacgatatgttacacctagcccaaactggccaaaattagtttaattctaggtaagtggtttgatgtctagttaatgtatgatattcttagcacttttttttctcctttttctagaaagccactagagcagagttgctagtgaacagtttaatttccacatacgtcacagaaagagagctaaagggctctggttatcatccacagactgaccagtcaacccctaaataacctgatattaactccacaaatgttagctagattggaccatgtgtaatctgagtcagaagtcggaatcagaagagataaatgatgcgttatcactcaacagtaatgtctgcaacagtattgtaaaattgttgtactttacctgtcgaccacatccatccttanctctctgatcaccttactatttaaggacagtccctctactctacctgtagtatttatctcaatgcttcctggtccttgctttttcttttattatctcctctctcctacatatataaatgcctagcatagtgccacacatatggtaaacaccagtttattatttttatttcttttctaatgtcatcttccccctcagcctatgaatataaacacatcttcatctttaaaaccaaaaaccatatacttcctccatttaccatccttaagcttttttttctttgacagccacctacatttaaaaggctatacttaatgttgcttgccacccattcaggatttaacaaagttcttatttgtctttcttttaacctagtttatttgacctgtctttagtatttctttttgataaccatcttctaaagaaattctctgaatttgaatgcatgatacgaccttttatgccaaggactttgcctctctgaccagtcctttgtctgtctagctcggttcctctttagggttgccacatttagttttgcaaattgtgcacagctctaggnggcatcattcatatcatatgtagtctatgtgataggccctccttggcacggtgcagtgcagcttcactaactgtttgcagcagctctactcagaccttaaatgcattgacattcactaaatttctgtcagaagacctcttttatcataccatagtaggtgttcaaaattaggtgattctatgctaatcctctcccccagctcaaactgacacaaaatatgccattctgtatttctagactagaccacttttctgaattccagatttttcataaatttcatgtaggactcaccacctcaaattaaaccaaatctttttacccctccttctcccatcccctcaacctaaactgtcttcatttcctgtattgcctatttcaagtaccatccaagagccatcctgagttcctcctccagcctttcttctcttgtctagttagtcagcaagtcttgcagattctgcctcctcacctgaagttttcaaacagtacccctttacattcttgaaaattattaaagatccaaagaacttctgttatatgggttatagctgttaatatttgtcatattcgaaattgaaataagattttaaggtattttaaaataacagtacaaaaccattgtattttgacatgaataacacttttatgaaaataactatattccaaaacaataaaattaccaaaaagt

SEQ ID NO: 309264 - DNA, 670 bp, Homo sapiens
  misc_feature (107)..(107): n is a, c, g, or t
cccggggcctcctcttgtcccgaggagcacccccgctcccggtgtcttttggtttcgaccggccgactgggaggggccgtgggacgccattcccataatgctctggngcgtgccgccgccgtcgctgccacctcccctaccgctagtggaagaagatggcggaaggcggagcggcggatctggacacccagcggtctgacatcgcgacgctgctcaaaacctcgctccggaaaggggacacctggtacctagtcgatagtcgctggttcaaacagtggaaaaaatatgttggctttgacagttgggacaaataccagatgggagatcaaaatgtgtatcctggacccattgataactctggacttctcaaagatggtgatgcccagtcacttaaggaacaccttattgatgaattggattacatactgttgccaactgaaggttggaataaacttgtcagctggtacacattgatggaaggtcaagagccaatagcacgaaagtgtcaacactcaaagaatggacgaaaagaaagcaaggatataagcagaaaatacgatggaatcaaaatccaagagaaacagcagacaatagaaacagacccataagaaacccaggtaattgagttagtagattttagaatagtgggcttattatgcttaaaaaaaaa

SEQ ID NO: 309265 - DNA, 1028 bp, Homo sapiens
  misc_feature (107)..(107): n is a, c, g, or t
cccggggcctcctcttgtcccgaggagcacccccgctcccggtgtcttttggtttcgaccggccgactgggaggggccgtgggacgccattcccataatgctctggngcgtgccgccgccgtcgctgccacctcccctaccgctagtggaagaagatggcggaaggcggagcggcggatctggacacccagcggtctgacatcgcgacgctgctcaaaacctcgctccggaaaggggacacctggtaagagaaaggggttgagatgcccgcggttgcccgaggatagtggagaagtgggcgggagccgcgagctggttctttcgctagtgacaggtgcgggcaggtccggcggcggccgccggggcagcgggattttggccgcttctgaaatgttggggcaaaggttggactctagatgagggtcagggttcttggcttgccagggcatgctgaaaggtatccggggagcggcggcggcggcggttctgactcgtgcggttctcttcgtcctccttccttccgtagtgccgctcccacctcaggccttcccgaatgataggttatagtggtttggtttgagtcttatatacgccgttttgacaggtcccggtgccgcggcttatcacgatctcaccggctttacttctctgttcatttcctttcctagaattgtcggcgtccaagttcccttttattctgattcttggtcttccgggaggcaggctgcaggatgtttgcggtctgtactacacaggtggcatgtcagggctccacataagagaaagaaaccctagtttccagttccttgtcaaaggagggagaggagtagggaaccttgggcttatgagagaccacgtggtcttgtgctttagtggtggcttgatagaagccggcagcgtttctgttagacgtgcagcccttcccttctgtttgaaagataatgtaggcctgcaaaaagtagataagtccacttgaggcttaactaactgctaatattcaaacttgtaaaataccaaaggttatacat

SEQ ID NO: 309266 - DNA, 449 bp, Homo sapiens
tgtatgattttgaagcccttgatgctagataatcaaatccacaatgatagaagaacctagatgtgtattgcagaaattcatgccttgtttatatttgagtattttgttcttagtatacaagctatctaaatttgctcttaattaatatgttactattttaaaagcctccaattcaaatatcttaaggcatagtataaatgtatggtataaatgagaaagttgcgttgtctgatacagtcaaatcattaaacatttgtttaatttcttgaagctttttcgtggtttttaaaagtatcttaaaatatttctttatcaaaatgaatctgatgtgaaagtaatatatttattcaaatgaaaagttttagaataaaaaagaacaaatagaggtagaggagtatatgaggtatttttgagggtaaatgaaagaagaattaggaatctttttatct

SEQ ID NO: 309267 - DNA, 387 bp, Homo sapiens
gaatttcatttgcattttcactgtggcccacatgactgatgcaggtggaactcaaagaagtaaatagaccagcttatagtgtctgaagcccaactttcaatgttacccatctctgattgcattaaagaatctaggattggtggttcccctagctataatgcagaaaccaagttaaacatcttcctgtacctcaaagatctctaaaatgcgtcatttatagtgtcaacactcaaagaatggacgaaaagaaagcaaggatataagcagaaaatacgatggaatcaaaatccaagagaaacagcagacaatagaaacagacccataagaaacccaggtaattgagttagtagattttagaatagtgggcttattatgcttaaaaaaaaa

SEQ ID NO: 309268 - DNA, 281 bp, Homo sapiens
  misc_feature (15)..(15): n is a, c, g, or t
  misc_feature (52)..(52): n is a, c, g, or t
accagaaacaacagntaacgtggctcaactcaaggaaggctcctggtgggantcggtcgtgtgtgtagtatacgtgagcgtacctcaaagatctctaaaatgcgtcatttatagtgtcaacactcaaagaatggacgaaaagaaagcaaggatataagcagaaaatacgatggaatcaaaatccaagagaaacagcagacaatagaaacagacccataagaaacccaggtaattgagttagtagattttagaatagtgggcttattatgcttaaaaaaaaa

SEQ ID NO: 309269 - DNA, 3515 bp, Homo sapiens
  misc_feature (107)..(107): n is a, c, g, or t
cccggggcctcctcttgtcccgaggagcacccccgctcccggtgtcttttggtttcgaccggccgactgggaggggccgtgggacgccattcccataatgctctggngcgtgccgccgccgtcgctgccacctcccctaccgctagtggaagaagatggcggaaggcggagcggcggatctggacacccagcggtctgacatcgcgacgctgctcaaaacctcgctccggaaaggggacacctggtacctagtcgatagtcgctggttcaaacagtggaaaaaatatgttggctttgacagttgggacaaataccagatgggagatcaaaatgtgtatcctggacccattgataactctggacttctcaaagatggtgatgcccagtcacttaaggaacaccttattgatgaattggattacatactgttgccaactgaaggttggaataaacttgtcagctggtacacattgatggaaggtcaagagccaatagcacgaaaggtggttgaacagggtatgtttgtaaagcactgcaaagtagaagtatatctcacagaattgaagctatgtgaaaatggaaacatgaataatgttgtaactcgaagatttagcaaagctgacacaatagatacaattgaaaaggaaataagaaaaatcttcagtattccagatgaaaaggagaccagattgtggaacaaatacatgagtaacacatttgaaccactgaataaaccagacagcaccattcaggatgctggtttataccaaggacaggtattagtgatagaacagaaaaatgaagatggaacatggccaaggggtccttctactcctaagtccccaggtgcatccaatttttcaactttaccaaagatctctccttcatctctatcaaataattataacaacatgaacaacagaaatgtgaaaaactcaaattactgtcttccatcatataccgcttataagaactatgattattcggaacctggaagaaacaatgaacagccaggcctctgtggcctaagtaacttgggaaatacgtgtttcatgaactcagctattcagttaccggtttactaaaatagtgagcatacatgatcacttgagaattgggcttctggagcacctgaacagaaagggagtggttcatattcagcattacaaaagacaactttctctttttgaaggggattactttggctattttccagtgtttgagcaacacacctccacttactgagtatttcctcaatgataagtatcaagaagaactgaattttgacaatcccttaggaatgagaggtgaaatagctaaatcttatgccgaactgatcaagcaaatgtggtctggaaagtttagctacgtcaccccaagagcctttaagacacaggtaggacgttttgcacctcagttctctggatatcagcagcaagactgtcaagaactgttagctttcctattagatggattacatgaggatttgaatagaattaggaaaaaaccatatatacaattaaaagatgcagatggaaggccagataaggtggttgccgaagaagcctgggaaaaccatttaaaacgaaatgattctatcatagtagatatatttcatggccttttcaaatcaactttagtttgtcctgagtgtgctaagatttcagtaacatttgatcctttttgttacttgacacttccattgcccatgaaaaaagaacgcaccttggaagtttacttagttagaatggatccgcttaccaaacctatgcagtacaaagtggttgtccccaaaattggaaacatattagatctttgtacagcattgtctgctttgtcaggaatacctgcagataagatgatagttactgatatatacaatcatagatttcacagaatattcgctatggatgaaaaccttagtagtattatggaacgggatgatatttatgtgtttgaaattaacatcaataggacagaagatacagagcacgtgattattcctgtttgcctaagagaaaaattcagacactcgagttatacccaccatactggttcttcactttttggtcagccctttcttatggctgtaccacgaaacaatactgaagacaaactttataatctcctgctcttgagaatgtgccgatatgtcaaaatatctactgaaactgaagaaactgaaggatccctacactgctgtaaggaccaaaatattaatgggaatggcccaaatggcatacatgaagaaggctcaccaagtgaaatggaaacagatgagccagatgatgaatccagccaggatcaagaacttccctcagagaatgaaaacagtcagtctgaagattcagttggaggagataatgattctgaaaatggattatgtactgaggatacttgcaaaggtcaactcacgggacacaaaaaacgattgtttacattccagttcaacaacttaggcaatactgatatcaactacatcaaagatgataccaggcatataagatttgatgataggcagcttaggctagatgaaagatcttttcttgctttggattgggatcctgatttgaaaaaaagatattttgatgaaaatgctgctgaggactttgaaaaacatgaaagtgtggagtataaacctcctaaaaaaccctttgtgaaattaaaagattgcattgaactttttacaacaaaagaaaagctaggtgctgaagatccctggtattgtccgaattgtaaagaacatcagcaagccacaaagaaattggatttatggtccctgcctccagtacttgtagtacatctcaagcgattttcttacagtcgatacatgagagacaagttggataccttagttgattttcctatcaatgacttggatatgtcggaattcttaattaatccaaatgcaggtccttgccgctataatctgattgctgtttccaaccactatggagggatgggaggaggacactatactgcttttgcaaaaaataaagatgatggaaaatggtactattttgatgacagtagtgtctccactgcatctgaagaccaaattgtgtccaaagcagcatatgtactcttctaccagagacaagacactttcagtggaactggcttttttcctcttgaccgagaaactaaaggtgcttcagctgccactggcatcccattagaaagtgatgaagatagcaatgataatgacaatgatatagaaaatgaaaactgtatgcacactaactaatgaaagtcctagaagccataaaagagacactttcctgctggtggtatctatggaaatgatgaagttacccaccacattaaaacaaaagtctgagatggggagtttcagataaccgaatgtaaatcctttatcagattttaacttgtgcagtacttgaagtgaaacacaatgaaaactttaacagaaattgtctcttaatacatttacagtcttgtatttacaagctaaatatatataggaaatcacaaataaatcccttttaagtttg

SEQ ID NO: 309270 - DNA, 4937 bp, Homo sapiens
  misc_feature (107)..(107): n is a, c, g, or t
cccggggcctcctcttgtcccgaggagcacccccgctcccggtgtcttttggtttcgaccggccgactgggaggggccgtgggacgccattcccataatgctctggngcgtgccgccgccgtcgctgccacctcccctaccgctagtggaagaagatggcggaaggcggagcggcggatctggacacccagcggtctgacatcgcgacgctgctcaaaacctcgctccggaaaggggacacctggtacctagtcgatagtcgctggttcaaacagtggaaaaaatatgttggctttgacagttgggacaaataccagatgggagatcaaaatgtgtatcctggacccattgataactctggacttctcaaagatggtgatgcccagtcacttaaggaacaccttattgatgaattggattacatactgttgccaactgaaggttggaataaacttgtcagctggtacacattgatggaaggtcaagagccaatagcacgaaaggtggttgaacagggtatgtttgtaaagcactgcaaagtagaagtatatctcacagaattgaagctatgtgaaaatggaaacatgaataatgttgtaactcgaagatttagcaaagctgacacaatagatacaattgaaaaggaaataagaaaaatcttcagtattccagatgaaaaggagaccagattgtggaacaaatacatgagtaacacatttgaaccactgaataaaccagacagcaccattcaggatgctggtttataccaaggacaggtattagtgatagaacagaaaaatgaagatggaacatggccaaggggtccttctactcctaagtccccaggtgcatccaatttttcaactttaccaaagatctctccttcatctctatcaaataattataacaacatgaacaacagaaatgtgaaaaactcaaattactgtcttccatcatataccgcttataagaactatgattattcggaacctggaagaaacaatgaacagccaggcctctgtggcctaagtaacttgggaaatacgtgtttcatgaactcagctattcagttaccggtttactaaaatagtgagcatacatgatcacttgagaattgggcttctggagcacctgaacagaaagggagtggttcatattcagcattacaaaagacaactttctctttttgaaggggattactttggctattttccagtgtttgagcaacacacctccacttactgagtatttcctcaatgataagtatcaagaagaactgaattttgacaatcccttaggaatgagaggtgaaatagctaaatcttatgccgaactgatcaagcaaatgtggtctggaaagtttagctacgtcaccccaagagcctttaagacacaggtaggacgttttgcacctcagttctctggatatcagcagcaagactgtcaagaactgttagctttcctattagatggattacatgaggatttgaatagaattaggaaaaaaccatatatacaattaaaagatgcagatggaaggccagataaggtggttgccgaagaagcctgggaaaaccatttaaaacgaaatgattctatcatagtagatatatttcatggccttttcaaatcaactttagtttgtcctgagtgtgctaagatttcagtaacatttgatcctttttgttacttgacacttccattgcccatgaaaaaagaacgcaccttggaagtttacttagttagaatggatccgcttaccaaacctatgcagtacaaagtggttgtccccaaaattggaaacatattagatctttgtacagcattgtctgctttgtcaggaatacctgcagataagatgatagttactgatatatacaatcatagatttcacagaatattcgctatggatgaaaaccttagtagtattatggaacgggatgatatttatgtgtttgaaattaacatcaataggacagaagatacagagcacgtgattattcctgtttgcctaagagaaaaattcagacactcgagttatacccaccatactggttcttcactttttggtcagccctttcttatggctgtaccacgaaacaatactgaagacaaactttataatctcctgctcttgagaatgtgccgatatgtcaaaatatctactgaaactgaagaaactgaaggatccctacactgctgtaaggaccaaaatattaatgggaatggcccaaatggcatacatgaagaaggctcaccaagtgaaatggaaacagatgagccagatgatgaatccagccaggatcaagaacttccctcagagaatgaaaacagtcagtctgaagattcagttggaggagataatgattctgaaaatggattatgtactgaggatacttgcaaaggtcaactcacgggacacaaaaaacgattgtttacattccagttcaacaacttaggcaatactgatatcaactacatcaaagatgataccaggcatataagatttgatgataggcagcttaggctagatgaaagatcttttcttgctttggattgggatcctgatttgaaaaaaagatattttgatgaaaatgctgctgaggactttgaaaaacatgaaagtgtggagtataaacctcctaaaaaaccctttgtgaaattaaaagattgcattgaactttttacaacaaaagaaaagctaggtgctgaagatccctggtattgtccgaattgtaaagaacatcagcaagccacaaagaaattggatttatggtccctgcctccagtacttgtagtacatctcaagcgattttcttacagtcgatacatgagagacaagttggataccttagttgattttcctatcaatgacttggatatgtcggaattcttaattaatccaaatgcaggtccttgccgctataatctgattgctgtttccaaccactatggagggatgggaggaggacactatactgcttttgcaaaaaataaagatgatggaaaatggtactattttgatgacagtagtgtctccactgcatctgaagaccaaattgtgtccaaagcagcatatgtactcttctaccagagacaagacactttcagtggaactggcttttttcctcttgaccgagaaactaaaggtgcttcagctgccactggcatcccattagaaagtgatgaagatagcaatgataatgacaatgatatagaaaatgaaaactgtatgcacactaactaatgaaagtcctagaagccataaaagagacactttcctgctggtggtatctatggaaatgatgaagttacccaccacattaaaacaaaagtctgagatggggagtttcagataaccgaatgtaaatcctttatcagattttaacttgtgcagtacttgaagtgaaacacaatgaaaactttaacagaaattgtctcttaatacatttacagtcttgtatttacaagctaaatatatataggaaatcacaaataaatcccttttaagtttgctgctgttttgattaattatgtttcctttaattttttggatgtgagttgatgacaaatgttaaatttgtggatgttggtcatttattttgctctaataatactgcaagaaaactatggctgaacttagtttttggataatctagttcatgtgcattaggctgccgtatatactactatgatatttagctgcagtatcaatgtggcataaatactgcggcagcattcttcgaaaaccgcattttcaaatttatccccgtaatcaatgtgggcctattaaaaaaccaaatcatgatacaagaaacaaccttggaaaagttatttccctttgtaatacctttaaaaatccagagtattatattcattttactgccactgtggaaacaggttctagatttcatactccatctaaagtcatttttcagttacatgtaagtattatttactgctattgggatctattcttcagatattcaaaaacattttttgctttaaaatgcatatctttaattgggtgttggtccaaaattgagctctcccaattattgtaatataaggacagacataatagtattctgtacccatagtaataattgcatcaagcttagatgagaaatttttttcatatactggcctttaaatcattaatggacaattggctataaaggtaggtctgttaactttctttgtgtgttcctgatggaattcaccatagccttacagcttttctcagaaggtaacttgttataagagaaatggcatttgcatgttccagagtcagaacctgtacagtatataaagcataaacaccttgaatttgattttagttcaccacattcaaggatccaggatgccaaaaatatgtgtgaacatttgaaacatttttatttgctgctttttccctttgatatagttgaaagaatgtattgtaaattggcatacaatactgcctttaatagaaaacctaaatgctggggcacatttcacatatcgactacctgagaaattgctttgtgtcccactgttattaaagcaaaaagtataatgttcttcacttgaactaatcaaatacaatagattataaattgtgtattgtaaataaaagttcactctgtgagtgcacattttggtaaattatttatttatgttagcatttaaaagtttaaaaaaaatgcatttgaccaggataaatgaggtatgttgatcatggctttgctttatatcttgatattaaagctggtttatcatcctggtattttaaaagctgctttggggttttttttttcttttttttttttttaatgtaaactaacctcctgcatgacagaggttaaaattttgtctgcacttgagttcacttgagtttacatttgaaatgtgcatgtttatttatatagatttcaataaagctattcaaggcctta

SEQ ID NO: 309271 - DNA, 5249 bp, Homo sapiens
  misc_feature (107)..(107): n is a, c, g, or t
cccggggcctcctcttgtcccgaggagcacccccgctcccggtgtcttttggtttcgaccggccgactgggaggggccgtgggacgccattcccataatgctctggngcgtgccgccgccgtcgctgccacctcccctaccgctagtggaagaagatggcggaaggcggagcggcggatctggacacccagcggtctgacatcgcgacgctgctcaaaacctcgctccggaaaggggacacctggtacctagtcgatagtcgctggttcaaacagtggaaaaaatatgttggctttgacagttgggacaaataccagatgggagatcaaaatgtgtatcctggacccattgataactctggacttctcaaagatggtgatgcccagtcacttaaggaacaccttattgatgaattggattacatactgttgccaactgaaggttggaataaacttgtcagctggtacacattgatggaaggtcaagagccaatagcacgaaaggtggttgaacagggtatgtttgtaaagcactgcaaagtagaagtatatctcacagaattgaagctatgtgaaaatggaaacatgaataatgttgtaactcgaagatttagcaaagctgacacaatagatacaattgaaaaggaaataagaaaaatcttcagtattccagatgaaaaggagaccagattgtggaacaaatacatgagtaacacatttgaaccactgaataaaccagacagcaccattcaggatgctggtttataccaaggacaggtattagtgatagaacagaaaaatgaagatggaacatggccaaggggtccttctactcctaagtccccaggtgcatccaatttttcaactttaccaaagatctctccttcatctctatcaaataattataacaacatgaacaacagaaatgtgaaaaactcaaattactgtcttccatcatataccgcttataagaactatgattattcggaacctggaagaaacaatgaacagccaggcctctgtggcctaagtaacttgggaaatacgtgtttcatgaactcagctattcagttaccggtttactaaaatagtgagcatacatgatcacttgagaattgggcttctggagcacctgaacagaaagggagtggttcatattcagcattacaaaagacaactttctctttttgaaggggattactttggctattttccagtgtttgagcaacacacctccacttactgagtatttcctcaatgataagtatcaagaagaactgaattttgacaatcccttaggaatgagaggtgaaatagctaaatcttatgccgaactgatcaagcaaatgtggtctggaaagtttagctacgtcaccccaagagcctttaagacacaggtaggacgttttgcacctcagttctctggatatcagcagcaagactgtcaagaactgttagctttcctattagatggattacatgaggatttgaatagaattaggaaaaaaccatatatacaattaaaagatgcagatggaaggccagataaggtggttgccgaagaagcctgggaaaaccatttaaaacgaaatgattctatcatagtagatatatttcatggccttttcaaatcaactttagtttgtcctgagtgtgctaagatttcagtaacatttgatcctttttgttacttgacacttccattgcccatgaaaaaagaacgcaccttggaagtttacttagttagaatggatccgcttaccaaacctatgcagtacaaagtggttgtccccaaaattggaaacatattagatctttgtacagcattgtctgctttgtcaggaatacctgcagataagatgatagttactgatatatacaatcatagatttcacagaatattcgctatggatgaaaaccttagtagtattatggaacgggatgatatttatgtgtttgaaattaacatcaataggacagaagatacagagcacgtgattattcctgtttgcctaagagaaaaattcagacactcgagttatacccaccatactggttcttcactttttggtcagccctttcttatggctgtaccacgaaacaatactgaagacaaactttataatctcctgctcttgagaatgtgccgatatgtcaaaatatctactgaaactgaagaaactgaaggatccctacactgctgtaaggaccaaaatattaatgggaatggcccaaatggcatacatgaagaaggctcaccaagtgaaatggaaacagatgagccagatgatgaatccagccaggatcaagaacttccctcagagaatgaaaacagtcagtctgaagattcagttggaggagataatgattctgaaaatggattatgtactgaggatacttgcaaaggtcaactcacgggacacaaaaaacgattgtttacattccagttcaacaacttaggcaatactgatatcaactacatcaaagatgataccaggcatataagatttgatgataggcagcttaggctagatgaaagatcttttcttgctttggattgggatcctgatttgaaaaaaagatattttgatgaaaatgctgctgaggactttgaaaaacatgaaagtgtggagtataaacctcctaaaaaaccctttgtgaaattaaaagattgcattgaactttttacaacaaaagaaaagctaggtgctgaagatccctggtattgtccgaattgtaaagaacatcagcaagccacaaagaaattggatttatggtccctgcctccagtacttgtagtacatctcaagcgattttcttacagtcgatacatgagagacaagttggataccttagttgattttcctatcaatgacttggatatgtcggaattcttaattaatccaaatgcaggtccttgccgctataatctgattgctgtttccaaccactatggagggatgggaggaggacactatactgcttttgcaaaaaataaagatgatggaaaatggtactattttgatgacagtagtgtctccactgcatctgaagaccaaattgtgtccaaagcagcatatgtactcttctaccagagacaagacactttcagtggaactggcttttttcctcttgaccgagaaactaaaggtgcttcagctgccactggcatcccattagaaagtgatgaagatagcaatgataatgacaatgatatagaaaatgaaaactgtatgcacactaactaatgaaagtcctagaagccataaaagagacactttcctgctggtggtatctatggaaatgatgaagttacccaccacattaaaacaaaagtctgagatggggagtttcagataaccgaatgtaaatcctttatcagattttaacttgtgcagtacttgaagtgaaacacaatgaaaactttaacagaaattgtctcttaatacatttacagtcttgtatttacaagctaaatatatataggaaatcacaaataaatcccttttaagtttgctgctgttttgattaattatgtttcctttaattttttggatgtgagttgatgacaaatgttaaatttgtggatgttggtcatttattttgctctaataatactgcaagaaaactatggctgaacttagtttttggataatctagttcatgtgcattaggctgccgtatatactactatgatatttagctgcagtatcaatgtggcataaatactgcggcagcattcttcgaaaaccgcattttcaaatttatccccgtaatcaatgtgggcctattaaaaaaccaaatcatgatacaagaaacaaccttggaaaagttatttccctttgtaatacctttaaaaatccagagtattatattcattttactgccactgtggaaacaggttctagatttcatactccatctaaagtcatttttcagttacatgtaagtattatttactgctattgggatctattcttcagatattcaaaaacattttttgctttaaaatgcatatctttaattgggtgttggtccaaaattaaaatttttgctgtctgtttttctctaccccattttgtggtaatttggcaacttgagctctcccaattattgtaatataaggacagacataatagtattctgtacccatagtaataattgcatcaagcttagatgagaaatttttttcatatactggcctttaaatcattaatggacaattggctataaaggtaggtctgttaactttctttgtgtgttcctgatggaattcaccatagccttacagcttttctcagaaggtaacttgttataagagaaatggcatttgcatgttccagagtcagaacctgtacagtatataaagcataaacaccttgaatttgattttagttcaccacattcaaggatccaggatgccaaaaatatgtgtgaacatttgaaacatttttatttgctgctttttccctttgatatagttgaaagaatgtattgtaaattggcatacaatactgcctttaatagaaaacctaaatgctggggcacatttcacatatcgactacctgagaaattgctttgtgtcccactgttattaaagcaaaaagtataatgttcttcacttgaactaatcaaatacaatagattataaattgtgtattgtaaataaaagttcactctgtgagtgcacattttggtaaattatttatttatgttagcatttaaaagtttaaaaaaaatgcatttgaccaggataaatgaggtatgttgatcatggctttgctttatatcttgatattaaagctggtttatcatcctggtattttaaaagctgctttggggttttttttttcttttttttttttttaatgtaaactaacctcctgcatgacagaggttaaaattttgtctgcacttgagttcacttgagtttacatttgaaatgtgcatgtttatttatatagatttcaataaagctattcaaggccttatttagtcttttatttcttactcttaatcttttaataaaaatcccctactttatggttagatgactatatgctagactttttagttataaatagttaatactagaaaggaaattatgtcagagcaaaatgaatcctactattaaggacgttttaaagttgatttttgtccactttaatatttattcattaaacatatgtttgtgtaccaatcactgttgtagagtctggagatacagcagtaaacaaatatccttacct

SEQ ID NO: 309272 - DNA, 3434 bp, Homo sapiens
atggactgttgaaaacattaataataatttttatggagttgaaaatgtgtatagaattaactacacaatagtgttagcatgtaagttaagataatattctctactatgttccctggtgatccccagctcctcatatccatattcttgggcactcttcttccatgttgtactgaggttggtctgtgtggccaatagcatatagcagtactcatggtacatcgctttcgagattaggttataaaaaaacaccgcggcttacatcttgggtgcacacgcactctagctgtctctctttctcatttctcactcggggaattcaactgcatatggcgaggacactcaggcagcctatggagaggcccacatggtgaggaactgagatctctggccaatagagaggaacggaggcctgcaacaaccatgtggttgaacagggtatgtttgtaaagcactgcaaagtagaagtatatctcacagaattgaagctatgtgaaaatggaaacatgaataatgttgtaactcgaagatttagcaaagctgacacaatagatacaattgaaaaggaaataagaaaaatcttcagtattccagatgaaaaggagaccagattgtggaacaaatacatgagtaacacatttgaaccactgaataaaccagacagcaccattcaggatgctggtttataccaaggacaggtattagtgatagaacagaaaaatgaagatggaacatggccaaggggtccttctactcctaagtccccaggtgcatccaatttttcaactttaccaaagatctctccttcatctctatcaaataattataacaacatgaacaacagaaatgtgaaaaactcaaattactgtcttccatcatataccgcttataagaactatgattattcggaacctggaagaaacaatgaacagccaggcctctgtggcctaagtaacttgggaaatacgtgtttcatgaactcagctattcagttaccggtttactaaaatagtgagcatacatgatcacttgagaattgggcttctggagcacctgaacagaaagggagtggttcatattcagcattacaaaagacaactttctctttttgaaggggattactttggctattttccagtgtttgagcaacacacctccacttactgagtatttcctcaatgataagtatcaagaagaactgaattttgacaatcccttaggaatgagaggtgaaatagctaaatcttatgccgaactgatcaagcaaatgtggtctggaaagtttagctacgtcaccccaagagcctttaagacacaggtaggacgttttgcacctcagttctctggatatcagcagcaagactgtcaagaactgttagctttcctattagatggattacatgaggatttgaatagaattaggaaaaaaccatatatacaattaaaagatgcagatggaaggccagataaggtggttgccgaagaagcctgggaaaaccatttaaaacgaaatgattctatcatagtagatatatttcatggccttttcaaatcaactttagtttgtcctgagtgtgctaagatttcagtaacatttgatcctttttgttacttgacacttccattgcccatgaaaaaagaacgcaccttggaagtttacttagttagaatggatccgcttaccaaacctatgcagtacaaagtggttgtccccaaaattggaaacatattagatctttgtacagcattgtctgctttgtcaggaatacctgcagataagatgatagttactgatatatacaatcatagatttcacagaatattcgctatggatgaaaaccttagtagtattatggaacgggatgatatttatgtgtttgaaattaacatcaataggacagaagatacagagcacgtgattattcctgtttgcctaagagaaaaattcagacactcgagttatacccaccatactggttcttcactttttggtcagccctttcttatggctgtaccacgaaacaatactgaagacaaactttataatctcctgctcttgagaatgtgccgatatgtcaaaatatctactgaaactgaagaaactgaaggatccctacactgctgtaaggaccaaaatattaatgggaatggcccaaatggcatacatgaagaaggctcaccaagtgaaatggaaacagatgagccagatgatgaatccagccaggatcaagaacttccctcagagaatgaaaacagtcagtctgaagattcagttggaggagataatgattctgaaaatggattatgtactgaggatacttgcaaaggtcaactcacgggacacaaaaaacgattgtttacattccagttcaacaacttaggcaatactgatatcaactacatcaaagatgataccaggcatataagatttgatgataggcagcttaggctagatgaaagatcttttcttgctttggattgggatcctgatttgaaaaaaagatattttgatgaaaatgctgctgaggactttgaaaaacatgaaagtgtggagtataaacctcctaaaaaaccctttgtgaaattaaaagattgcattgaactttttacaacaaaagaaaagctaggtgctgaagatccctggtattgtccgaattgtaaagaacatcagcaagccacaaagaaattggatttatggtccctgcctccagtacttgtagtacatctcaagcgattttcttacagtcgatacatgagagacaagttggataccttagttgattttcctatcaatgacttggatatgtcggaattcttaattaatccaaatgcaggtccttgccgctataatctgattgctgtttccaaccactatggagggatgggaggaggacactatactgcttttgcaaaaaataaagatgatggaaaatggtactattttgatgacagtagtgtctccactgcatctgaagaccaaattgtgtccaaagcagcatatgtactcttctaccagagacaagacactttcagtggaactggcttttttcctcttgaccgagaaactaaaggtgcttcagctgccactggcatcccattagaaagtgatgaagatagcaatgataatgacaatgatatagaaaatgaaaactgtatgcacactaactaatgaaagtcctagaagccataaaagagacactttcctgctggtggtatctatggaaatgatgaagttacccaccacattaaaacaaaagtctgagatggggagtttcagataaccgaatgtaaatcctttatcagattttaacttgtgcagtacttgaagtgaaacacaatgaaaactttaacagaaattgtctcttaatacatttacagtcttgtatttacaagctaaatatatataggaaatcacaaataaatcccttttaagtttg

SEQ ID NO: 309273 - DNA, 2211 bp, Homo sapiens
gggaggttgaggctgcggtgagccaagatcatgccactgcactccagcctgggcaacagagtgagtagagcctgtctctaaacaacaaacaaaaaaagatagcaaaagtgggagcagtttcaagtaatgacaggatctaataagttgactgaggttgaattaatgcaagtgtctttgaattgaggagccaaggaatgataaaactaggacaaattatccatgtgggcattgtcacacaggacccaggatagtggcaagattggagacaaacactaatccaaatgccaaatgaatgtgagatagcaaccatgaggtcactctcatttactgaattttttttccaaaataataaattcattacaattttttttgttttttagtacaaagtggttgtccccaaaattggaaacatattagatctttgtacagcattgtctgctttgtcaggaatacctgcagataaggtaagatgtttctggggttgaagtatataagttggtatttagtttctcagtgctgtaaaaccagcttaatagaaattcgtttccttttagatgatagttactgatatatacaatcatagatttcacagaatattcgctatggatgaaaaccttagtagtattatggaacgggatgatatttatgtgtttgaaattaacatcaataggacagaagatacagagcacgtgattattcctgtttgcctaagagaaaaattcagacactcgagttatacccaccatactggttcttcactttttggtcagccctttcttatggctgtaccacgaaacaatactgaagacaaactttataatctcctgctcttgagaatgtgccgatatgtcaaaatatctactgaaactgaagaaactgaaggatccctacactgctgtaaggaccaaaatattaatgggaatggcccaaatggcatacatgaagaaggctcaccaagtgaaatggaaacagatgagccagatgatgaatccagccaggatcaagaacttccctcagagaatgaaaacagtcagtctgaagattcagttggaggagataatgattctgaaaatggattatgtactgaggatacttgcaaaggtcaactcacgggacacaaaaaacgattgtttacattccagttcaacaacttaggcaatactgatatcaactacatcaaagatgataccaggcatataagatttgatgataggcagcttaggctagatgaaagatcttttcttgctttggattgggatcctgatttgaaaaaaagatattttgatgaaaatgctgctgaggactttgaaaaacatgaaagtgtggagtataaacctcctaaaaaaccctttgtgaaattaaaagattgcattgaactttttacaacaaaagaaaagctaggtgctgaagatccctggtattgtccgaattgtaaagaacatcagcaagccacaaagaaattggatttatggtccctgcctccagtacttgtagtacatctcaagcgattttcttacagtcgatacatgagagacaagttggataccttagttgattttcctatcaatgacttggatatgtcggaattcttaattaatccaaatgcaggtccttgccgctataatctgattgctgtttccaaccactatggagggatgggaggaggacactatactgcttttgcaaaaaataaagatgatggaaaatggtactattttgatgacagtagtgtctccactgcatctgaagaccaaattgtgtccaaagcagcatatgtactcttctaccagagacaagacactttcagtggaactggcttttttcctcttgaccgagaaactaaaggtgcttcagctgccactggcatcccattagaaagtgatgaagatagcaatgataatgacaatgatatagaaaatgaaaactgtatgcacactaactaatgaaagtcctagaagccataaaagagacactttcctgctggtggtatctatggaaatgatgaagttacccaccacattaaaacaaaagtctgagatggggagtttcagataaccgaatgtaaatcctttatcagattttaacttgtgcagtacttgaagtgaaacacaatgaaaactttaacagaaattgtctcttaatacatttacagtcttgtatttacaagctaaatatatataggaaatcacaaataaatcccttttaagtttg

SEQ ID NO: 309274 - DNA, 3411 bp, Homo sapiens
  misc_feature (107)..(107): n is a, c, g, or t
cccggggcctcctcttgtcccgaggagcacccccgctcccggtgtcttttggtttcgaccggccgactgggaggggccgtgggacgccattcccataatgctctggngcgtgccgccgccgtcgctgccacctcccctaccgctagtggaagaagatggcggaaggcggagcggcggatctggacacccagcggtctgacatcgcgacgctgctcaaaacctcgctccggaaaggggacacctggtacctagtcgatagtcgctggttcaaacagtggaaaaaatatgttggctttgacagttgggacaaataccagatgggagatcaaaatgtgtatcctggacccattgataactctggacttctcaaagatggtgatgcccagtcacttaaggaacaccttattgatgaattggattacatactgttgccaactgaaggttggaataaacttgtcagctggtacacattgatggaaggtcaagagccaatagcacgaaaggtggttgaacagggtatgtttgtaaagcactgcaaagtagaagtatatctcacagaattgaagctatgtgaaaatggaaacatgaataatgttgtaactcgaagatttagcaaagctgacacaatagatacaattgaaaaggaaataagaaaaatcttcagtattccagatgaaaaggagaccagattgtggaacaaatacatgagtaacacatttgaaccactgaataaaccagacagcaccattcaggatgctggtttataccaaggacaggtattagtgatagaacagaaaaatgaagatggaacatggccaaggggtccttctactcctaagtccccaggtgcatccaatttttcaactttaccaaagatctctccttcatctctatcaaataattataacaacatgaacaacagaaatgtgaaaaactcaaattactgtcttccatcatataccgcttataagaactatgattattcggaacctggaagaaacaatgaacagccaggcctctgtggcctaagtaacttgggaaatacgtgtttcatgaactcagctattcagttaccggtttactaaaatagtgagcatacatgatcacttgagaattgggcttctggagcacctgaacagaaagggagtggttcatattcagcattacaaaagacaactttctctttttgaaggggattactttggctattttccagtgtttgagcaacacacctccacttactgagtatttcctcaatgataagtatcaagaagaactgaattttgacaatcccttaggaatgagaggtgaaatagctaaatcttatgccgaactgatcaagcaaatgtggtctggaaagtttagctacgtcaccccaagagcctttaagacacaggtaggacgttttgcacctcagttctctggatatcagcagcaagactgtcaagaactgttagctttcctattagatggattacatgaggatttgaatagaattaggaaaaaaccatatatacaattaaaagatgcagatggaaggccagataaggtggttgccgaagaagcctgggaaaaccatttaaaacgaaatgattctatcatagtagatatatttcatggccttttcaaatcaactttagtttgtcctgagtgtgctaagatttcagtaacatttgatcctttttgttacttgacacttccattgcccatgaaaaaagaacgcaccttggaagtttacttagttagaatggatccgcttaccaaacctatgcagtacaaagtggttgtccccaaaattggaaacatattagatctttgtacagcattgtctgctttgtcaggaatacctgcagataagatgatagttactgatatatacaatcatagatttcacagaatattcgctatggatgaaaaccttagtagtattatggaacgggatgatatttatgtgtttgaaattaacatcaataggacagaagatacagagcacgtgattattcctgtttgcctaagagaaaaattcagacactcgagttatacccaccatactggttcttcactttttggtcagccctttcttatggctgtaccacgaaacaatactgaagacaaactttataatctcctgctcttgagaatgtgccgatatgtcaaaatatctactgaaactgaagaaactgaaggatccctacactgctgtaaggaccaaaatattaatgggaatggcccaaatggcatacatgaagaaggctcaccaagtgaaatggaaacagatgagccagatgatgaatccagccaggatcaagaacttccctcagagaatgaaaacagtcagtctgaagattcagttggaggagataatgattctgaaaatggattatgtactgaggatacttgcaaaggtcaactcacgggacacaaaaaacgattgtttacattccagttcaacaacttaggcaatactgatatcaactacatcaaagatgataccaggcatataagatttgatgataggcagcttaggctagatgaaagatcttttcttgctttggattgggatcctgatttgaaaaaaagatattttgatgaaaatgctgctgaggactttgaaaaacatgaaagtgtggagtataaacctcctaaaaaaccctttgtgaaattaaaagattgcattgaactttttacaacaaaagaaaagctaggtgctgaagatccctggtattgtccgaattgtaaagaacatcagcaagccacaaagaaattggatttatggtccctgcctccagtacttgtagtacatctcaagcgattttcttacagtcgatacatgagagacaagttggataccttagttgattttcctatcaaatactgcttttgcaaaaaataaagatgatggaaaatggtactattttgatgacagtagtgtctccactgcatctgaagaccaaattgtgtccaaagcagcatatgtactcttctaccagagacaagacactttcagtggaactggcttttttcctcttgaccgagaaactaaaggtgcttcagctgccactggcatcccattagaaagtgatgaagatagcaatgataatgacaatgatatagaaaatgaaaactgtatgcacactaactaatgaaagtcctagaagccataaaagagacactttcctgctggtggtatctatggaaatgatgaagttacccaccacattaaaacaaaagtctgagatggggagtttcagataaccgaatgtaaatcctttatcagattttaacttgtgcagtacttgaagtgaaacacaatgaaaactttaacagaaattgtctcttaatacatttacagtcttgtatttacaagctaaatatatataggaaatcacaaataaatcccttttaagtttg

SEQ ID NO: 309275 - DNA, 996 bp, Homo sapiens
gaagaagtggatatccatattgaaaaaaaaaacaaaaaattttgattcaaaccttgcaacatatacaaaaattaactcaaaatggatcacatatctaagtataaaactataaaacttctagaaggaaacacaggacaaaccctggtttacgaaatgtttccttagatacaacaaaagaaaagctaggtgctgaagatccctggtattgtccgaattgtaaagaacatcagcaagccacaaagaaattggatttatggtccctgcctccagtacttgtagtacatctcaagcgattttcttacagtcgatacatgagagacaagttggataccttagttgattttcctatcaatgacttggatatgtcggaattcttaattaatccaaatgcaggtccttgccgctataatctgattgctgtttccaaccactatggagggatgggaggaggacactatactgcttttgcaaaaaataaagatgatggaaaatggtactattttgatgacagtagtgtctccactgcatctgaagaccaaattgtgtccaaagcagcatatgtactcttctaccagagacaagacactttcagtggaactggcttttttcctcttgaccgagaaactaaaggtgcttcagctgccactggcatcccattagaaagtgatgaagatagcaatgataatgacaatgatatagaaaatgaaaactgtatgcacactaactaatgaaagtcctagaagccataaaagagacactttcctgctggtggtatctatggaaatgatgaagttacccaccacattaaaacaaaagtctgagatggggagtttcagataaccgaatgtaaatcctttatcagattttaacttgtgcagtacttgaagtgaaacacaatgaaaactttaacagaaattgtctcttaatacatttacagtcttgtatttacaagctaaatatatataggaaatcacaaataaatcccttttaagtttg

SEQ ID NO: 309276 - DNA, 3398 bp, Homo sapiens
  misc_feature (107)..(107): n is a, c, g, or t
cccggggcctcctcttgtcccgaggagcacccccgctcccggtgtcttttggtttcgaccggccgactgggaggggccgtgggacgccattcccataatgctctggngcgtgccgccgccgtcgctgccacctcccctaccgctagtggaagaagatggcggaaggcggagcggcggatctggacacccagcggtctgacatcgcgacgctgctcaaaacctcgctccggaaaggggacacctggtacctagtcgatagtcgctggttcaaacagtggaaaaaatatgttggctttgacagttgggacaaataccagatgggagatcaaaatgtgtatcctggacccattgataactctggacttctcaaagatggtgatgcccagtcacttaaggaacaccttattgatgaattggattacatactgttgccaactgaaggttggaataaacttgtcagctggtacacattgatggaaggtcaagagccaatagcacgaaaggtggttgaacagggtatgtttgtaaagcactgcaaagtagaagtatatctcacagaattgaagctatgtgaaaatggaaacatgaataatgttgtaactcgaagatttagcaaagctgacacaatagatacaattgaaaaggaaataagaaaaatcttcagtattccagatgaaaaggagaccagattgtggaacaaatacatgagtaacacatttgaaccactgaataaaccagacagcaccattcaggatgctggtttataccaaggacaggtattagtgatagaacagaaaaatgaagatggaacatggccaaggggtccttctactcctaagtccccaggtgcatccaatttttcaactttaccaaagatctctccttcatctctatcaaataattataacaacatgaacaacagaaatgtgaaaaactcaaattactgtcttccatcatataccgcttataagaactatgattattcggaacctggaagaaacaatgaacagccaggcctctgtggcctaagtaacttgggaaatacgtgtttcatgaactcagctattcagttaccggtttactaaaatagtgagcatacatgatcacttgagaattgggcttctggagcacctgaacagaaagggagtggttcatattcagcattacaaaagacaactttctctttttgaaggggattactttggctattttccagtgtttgagcaacacacctccacttactgagtatttcctcaatgataagtatcaagaagaactgaattttgacaatcccttaggaatgagaggtgaaatagctaaatcttatgccgaactgatcaagcaaatgtggtctggaaagtttagctacgtcaccccaagagcctttaagacacaggtaggacgttttgcacctcagttctctggatatcagcagcaagactgtcaagaactgttagctttcctattagatggattacatgaggatttgaatagaattaggaaaaaaccatatatacaattaaaagatgcagatggaaggccagataaggtggttgccgaagaagcctgggaaaaccatttaaaacgaaatgattctatcatagtagatatatttcatggccttttcaaatcaactttagtttgtcctgagtgtgctaagatttcagtaacatttgatcctttttgttacttgacacttccattgcccatgaaaaaagaacgcaccttggaagtttacttagttagaatggatccgcttaccaaacctatgcagtacaaagtggttgtccccaaaattggaaacatattagatctttgtacagcattgtctgctttgtcaggaatacctgcagataagatgatagttactgatatatacaatcatagatttcacagaatattcgctatggatgaaaaccttagtagtattatggaacgggatgatatttatgtgtttgaaattaacatcaataggacagaagatacagagcacgtgattattcctgtttgcctaagagaaaaattcagacactcgagttatacccaccatactggttcttcactttttggtcagccctttcttatggctgtaccacgaaacaatactgaagacaaactttataatctcctgctcttgagaatgtgccgatatgtcaaaatatctactgaaactgaagaaactgaaggatccctacactgctgtaaggaccaaaatattaatgggaatggcccaaatggcatacatgaagaaggctcaccaagtgaaatggaaacagatgagccagatgatgaatccagccaggatcaagaacttccctcagagaatgaaaacagtcagtctgaagattcagttggaggagataatgattctgaaaatggattatgtactgaggatacttgcaaaggtcaactcacgggacacaaaaaacgattgtttacattccagttcaacaacttaggcaatactgatatcaactacatcaaagatgataccaggcatataagatttgatgataggcagcttaggctagatgaaagatcttttcttgctttggattgggatcctgatttgaaaaaaagatattttgatgaaaatgctgctgaggactttgaaaaacatgaaagtgtggagtataaacctcctaaaaaaccctttgtgaaattaaaagattgcattgaactttttacaacaaaagaaaagctaggtgctgaagatccctggtattgtccgaattgtaaagaacatcagcaagccacaaagaaattggatttatggtccctgcctccagtacttgtagtacatctcaagcgattttcttacagtcgatacatgagagacaagttggataccttagttgattttcctatcaatgacttggatatgtcggaattcttaattaatccaaatgcaggtccttgccgctataatctgattgctgtttccaaccactatggagggatgggaggaggacactatactgcttttgcaaaaaataaagatgatggaaaatggtactattttgatgacagtagtgtctccactgcatctgaagaccaaattgtgtgttgggcccataacccattaaaggccagtgagtccagaagggaagtctgctggtgtacttgtgggaagtttttctggaggaaagaaaaaatgatccttctttaacagatttctgtctacatgtgattcctggaatggcacagtggcatcttgggactgggcttgaagtgtgaaggtgtgttaaccttgagtatattcttttactttagtctttatgcctgataaccaaaactgtattcatctggggtggaaaatggccttttttctacttacttttatccctaaagcccacaagctttgcattgtaatatttgaacattaaaaacaaaaaaaa

SEQ ID NO: 309277 - DNA, 752 bp, Homo sapiens
  misc_feature (107)..(107): n is a, c, g, or t
  misc_feature (726)..(726): n is a, c, g, or t
cccggggcctcctcttgtcccgaggagcacccccgctcccggtgtcttttggtttcgaccggccgactgggaggggccgtgggacgccattcccataatgctctggngcgtgccgccgccgtcgctgccacctcccctaccgctagtggaagaagatggcggaaggcggagcggcggatctggacacccagcggtctgacatcgcgacgctgctcaaaacctcgctccggaaaggggacacctggtacctagtcgatagtcgctggttcaaacagtggaaaaaatatgttggctttgacagttgggacaaataccagatgggagatcaaaatgtgtatcctggacccattgataactctggacttctcaaagatggtgatgcccagtcacttaaggaacaccttattgatgaattggattacatactgttgccaactgaaggttggaataaacttgtcagctggtacacattgatggaaggtcaagagccaatagcacgaaaggtggttgaacagggtatgtttgtaaagcactgcaaagtagaagtatatctcacagaattgaagctatgtgaaaatggaaacatgaataatgttgtaactcgaagatttagcaaagctgacacaatagatacaattgaaaaggaaataagaaaaatcttcagtattccagatgaaaaggagaccagattgtggaacaaatacatgagtaacacatttgaaccgncggtgcggcgtggggtaccgagctcg

SEQ ID NO: 309278 - DNA, 777 bp, Homo sapiens
  misc_feature (107)..(107): n is a, c, g, or t
cccggggcctcctcttgtcccgaggagcacccccgctcccggtgtcttttggtttcgaccggccgactgggaggggccgtgggacgccattcccataatgctctggngcgtgccgccgccgtcgctgccacctcccctaccgctagtggaagaagatggcggaaggcggagcggcggatctggacacccagcggtctgacatcgcgacgctgctcaaaacctcgctccggaaaggggacacctggtacctagtcgatagtcgctggttcaaacagtggaaaaaatatgttggctttgacagttgggacaaataccagatgggagatcaaaatgtgtatcctggacccattgataactctggacttctcaaagatggtgatgcccagtcacttaaggaacaccttattgatgaattggattacatactgttgccaactgaaggttggaataaacttgtcagctggtacacattgatggaaggtcaagagccaatagcacgaaaggtacattttaataataactgactataaatattatttttcttgattagttcacattttattattaattcaatgaattgtgaagtttcatcacttatcttagagaaaaagccagcaaaataaccgtacactgtgttacaataatggcaagtaacatgttaagaaggtttacttatgctagccactattgtaagtatgtattattgattaatcctctatatatagagagaaaactctgtaaggtaagtagtaggaaatgaggataaaaagttaggat

SEQ ID NO: 309279 - DNA, 456 bp, Homo sapiens
cagatgagccagatgatgaatccagccaggatcaagaacttccctcagagaatgaaaacagtcagtctgaagattcagttggaggagataatgattctgaaaatggattatgtactgaggatacttgcaaaggtcaactcacgggacacaaaaaacgattgtttacattccagttcaacaacttaggcaatactgatatcaactacatcaaagatgataccaggcatataagatttgatgataggcagcttaggctagatggtaagtatttgtgaaaaatggcttgaacattaaacaagccgagcatgttattttttttttaggtgaaaaccatgaaattcagctctgtcaagaaatataccatttacttttctatctcaaattttacatgaaaggacttaatatctaagtagactaaaatgtgtgtttgtgtttcataaatggagattgaactca

SEQ ID NO: 309280 - DNA, 719 bp, Homo sapiens
aagattctataatttccattgtgataatgtaaatacacactaatttcaaaaccccaaataaattctacataatctgtaatttggaattatctgtgtcgcccttcgtctgcatttgcataaaaataagttacccaagatcctatgtaagtatgtttaacaactgcaaacatttattgaccatctgttatttacagagttctctgttcaacctacaaatacaaatagaaaatatattctctaaattcaaggaatttatattctgtttacttggtttaagttttcttatacttaatggaaccaatagtttctttacagtttatcttctaggattccttctcactatcattactgatttcttgttatttgaggtcttttagtctcacctgcctagctttggaatcgaaatgcagattacctgttcaccttgtctactgttttcctttaaataatcacagagttactttagtttcttagtttatccagctatcttctaaagttattttaacttcagagttatggaaaaacacccttttattgtgtcatatttgcaggtattagtgatagaacagaaaaatgaagatggaacatggccaaggggtccttctactcctaagtaagtgctcccacttcttatggcttattgtatgattttgaagcccttgatgctagataatcaaatccacaatgatagaagaacctagatgtgtattgcagaaatt

SEQ ID NO: 309281 - DNA, 1799 bp, Homo sapiens
atgagggcctcggataaacagtcccggatttgcagagggagtcgcctgagggtcccgttctggtcctgtggagaggtgaagctggctgggcttctgggtctggtggggacttggagaacttttctgtctagctaaaggtttgtaaacacaccagtcagcactgtgtctagctactggggtgggaacttggagaacttctctgtctagctaaagtattgtaaaaacgcaccagtcagtgctctgtgtctagctaaaggtttgtaaacgcaccaatcagcactctttaaaaacggaccaatcagcactctgtaaaatggaccaatcagcactctgtaaagtggaccaatcagcaggatgtgggcggggccaaataaggggcataaaagctggccaccgaaaccagcaagcgccaaccgtggcgggttctgttccaagctgtgggggctttgttcttttgctcttcgaactaaatcttgctgctgcttactctttgggccttcgctacctttacgacctgtaacactcactgccaaggtgtgtagcttcactcctcaagtcagcgagaccaccaacccaccgggaggagctaacagctgtgctacgcgccacctgtaagagctgtaacactcgctgcgaaggtcggcggcctcacggggaggaagaaacagctcccgacgcgccacctgtaagagcttaacgctcactgtgaaggtcggcggcctcacggggaggaagaaacagctcccgacgcgccacctgtaagagcttatggctcactgtgaaggtctgcggcctcaccgggaggaagaaacagctcccgacgcgccacctgtaagagctcactgagaaggtctccggcttcactcctgaagtcaggcaagaccacgaacccgccagaaggaagaaactccggacgtatctgaacatcagaaggaaccaattccggacacactgtttgcagggaggtgtagacgctgatcaccgtttccagtcattttaaaaattcaggttttatttatttactttttacagtagataggcccttcgggggttcaccccgccttcgccacagcccgcccagtgctcgcctctcttgctgcctcagagctccgcctttccttcccctcgcacacagccccgcccgctcccagcctggccccttgggttttccactgggggaagcacccccctccccgggggggcccagggcacccaacacctgcttgcagaaccctgctttctgggatgcgcttctcattaccgggcaggttaagcatgttccgtacatttagcagtggtttttacttcttttccaggaagttatctggtgaatattttttgactccttttatcttagtttctcttggggctttcgctgccttctagtattttttttttttaataggggaggcaggccttgttctgggctcagctttccccgtttgttgttcgtctttggactttgcgtgtggggcttctgacaatgactcttaatctttatgtcgtggaatgtgtcaatcctgactttatattttttgggtcttgtatcacagttcaaatggcctccccagaacaagatgatcttttctatactttaatgggttgatgaactttagacccggacaggcatttgaagacagtcatgaatttaagtataaatattagaaataggccaggcatgatagctcacacctgtaatcctagcattttggagaaccaaggtgggcaaatcccttgagctcaggtgtttgaaaccagcctagaccacacaccaagaccctgtatttacccacccaaaa

SEQ ID NO: 309282 - DNA, 8603 bp, Homo sapiens
  misc_feature (1291)..(1291): n is a, c, g, or t
ttcatgaatcctaacagaccaaaagtgttaaatgtgatcagccttgaattttcagatacaaagatgtctgaattggtggaggtccctgatatagccaaaaaactttcctgggtggaaaattattggccagatgattcagtctttcccaagccatttgttcagaaatattgcttaatgggagttcaagacagctatacagatttccacattgacttcggtggaacttcagtctggtaccatgtcctctggggtgagaagattttttatttaataaagccaacagatgaaaatttggcacgttatgaatcttggagttcatctgtgacccagagtgaggtgttctttggagataaggtggataaatgctacaaatgtgtggtaaagcagggacataccttatttgttcctacagggtggatccatgctgtgctcacttctcaggactgtatggcttttggggggaacttcctgcacaaccttaacattggcatgcagctcaggtgttatgagatggagaaaaggctaaaaacaccagatcttttcaaattccctttctttgaagccatatgttggtttgtagccaaaaacttgctggaaaccctgaaagaactgagagaagatggtttccagcctcaaacttacctagtacagggagtgaaagcactgcatactgctttaaaattatggatgaaaaaagaacttgtatctgaacatgcctttgaaattccagacaatgttagacctggacaccttattaaagaactttctaaagtaattcgagcaatagaggaggaaaacggcaaaccagttaaatctcagggaattcctattgtgtgtccagtttcacgatcctcaaatgaagcaacttccccataccattcccgaagaaagatgaggaaacttcgagatcataatgtccgaactccttctaacctagacatcctagagctccacacaagggaggtcctcaaaagattagagatgtgtccatgggaagaggacatcttgagctctaaactgaatggaaaattcaacaaacatctccaaccatcctccacagtacctgaatggagagcgaaagataatgatctacgattactgctgacaaatggaagaataattaaagatgaaaggcagccctttgcagatcaaagtctttatacagcagatagtgaaaatgaagaggataaaagaaggacaaaaaaggcaaaaatgaagatagaagagagttcaggagtagagggagtggaacatgaagaatctcaaaaaccactgaatgggttttttacangtgtgaaatcagaactcaggagtagatcatcaggatattctgatatttctgagtcagaagactccggacccgagtgcactgcactgaaaagtatctttaccactgaagagtctgaaagttcaggtgatgaaaagaaacaagaaataacatccaactttaaggaggaatctaatgtgatgaggaacttccttcaaaagagccagaagccatctagaagtgaaattccaattaaaagggaatgtcctacctcgacgagcacagaggaagaagctattcagggcatgctgtctatggcagggttgcactattccacgtgtttacaaaggcaaatacaaagcacagactgcagtggtgaaagaaactctctccaggatcccagcagctgccatggcagtaaccatgaggttaggcagttgtatcgctatgataaaccagtggaatgtggataccatgtcaagactgaagatccagacttgaggacttcctcctggattaaacagtttgatacttccagatttcatcctcaggatctaagtagaagccagaaatgcatcagaaaggaaggttcatcagaaattagtcagagggtacaaagtaggaattatgtggacagcagcggctcaagccttcagaatggaaagtatatgcagaattcaaacctgacttcgggggcgtgccagataagtaatggcagtctaagcccagaaaggccagttggtgaaacttccttctcggtgccccttcaccccaccaagagaccggcatcaaatccaccacctatcagcaaccaggcaacaaaaggtaaacgtccaaaaaaaggaatggcaacagccaaacaacgtcttgggaagatccttaagttgaacagaaatggccatgcacgtttctttgtgtgacagagctgctgttgcagccattcttccctttggagaccagtctaggggtgcaggagcctggagcttccgctgtccccctgcctggagcagtttgtgtgtatagtaagaacactgcccgaagaacagaatgaacctgatgctgcattttcactgtgccacacccactcagcaataaccattttggacctggtgggggagaggaagaaggagggtagaaccttaaaaagagaccttgaactggaaagggtctcttgtcagggcttgaattttattttgttgttggtagtgtcttgatgtattttcagtggtagggtaaagaattatcaataatttatttaacagatttttttttaaagttaacagcttttaaattctttttttaaagctatttatttggaagatttctggagaaatatctcactaatttagatgtaagaatgtgaaggtttttaaattatttttgatagtgtgtgtgttacatgtggggaagggccacagtaacagtaactagtctggactcttaaatttgatattcaggttaaagtcttaaacagggatttgatgcattaattattttaaattaagatgtatatgaaaatcattttattttatatatttcatgtgttttttataagctattagcttcgcttttgctaacatccaaggtgcatactgttatccaggttgattaccttatatcccaccttccctctgcactccccatcattttgtgatgacccagtaagactcttctctttgcagggaaacactttcgtagccaatgtgtaagaactccatgaaagatccctcatttctcatttcgtttgacattgtgattttcttctcaacattaaaaaaaataggcttttgcattttcatttctgctgatgatatctgggtcccaaagagagcagctttaatatatttttcctacttgtgggaaaagtattataagtttggttaaattgtcatgtttatagtttttccaagtacatttgtaactacagcaggccttcttcgtactgctgctgttggacaacaggactggcacctgctgcagaggttataccttatgatacttttatgctccatacctgatttgttgggaaatgttatttaggatattcaaatctgcatcataagccgtaatataataggattaatactacattaagttgtatagaagcaagcatgttggaatagatcttttgtgtgtatttactttttttatttcttaattttctaaagaattacttaagatatggatttggagtaaaatgggtgcttttggcagtttcttccatctatcctaacctgaccagtacatattgaggttaagtatctggttaaactttaaggtattcatttatctcctttatgtatgatttttactaaatgccagttttcatttgcttatagtagcttctattttcccttttttccatccatggcataaaaataagtgatttctgggggtggggcagaaatgttcccaagtctgacaatagagcattttacaaattcctacaaagaaaatataggcaaatagataaaatttatttttatggagaagaaatatggccatattatggatttgtcttttttttactcagcaagatagcaggacttacccttctctattaagtatcacttgaattgctaagaagaaaaaagtctgtaccatcatctttcatggttgcattcaaatgtatattttcaaagagaaatacttcttgtgtccccattccaaaatgtcatgggataaatatgaaatagtttatgaagtagcctttctggttcagagtgactggaccaaagtctgaatcttatctgggtatcaggaaaaagaatttttatggaaatccttagtgtctataaacaacccgtgtaaaccctgtctacactatgccaaaaccagtggaaagatgggtagagtcatcttatctcaggatgtcaaaaatctgggtttgactgattcccctaccttcccacacagtatattcttgtgatttttgcttttctgtagatcctgagtcggtgttacaatagtcatgtttttattttgggttaagaaatacgaggtgtaagagctataatttccttttcgtgttatatcatgatctgggttttcttttttcctttacgtttttcacagctcttgagtattttctatttttttctttagtcacaaaaattaaaattaaactttatttttatgaattaaaatgaaatttaatttatttttatgaattaaaattgtggccagtatccactgtgtccttaggctgagaagtactaatttggagtagcccgtgtgtggaattctaaagtgaaggtactgtggattcatttttagtagttttagccccttaataagtggctaagttagaaaactttcagcgaggtaatagaaccacttgaatagaatccatgtgtctttttctgaattggtgaaaattcggccactgatccagtgactcctggtcaaacgtcttataacattactggccataatgcatccctttatctcatggaaatggctgaactttgtggtagctgctgcgagtacctgggcttaacagtaatagagaacctcatttataccatacagacacagcaacttaggaagacagcactgatagcatttagctagttgtaaccaaatacaaatatgtaaaattgagaattatgattaacatatgcaactttagtaataggaatagatgataattttcctgtattgtttcaaataagtgactgttcagctgggatccattggattataatttacaatgtcacataatattatgcttttcaatattgatgagtgatgtaaacaatataaagttggcagtttgtagtagttcagtatcctagaaatacattgaacttcataagtatcagttcatttttaagcatacagaattgaagattctgactgaaatcataaactcagaggaaacaagcccatctttatcactaattacttagcttgaatacttttctatttttaaataatcctaattattgccttttcaattatagtctactgtatttatttatatgggatcaacaggtatttatcaaacatctactgtgtgcccagcactacctagtactgttggggaacatcaatttgcagttgtggtctctgcccttgaaggtatcttctccaggaaattagcagtattattttcacttctaagcaaacatgagcaaaagaggacctgttcattaaaaaacatgctgacttttttagtttcaactgagatatgccactgtagaagtgaaagtaatttcacaattaaagaaatgcttcaacttggtaattaatatggtcatacagggacttggtgtagcatgcaaggaagcagaagacctgggcttttgtcgaagttctgccatttaggtatcagctgtgtaaccttgaataagtcacttaactctttctcttagttttctcatttgtaaatttggattaaagtgtttattatgataatcaattaagaaaatctcttaacacttcatacatacagagaacttatcattaagttaaaactggcaattaatgcacctttatatatatttttaaatgaaaactaatactattcatgatgtttattttatatcaaatatatgcccagggcatgctactttaaaaatccgaggaatctccaacaaggtgctggattaaaatcagatttcgtgcttgaagtggaagaaaaatgaagttgtttatggataagagagtgagaatgtgtatcctcaagtacgttaagatgatttaactgaaagatggctttaggtttttcttgaagaattaggaaagtaccatccccacagattcagcatactcttcaggtactagataaaggtgaaggaagtcatggaattaaaatgacttagcaactccccagggaacttgtggggagaatgaggtggttagaaaggtgagaatgcacaaagacagctctgggttgggtaccaacagtttgcttggtagaaagaaaccagtgtaggaaaggagacgccaccagacatcttcaacagacaagattctttctgcctttttcaaaagatgctctctgcagcagtaagactatagatagagttgattggaatatcatgtgacccagtatgctactgctaggcataattatcaaaaattcatttttctcattaaatattgttaattgctcgccacataaagagaagctagagctcaccagtcttggtggtgtcctagaccttcctctaaagcagtcttgggaagctggatcatcagatctttagcctagacagagtgtcgctggtaaataaaggagacacaggtaacccagagtggacagtgatttgcgtggggagacacagtggatctggggcctctgatactttgcttcctaaaacagcccccagttttcggcttgccctatgagatgatgttcatgtgcttccttgaaaccaggtggaaagaaaggggaagaattaattttctcattctgttgctgttgaacgtaatgtaatcttaatactgtagccttcctagaagcccttccctctttttcatgctgtaaagtcaaatatttgatatccttaacataaattttaaaaattaaggtcattaggaagcaaatgtctatttccaaagcaatgagcttgttgtgactgtgattttattcttctatagtatttttttcctcattttaactgagaggagaaaataatactcttttgcaatatccttaggttctccccttccccctggtgccccttctagtgtcttaagactttgtcttaacaagtataacattacattttgttgttaaaacctttcgaaactgtattcagtgattcttccaagtttatctgctctgcactatttcactaataaaccctggctaccacgtagcccttgatctccaagtagtttacctatgcaagacctgtgacactctgaattcacttctctttctttcagaaagtagtcataaatggagcttaattataaaggtaaaacttgtctccaaccagtttcattttggccatttctttttcaaaatgtcagctgttttcctccaagatttttcaccaaaacaatgatcataagtgctggaatatataatactttgcaggcataaaataacccagacatactctcatatttctttggtgtattttggttggtaaaacttaccagcattaaatgtaaaatataatgaggagttaattccttacctagaactatttcttccttttaagattcataagtaaccttttatttttacagagctacgtataacttccacattacagtcagggacctgaggtgtaacttactaagtgaaccccaaggttattttatcttgcaaaagaaacctaaaccaaactaagggccttacagtttatggttagactgaatcaaaagctataacctcaatttttccaaaaacagcttctgactgcaaaagcaagtcatacagttgttaggtatgaaatagcactgatcaggaaatgcatcttcgcagatggtatttccttcagaaaagacttttctacttttaatataaattaagccataacagtttcatgctgtggaaagagggtgaaaaggttcattttaagagattatataatatgaactttcacatttactgtgaaatgtctaactttgccagtgcttcagcaagtttttttggggggtgatggggaggggtagtattggttttagaggtttcaaatctgtgaactttggagaggggacagttgttggctctggtatttactagttttgtagtaacgttttgctagcctgactgacttttcttactggtttttatgcccacggtccgaggggactgttcttcttgtttggggtgtctgcggaatagcgtctcgtcttgtttgtataggcagtcaatgtgtgtgacatgtgtgtcctttcagtccggaagcccactgtgtgacaatggcgtggggtgtggctgggaggtggggtgctgaagcttgaagagcatttctttgctgattcataacagtatttcccatcttttgcctgcaggcagggaaagtgtacagtatttattttgtttctgttttactttaaatttgtaagtctttaagtagcttacattgattattataggggaggacaagtgacttgtttaaagttgtatttagtattctttccaatttctgtattttaaaatattgaaattaaaattgtattacttctgttttgatttttttagcactcagtgtattttttgctcattttgtttgaaagtataaatgttgaaaattgtataaaatgcgtccttgaaagaaaaagaatctgaattctatatccaattctgactttgttccctttttctgctgattgaatcatgggaaattatttaaaagtatgaaaaactggg

SEQ ID NO: 309283 - DNA, 8425 bp, Homo sapiens
  misc_feature (1291)..(1291): n is a, c, g, or t
ttcatgaatcctaacagaccaaaagtgttaaatgtgatcagccttgaattttcagatacaaagatgtctgaattggtggaggtccctgatatagccaaaaaactttcctgggtggaaaattattggccagatgattcagtctttcccaagccatttgttcagaaatattgcttaatgggagttcaagacagctatacagatttccacattgacttcggtggaacttcagtctggtaccatgtcctctggggtgagaagattttttatttaataaagccaacagatgaaaatttggcacgttatgaatcttggagttcatctgtgacccagagtgaggtgttctttggagataaggtggataaatgctacaaatgtgtggtaaagcagggacataccttatttgttcctacagggtggatccatgctgtgctcacttctcaggactgtatggcttttggggggaacttcctgcacaaccttaacattggcatgcagctcaggtgttatgagatggagaaaaggctaaaaacaccagatcttttcaaattccctttctttgaagccatatgttggtttgtagccaaaaacttgctggaaaccctgaaagaactgagagaagatggtttccagcctcaaacttacctagtacagggagtgaaagcactgcatactgctttaaaattatggatgaaaaaagaacttgtatctgaacatgcctttgaaattccagacaatgttagacctggacaccttattaaagaactttctaaagtaattcgagcaatagaggaggaaaacggcaaaccagttaaatctcagggaattcctattgtgtgtccagtttcacgatcctcaaatgaagcaacttccccataccattcccgaagaaagatgaggaaacttcgagatcataatgtccgaactccttctaacctagacatcctagagctccacacaagggaggtcctcaaaagattagagatgtgtccatgggaagaggacatcttgagctctaaactgaatggaaaattcaacaaacatctccaaccatcctccacagtacctgaatggagagcgaaagataatgatctacgattactgctgacaaatggaagaataattaaagatgaaaggcagccctttgcagatcaaagtctttatacagcagatagtgaaaatgaagaggataaaagaaggacaaaaaaggcaaaaatgaagatagaagagagttcaggagtagagggagtggaacatgaagaatctcaaaaaccactgaatgggttttttacangtgtgaaatcagaactcaggagtagatcatcaggatattctgatatttctgagtcagaagactccggacccgagtgcactgcactgaaaagtatctttaccactgaagagtctgaaagttcaggtgatgaaaagaaacaagaaataacatccaactttaaggaggaatctaatgtgatgaggaacttccttcaaaagagccagaagccatctagaagtgaaattccaattaaaagggaatgtcctacctcgacgagcacagaggaagaagctattcagggcatgctgtctatggcagggttgcactattccacgtgtttacaaaggcaaatacaaagcacagactgcagtggtgaaagaaactctctccaggatcccagcagctgccatggcagtaaccatgaggttaggcagttgtatcgctatgataaaccagtggaatgtggataccatgtcaagactgaagatccagacttgaggacttcctcctggattaaacagtttgatacttccagatttcatcctcaggatctaagtagaagccagaaatgcatcagaaaggaaggttcatcagaaattagtcagagggtacaaagtaggaattatgtggacagcagcggctcaagccttcagaatggaaagtatatgcagaattcaaacctgacttcgggggcgtgccagataagtaatggcagtctaagcccagaaaggccagttggtgaaacttccttctcggtgccccttcaccccaccaagagaccggcatcaaatccaccacctatcagcaaccaggcaacaaaaggtaaacgtccaaaaaaaggaatggcaacagccaaacaacgtcttgggaagatccttaagttgaacagaaatggccatgcacgtttctttgtgtgacagagctgctgttgcagccattcttccctttggagaccagtctaggggtgcaggagcctggagcttccgctgtccccctgcctggagcagtttgtgtgtatagtaagaacactgcccgaagaacagaatgaacctgatgctgcattttcactgtgccacacccactcagcaataaccattttggacctggtgggggagaggaagaaggagggtagaaccttaaaaagagaccttgaactggaaagggtctcttgtcagggcttgaattttattttgttgttggtagtgtcttgatgtattttcagtggtagggtaaagaattatcaataatttatttaacagatttttttttaaagttaacagcttttaaattctttttttaaagctatttatttggaagatttctggagaaatatctcactaatttagatgtaagaatgtgaaggtttttaaattatttttgatagtgtgtgtgttacatgtggggaagggccacagtaacagtaactagtctggactcttaaatttgatattcaggttaaagtcttaaacagggatttgatgcattaattattttaaattaagatgtatatgaaaatcattttattttatatatttcatgtgttttttataagctattagcttcgcttttgctaacatccaaggtgcatactgttatccaggttgattaccttatatcccaccttccctctgcactccccatcattttgtgatgacccagtaagactcttctctttgcagggaaacactttcgtagccaatgtgtaagaactccatgaaagatccctcatttctcatttcgtttgacattgtgattttcttctcaacattaaaaaaaataggcttttgcattttcatttctgctgatgatatctgggtcccaaagagagcagctttaatatatttttcctacttgtgggaaaagtattataagtttggttaaattgtcatgtttatagtttttccaagtacatttgtaactacagcaggccttcttcgtactgctgctgttggacaacaggactggcacctgctgcagaggttataccttatgatacttttatgctccatacctgatttgttgggaaatgttatttaggatattcaaatctgcatcataagccgtaatataataggattaatactacattaagttgtatagaagcaagcatgttggaatagatcttttgtgtgtatttactttttttatttcttaattttctaaagaattacttaagatatggatttggagtaaaatgggtgcttttggcagtttcttccatctatcctaacctgaccagtacatattgaggttaagtatctggttaaactttaaggtattcatttatctcctttatgtatgatttttactaaatgccagttttcatttgcttatagtagcttctattttcccttttttccatccatggcataaaaataagtgatttctgggggtggggcagaaatgttcccaagtctgacaatagagcattttacaaattcctacaaagaaaatataggcaaatagataaaatttatttttatggagaagaaatatggccatattatggatttgtcttttttttactcagcaagatagcaggacttacccttctctattaagtatcacttgaattgctaagaagaaaaaagtctgtaccatcatctttcatggttgcattcaaatgtatattttcaaagagaaatacttcttgtgtccccattccaaaatgtcatgggataaatatgaaatagtttatgaagtagcctttctggttcagagtgactggaccaaagtctgaatcttatctgggtatcaggaaaaagaatttttatggaaatccttagtgtctataaacaacccgtgtaaaccctgtctacactatgccaaaaccagtggaaagatgggtagagtcatcttatctcaggatgtcaaaaatctgggtttgactgattcccctaccttcccacacagtatattcttgtgatttttgcttttctgtagatcctgagtcggtgttacaatagtcatgtttttattttgggttaagaaatacgaggtgtaagagctataatttccttttcgtgttatatcatgatctgggttttcttttttcctttacgtttttcacagctcttgagtattttctatttttttctttagtcacaaaaattaaaattaaactttatttttatgaattaaaatgaaatttaatttatttttatgaattaaaattgtggccagtatccactgtgtccttaggctgagaagtactaatttggagtagcccgtgtgtggaattctaaagtgaaggtactgtggattcatttttagtagttttagccccttaataagtggctaagttagaaaactttcagcgaggtaatagaaccacttgaatagaatccatgtgtctttttctgaattggtgaaaattcggccactgatccagtgactcctggtcaaacgtcttataacattactggccataatgcatccctttatctcatggaaatggctgaactttgtggtagctgctgcgagtacctgggcttaacagtaatagagaacctcatttataccatacagacacagcaacttaggaagacagcactgatagcatttagctagttgtaaccaaatacaaatatgtaaaattgagaattatgattaacatatgcaactttagtaataggaatagatgataattttcctgtattgtttcaaataagtgactgttcagctgggatccattggattataatttacaatgtcacataatattatgcttttcaatattgatgagtgatgtaaacaatataaagttggcagtttgtagtagttcagtatcctagaaatacattgaacttcataagtatcagttcatttttaagcatacagaattgaagattctgactgaaatcataaactcagaggaaacaagcccatctttatcactaattacttagcttgaatacttttctatttttaaataatcctaattattgccttttcaattatagtctactgtatttatttatatgggatcaacaggtatttatcaaacatctactgtgtgcccagcactacctagtactgttggggaacatcaatttgcagttgtggtctctgcccttgaaggtatcttctccaggaaattagcagtattattttcacttctaagcaaacatgagcaaaagaggacctgttcattaaaaaacatgctgacttttttagtttcaactgagatatgccactgtagaagtgaaagtaatttcacaattaaagaaatgcttcaacttggtaattaatatggtcatacagggacttggtgtagcatgcaaggaagcagaagacctgggcttttgtcgaagttctgccatttaggtatcagctgtgtaaccttgaataagtcacttaactctttctcttagttttctcatttgtaaatttggattaaagtgtttattatgataatcaattaagaaaatctcttaacacttcatacatacagagaacttatcattaagttaaaactggcaattaatgcacctttatatatatttttaaatgaaaactaatactattcatgatgtttattttatatcaaatatatgcccagggcatgctactttaaaaatccgaggaatctccaacaaggtgctggattaaaatcagatttcgtgcttgaagtggaagaaaaatgaagttgtttatggataagagagtgagaatgtgtatcctcaagtacgttaagatgatttaactgaaagatggctttaggtttttcttgaagaattaggaaagtaccatccccacagattcagcatactcttcaggtactagataaaggtgaaggaagtcatggaattaaaatgacttagcaactccccagggaacttgtggggagaatgaggtggttagaaaggtgagaatgcacaaagacagctctgggttgggtaccaacagtttgcttggtagaaagaaaccagtgtaggaaaggagacgccaccagacatcttcaacagacaagattctttctgcctttttcaaaagatgctctctgcagcagtaagactatagatagagttgattggaatatcatgtgacccagtatgctactgctaggcataattatcaaaaattcatttttctcattaaatattgttaattgctcgccacataaagagaagctagagctcaccagtcttggtggtgtcctagaccttcctctaaagcagtcttgggaagctggatcatcagatctttagcctagacagagtgtcgctggtaaataaaggagacacaggtaacccagagtggacagtgatttgcgtggggagacacagtggatctggggcctctgatactttgcttcctaaaacagcccccagttttcggcttgccctatgagatgatgttcatgtgcttccttgaaaccaggtggaaagaaaggggaagaattaattttctcattctgttgctgttgaacgtaatgtaatcttaatactgtagccttcctagaagcccttccctctttttcatgctgtaaagtcaaatatttgatatccttaacataaattttaaaaattaaggtcattaggaagcaaatgtctatttccaaagcaatgagcttgttgtgactgtgattttattcttctatagtatttttttcctcattttaactgagaggagaaaataatactcttttgcaatatccttaggttctccccttccccctggtgccccttctagtgtcttaagactttgtcttaacaagtataacattacattttgttgttaaaacctttcgaaactgtattcagtgattcttccaagtttatctgctctgcactatttcactaataaaccctggctaccacgtagcccttgatctccaagtagtttacctatgcaagacctgtgacactctgaattcacttctctttctttcagaaagtagtcataaatggagcttaattataaaggtaaaacttgtctccaaccagtttcattttggccatttctttttcaaaatgtcagctgttttcctccaagatttttcaccaaaacaatgatcataagtgctggaatatataatactttgcaggcataaaataacccagacatactctcatatttctttggtgtattttggttggtaaaacttaccagcattaaatgtaaaatataatgaggagttaattccttacctagaactatttcttccttttaagattcataagtaaccttttatttttacagagctacgtataacttccacattacagtcagggacctgaggtgtaacttactaagtgaaccccaaggttattttatcttgcaaaagaaacctaaaccaaactaagggccttacagtttatggttagactgaatcaaaagctataacctcaatttttccaaaaacagcttctgactgcaaaagcaagtcatacagttgttaggtatgaaatagcactgatcaggaaatgcatcttcgcagatggtatttccttcagaaaagacttttctacttttaatataaattaagccataacagtttcatgctgtggaaagagggtgaaaaggttcattttaagagattatataatatgaactttcacatttactgtgaaatgtctaactttgccagtgcttcagcaagtttttttggggggtgatggggaggggtagtattggttttagaggtttcaaatctgtgaactttggagaggggacagttgttggctctggtatttactagttttgtagtaacgttttgctagcctgactgacttttcttactggtttttatgcccacggtccgaggggactgttcttcttgtttggggtgtctgcggaatagcgtctcgtcttgtttgtataggcagtcaatgtgtgtgacatgtgtgtcctttcagtccggaagcccactgtgtgacaatggcgtggggtgtggctgggaggtggggtgctgaagcttgaagagcatttctttgctgattcataacagtatttcccatcttttgcctgcaggcagggaaagtgtacagtatttattttgtttctgttttactttaaatttgtaagtctttaagtagcttacattgattattataggggaggacaagtgacttgtttaaagttgtatttagtattctttccaatttctgtattttaaaatattgaaattaaaattgtattacttctgttttg

SEQ ID NO: 309284 - DNA, 6845 bp, Homo sapiens
  misc_feature (1291)..(1291): n is a, c, g, or t
  misc_feature (6762)..(6762): n is a, c, g, or t
  misc_feature (6791)..(6791): n is a, c, g, or t
  misc_feature (6815)..(6815): n is a, c, g, or t
  misc_feature (6827)..(6827): n is a, c, g, or t
  misc_feature (6832)..(6832): n is a, c, g, or t
ttcatgaatcctaacagaccaaaagtgttaaatgtgatcagccttgaattttcagatacaaagatgtctgaattggtggaggtccctgatatagccaaaaaactttcctgggtggaaaattattggccagatgattcagtctttcccaagccatttgttcagaaatattgcttaatgggagttcaagacagctatacagatttccacattgacttcggtggaacttcagtctggtaccatgtcctctggggtgagaagattttttatttaataaagccaacagatgaaaatttggcacgttatgaatcttggagttcatctgtgacccagagtgaggtgttctttggagataaggtggataaatgctacaaatgtgtggtaaagcagggacataccttatttgttcctacagggtggatccatgctgtgctcacttctcaggactgtatggcttttggggggaacttcctgcacaaccttaacattggcatgcagctcaggtgttatgagatggagaaaaggctaaaaacaccagatcttttcaaattccctttctttgaagccatatgttggtttgtagccaaaaacttgctggaaaccctgaaagaactgagagaagatggtttccagcctcaaacttacctagtacagggagtgaaagcactgcatactgctttaaaattatggatgaaaaaagaacttgtatctgaacatgcctttgaaattccagacaatgttagacctggacaccttattaaagaactttctaaagtaattcgagcaatagaggaggaaaacggcaaaccagttaaatctcagggaattcctattgtgtgtccagtttcacgatcctcaaatgaagcaacttccccataccattcccgaagaaagatgaggaaacttcgagatcataatgtccgaactccttctaacctagacatcctagagctccacacaagggaggtcctcaaaagattagagatgtgtccatgggaagaggacatcttgagctctaaactgaatggaaaattcaacaaacatctccaaccatcctccacagtacctgaatggagagcgaaagataatgatctacgattactgctgacaaatggaagaataattaaagatgaaaggcagccctttgcagatcaaagtctttatacagcagatagtgaaaatgaagaggataaaagaaggacaaaaaaggcaaaaatgaagatagaagagagttcaggagtagagggagtggaacatgaagaatctcaaaaaccactgaatgggttttttacangtgtgaaatcagaactcaggagtagatcatcaggatattctgatatttctgagtcagaagactccggacccgagtgcactgcactgaaaagtatctttaccactgaagagtctgaaagttcaggtgatgaaaagaaacaagaaataacatccaactttaaggaggaatctaatgtgatgaggaacttccttcaaaagagccagaagccatctagaagtgaaattccaattaaaagggaatgtcctacctcgacgagcacagaggaagaagctattcagggcatgctgtctatggcagggttgcactattccacgtgtttacaaaggcaaatacaaagcacagactgcagtggtgaaagaaactctctccaggatcccagcagctgccatggcagtaaccatgaggttaggcagttgtatcgctatgataaaccagtggaatgtggataccatgtcaagactgaagatccagacttgaggacttcctcctggattaaacagtttgatacttccagatttcatcctcaggatctaagtagaagccagaaatgcatcagaaaggaaggttcatcagaaattagtcagagggtacaaagtaggaattatgtggacagcagcggctcaagccttcagaatggaaagtatatgcagaattcaaacctgacttcgggggcgtgccagataagtaatggcagtctaagcccagaaaggccagttggtgaaacttccttctcggtgccccttcaccccaccaagagaccggcatcaaatccaccacctatcagcaaccaggcaacaaaaggtaaacgtccaaaaaaaggaatggcaacagccaaacaacgtcttgggaagatccttaagttgaacagaaatggccatgcacgtttctttgtgtgacagagctgctgttgcagccattcttccctttggagaccagtctaggggtgcaggagcctggagcttccgctgtccccctgcctggagcagtttgtgtgtatagtaagaacactgcccgaagaacagaatgaacctgatgctgcattttcactgtgccacacccactcagcaataaccattttggacctggtgggggagaggaagaaggagggtagaaccttaaaaagagaccttgaactggaaagggtctcttgtcagggcttgaattttattttgttgttggtagtgtcttgatgtattttcagtggtagggtaaagaattatcaataatttatttaacagatttttttttaaagttaacagcttttaaattctttttttaaagctatttatttggaagatttctggagaaatatctcactaatttagatgtaagaatgtgaaggtttttaaattatttttgatagtgtgtgtgttacatgtggggaagggccacagtaacagtaactagtctggactcttaaatttgatattcaggttaaagtcttaaacagggatttgatgcattaattattttaaattaagatgtatatgaaaatcattttattttatatatttcatgtgttttttataagctattagcttcgcttttgctaacatccaaggtgcatactgttatccaggttgattaccttatatcccaccttccctctgcactccccatcattttgtgatgacccagtaagactcttctctttgcagggaaacactttcgtagccaatgtgtaagaactccatgaaagatccctcatttctcatttcgtttgacattgtgattttcttctcaacattaaaaaaaataggcttttgcattttcatttctgctgatgatatctgggtcccaaagagagcagctttaatatatttttcctacttgtgggaaaagtattataagtttggttaaattgtcatgtttatagtttttccaagtacatttgtaactacagcaggccttcttcgtactgctgctgttggacaacaggactggcacctgctgcagaggttataccttatgatacttttatgctccatacctgatttgttgggaaatgttatttaggatattcaaatctgcatcataagccgtaatataataggattaatactacattaagttgtatagaagcaagcatgttggaatagatcttttgtgtgtatttactttttttatttcttaattttctaaagaattacttaagatatggatttggagtaaaatgggtgcttttggcagtttcttccatctatcctaacctgaccagtacatattgaggttaagtatctggttaaactttaaggtattcatttatctcctttatgtatgatttttactaaatgccagttttcatttgcttatagtagcttctattttcccttttttccatccatggcataaaaataagtgatttctgggggtggggcagaaatgttcccaagtctgacaatagagcattttacaaattcctacaaagaaaatataggcaaatagataaaatttatttttatggagaagaaatatggccatattatggatttgtcttttttttactcagcaagatagcaggacttacccttctctattaagtatcacttgaattgctaagaagaaaaaagtctgtaccatcatctttcatggttgcattcaaatgtatattttcaaagagaaatacttcttgtgtccccattccaaaatgtcatgggataaatatgaaatagtttatgaagtagcctttctggttcagagtgactggaccaaagtctgaatcttatctgggtatcaggaaaaagaatttttatggaaatccttagtgtctataaacaacccgtgtaaaccctgtctacactatgccaaaaccagtggaaagatgggtagagtcatcttatctcaggatgtcaaaaatctgggtttgactgattcccctaccttcccacacagtatattcttgtgatttttgcttttctgtagatcctgagtcggtgttacaatagtcatgtttttattttgggttaagaaatacgaggtgtaagagctataatttccttttcgtgttatatcatgatctgggttttcttttttcctttacgtttttcacagctcttgagtattttctatttttttctttagtcacaaaaattaaaattaaactttatttttatgaattaaaatgaaatttaatttatttttatgaattaaaattgtggccagtatccactgtgtccttaggctgagaagtactaatttggagtagcccgtgtgtggaattctaaagtgaaggtactgtggattcatttttagtagttttagccccttaataagtggctaagttagaaaactttcagcgaggtaatagaaccacttgaatagaatccatgtgtctttttctgaattggtgaaaattcggccactgatccagtgactcctggtcaaacgtcttataacattactggccataatgcatccctttatctcatggaaatggctgaactttgtggtagctgctgcgagtacctgggcttaacagtaatagagaacctcatttataccatacagacacagcaacttaggaagacagcactgatagcatttagctagttgtaaccaaatacaaatatgtaaaattgagaattatgattaacatatgcaactttagtaataggaatagatgataattttcctgtattgtttcaaataagtgactgttcagctgggatccattggattataatttacaatgtcacataatattatgcttttcaatattgatgagtgatgtaaacaatataaagttggcagtttgtagtagttcagtatcctagaaatacattgaacttcataagtatcagttcatttttaagcatacagaattgaagattctgactgaaatcataaactcagaggaaacaagcccatctttatcactaattacttagcttgaatacttttctatttttaaataatcctaattattgccttttcaattatagtctactgtatttatttatatgggatcaacaggtatttatcaaacatctactgtgtgcccagcactacctagtactgttggggaacatcaatttgcagttgtggtctctgcccttgaaggtatcttctccaggaaattagcagtattattttcacttctaagcaaacatgagcaaaagaggacctgttcattaaaaaacatgctgacttttttagtttcaactgagatatgccactgtagaagtgaaagtaatttcacaattaaagaaatgcttcaacttggtaattaatatggtcatacagggacttggtgtagcatgcaaggaagcagaagacctgggcttttgtcgaagttctgccatttaggtatcagctgtgtaaccttgaataagtcacttaactctttctcttagttttctcatttgtaaatttggattaaagtgtttattatgataatcaattaagaaaatctcttaacacttcatacatacagagaacttatcattaagttaaaactggcaattaatgcacctttatatatatttttaaatgaaaactaatactattcatgatgtttattttatatcaaatatatgcccagggcatgctactttaaaaatccgaggaatctccaacaaggtgctggattaaaatcagatttcgtgcttgaagtggaagaaaaatgaagttgtttatggataagagagtgagaatgtgtatcctcaagtacgttaagatgatttaactgaaagatggctttaggtttttcttgaagaattaggaaagtaccatccccacagattcagcatactcttcaggtactagataaaggtgaaggaagtcatggaattaaaatgacttagcaactccccagggaacttgtggggagaatgaggtggttagaaaggtgagaatgcacaaagacagctctgggttgggtaccaacagtttgcttggtagaaagaaaccagtgtaggaaaggagacgccaccagacatcttcaacagacaagattctttctgcctttttcaaaagatgctctctgcagcagtaagactatagatagagttgattggaatatcatgtgacccagtatgctactgctaggcataattatcaaaaattcatttttctcattaaatattgttaattgctcgccacataaagagaagctagagctcaccagtcttggtggtgtcctagaccttcctctaaagcagtcttgggaagctggatcatcagatctttagcctagacagagtgtcgctggtaaataaaggagacacaggtaacccagagtggacagtgatttgcgtggggagacacagtggatctggggcctctgatactttgcttcctaaaacagcccccagttttcggcttgccctatgagatgatgttcatgtgcttccttgaaaccaggtggaaagaaaggggaagtatatgcagaattcaaacctgacttcgggggcgtgccagataagtaatggcagtctaagcccagaaaggccaagttggtgaaacttccttcntggtgccccttcaccccaccaagagaccnggcatcaaatccaccacctatcancaaccaggcaanaaaanggttaactgtcca

SEQ ID NO: 309285 - DNA, 2523 bp, Homo sapiens
  misc_feature (1291)..(1291): n is a, c, g, or t
ttcatgaatcctaacagaccaaaagtgttaaatgtgatcagccttgaattttcagatacaaagatgtctgaattggtggaggtccctgatatagccaaaaaactttcctgggtggaaaattattggccagatgattcagtctttcccaagccatttgttcagaaatattgcttaatgggagttcaagacagctatacagatttccacattgacttcggtggaacttcagtctggtaccatgtcctctggggtgagaagattttttatttaataaagccaacagatgaaaatttggcacgttatgaatcttggagttcatctgtgacccagagtgaggtgttctttggagataaggtggataaatgctacaaatgtgtggtaaagcagggacataccttatttgttcctacagggtggatccatgctgtgctcacttctcaggactgtatggcttttggggggaacttcctgcacaaccttaacattggcatgcagctcaggtgttatgagatggagaaaaggctaaaaacaccagatcttttcaaattccctttctttgaagccatatgttggtttgtagccaaaaacttgctggaaaccctgaaagaactgagagaagatggtttccagcctcaaacttacctagtacagggagtgaaagcactgcatactgctttaaaattatggatgaaaaaagaacttgtatctgaacatgcctttgaaattccagacaatgttagacctggacaccttattaaagaactttctaaagtaattcgagcaatagaggaggaaaacggcaaaccagttaaatctcagggaattcctattgtgtgtccagtttcacgatcctcaaatgaagcaacttccccataccattcccgaagaaagatgaggaaacttcgagatcataatgtccgaactccttctaacctagacatcctagagctccacacaagggaggtcctcaaaagattagagatgtgtccatgggaagaggacatcttgagctctaaactgaatggaaaattcaacaaacatctccaaccatcctccacagtacctgaatggagagcgaaagataatgatctacgattactgctgacaaatggaagaataattaaagatgaaaggcagccctttgcagatcaaagtctttatacagcagatagtgaaaatgaagaggataaaagaaggacaaaaaaggcaaaaatgaagatagaagagagttcaggagtagagggagtggaacatgaagaatctcaaaaaccactgaatgggttttttacangtgtgaaatcagaactcaggagtagatcatcaggatattctgatatttctgagtcagaagactccggacccgagtgcactgcactgaaaagtatctttaccactgaagagtctgaaagttcaggtgatgaaaagaaacaagaaataacatccaactttaaggaggaatctaatgtgatgaggaacttccttcaaaagagccagaagccatctagaagtgaaattccaattaaaagggaatgtcctacctcgacgagcacagaggaagaagctattcagggcatgctgtctatggcagggttgcactattccacgtgtttacaaaggcaaatacaaagcacagactgcagtggtgaaagaaactctctccaggatcccagcagctgccatggcagtaaccatgaggttaggcagttgtatcgctatgataaaccagtggaatgtggataccatgtcaagactgaagatccagacttgaggacttcctcctggattaaacagtttgatacttccagatttcatcctcaggatctaagtagaagccagaaatgcatcagaaaggaaggttcatcagaaattagtcagagggtacaaagtaggaattatgtggacagcagcggctcaagccttcagaatggaaagtatatgcagaattcaaacctgacttcgggggcgtgccagataagtaatggcagtctaagcccagaaaggccagttggtgaaacttccttctcggtgccccttcaccccaccaagagaccggcatcaaatccaccacctatcagcaaccaggcaacaaaaggtaactttcacacatgtatagagaaagtatatttctgactgtatgtgatggtcatcatggcagttgaggtgtagtctctgcactcaagttgttcaacatctcatgcatagtagacagcatagtgatggcagtatacacaggctactacaggaacaaagaaaaaggatacccaagtcagctctgaggagcgagagacagatcctaaaatcagatgttcaggggttagccaggctgaattggggaaagtgacagaatagacagctttgaaggcagaggattgagcctgaggcagggcacaaaggggagaagcaggatatggggtatttgtgaaatggtagtcagttttgttgcctaagcatagtgtaatgcaggatagggaagagcccaggtgaagagcaggcagaccagactgtgggaagccttgtgagtct

SEQ ID NO: 309286 - DNA, 371 bp, Homo sapiens
ctgatcaggtgtgtgaaatatgtcttttgaacctaaaagaatctgataattatccaatttaatttgtatcattgtattgagaaattgcatcaatgtaggctatcctaagtatggcttttgctttttcaaaaatagtatgatacttccttttagggtgagaagattttttatttaataaagccaacagatgaaaatttggcacgttatgaatcttggagttcatctgtgacccagagtgaggtgttctttggagataaggtggataaatgctacaaatgtgtggtaaagcagggacataccttatttgttcctacaggtaaggttttcatcccatcccctactcaacatgattgatagtcacatggagttgg

SEQ ID NO: 309287 - DNA, 771 bp, Homo sapiens
gcagtgagccaggatcgcgccactgcactctagcctaggcgacagagcaagactctgtctcaaaaacaaacaaacatgtgttttaaacttttaagtgttgttgttaaccttaagttccatttaattatttggtttgggaatagatgagaaaaacaattcttaagaatttttaatttgcatgatgtgggtgtgtgtgtatgtttgttttttgaaaggatgtctgaattggtggaggtccctgatatagccaaaaaactttcctgggtggaaaattattggccagatgattcagtctttcccaagccatttgttcagaaatattgcttaatgggagttcaagacagctatacagatttccacattgacttcggtggaacttcagtctggtaccatgtcctctgggtaagattggggtattttttgttctctcactgacaaaaacatatagccctagtttttcagtggtatattcatttcttgtaaatgttacttgtaaagggggaagtttttttttttttttttactttttaaccaggaactgtcactttgcctttaaacgttacgatttttttttttaatctcaaataatggaagagccatgacttttaaatttatattagatttactttctgccctcatcttttaagttggtttcttttaggcttttgtctcttcttgattttttttcccctagttaattatcctttaatccctgaattaaatatctgtgaaggagcaaaattacagtaataattgcttctggccttaatg

SEQ ID NO: 309288 - DNA, 333 bp, Homo sapiens
ggctgcctgtatctttgagatgcaggaccatgggggaggtggtggtatactgtattccatcagtcgaacagggctacctgagggtggatggtaagtaagttctgcatttataccttcaggacatcttgagctctaaactgaatggaaaattcaacaaacatctccaaccatcctccacagtacctgaatggagagcgaaagataatgatctacgattactgctgacaaatggaagaataattaagtatgtaaagtaaatcagagtatcaaatagattaattttcattgggttccctttgttcatttaacccagtggtcctcaacctttctggc

SEQ ID NO: 309289 - DNA, 184 bp, Homo sapiens
gcagtaaccatgaggttaggcagttgtatcgctatgataaaccagtggaatgtggtaagaaacataaattatcagtctctaaaaagtaacatatgttgcccaacttaatggctcaataatcctcatttaggttagagattatgaataagcatctttaattggaaatgtgttaagaaggttgacc

SEQ ID NO: 309290 - DNA, 555 bp, Homo sapiens
cccgggctcgcaggaattcggcacgaggcgataatccacgtttgtgcataggcgtgtgtggggatgcatatgtctgttttctttttaatatacatttaaaatacagtattatcactttataaaacatacattaagcctaataaatggaccaataagccaaactatcagtattttgtatatcctgcataaactctaatttagttcctcaacatattttcagtgtttatgcagacctttagagttaagcctttgtatttccatgttattccacaatatgcaatatttctctgagtagcttctgctatgatattcttatgaagaaaaggggcaactttctgtccactataggagagaattcagccgaagatatgagagtaatgagagacattttccagtcattggatcgtgttttcttttgtccattattgtactgtgctgtaccacatttatttctatattcattttgtaaaaaatttaaaagtgctattttgtttgtatttgaaaatctctgtgaataaattctctctttgatcaataaaaaaaaaagcatggagt

SEQ ID NO: 309291 - DNA, 2149 bp, Homo sapiens
agcggagggggagatccgctcctctgcgtgcgatccccggcgcccgcgcgcgcccacagcgctccgccagagctgccgccgcggactcgccgggagtgggggtctccgctggtgccagcccgcttctggagaccctccgcctcctgccaacccctgctcttccaggtcgggccccggggttctgcggctgttagggacagaggcaaagaagggcaggacggtccggtttcccgtggatgttcccgcccgagaaagacagcaagttgtgtgtgcgcccgggacgcgggagggaaggtagccgccgcccgccagccatggaccatcatctttagtgcagaggatggaaagttgatgcccagtaagactgaagatccattctgcattacggaactgtggattatctgtgggtccctggtgatttcacaccttcattcactcctgcagtccctgaacacttacttggggtcctcattgccctatctggtgaaagatggcatccagcctgacttgtactggagtaatctgggctttgctgtcttttctttgtgctgccacctcctgcgtggggttctttatgccttactggctctggggatcacagctgggcaagcctgtgtccttcggtaccttccggaggtgctcatatcctgtgcatgatgagagtcggcagatgatggtgatggtggaggaatgtgggcgctatgcctccttccagggcatccccagcgcagaatggaggatctgcaccatagtgaccggcctgggttgtggcctcctcctcctggtggcgctcactgccctcatgggttgctgtgtttccgacctcatctccaggacagtgggaagagtggctggaggaattcagtttcttgggggcttgttgattggtgctggctgtgccctctaccccttgggctgggacagtgaggaagtccggcagacttgtggctacacttctggccagtttgacctggggaagtgtgaaatcggctgggcctactactgcacgggagcaggtgccactgccgccatgctgctgtgcacgtggctggcttgcttttcgggcaagaaacagaagcactacccatactgagatggagctaccaagagcagacagaggagaagatgggccaaaggggcttggagaggtcaaaacatccacctaccttcaaaaggtgggatagtagttctaatccaatacaatgctaataaaatgaaacccgataaaatcaggaacatgatataggaaggaaggattgtaggagatttgtgggggaaaaaaaaggagagtatagaatgatggagaaaaatggaccaaaggctaaaaatattgcagggcatcgggtgtttctattccacagagtattgttaatgtacaacacacacacacacacacacacacacacacacacacacacaacaaatctacatatacaaacaagggtttgggttttagttttttttttttaaggtgaggactcagaaaatcaaagggctagtagaaacagtgttatgttgggaagcagggtacccccaaagatgttccctgtaggtcacggcactcccaaaagcacacaagcacatacagacatatgcatccccacacacgcctatgcacaaacgtggattatcgcacagactgggaggtttagtggtgcatttctcctctgttttctttttaatatacatttaaaatacagtattatcactttataaaacatacattaagcctaataaatggaccaataagccaaactatcagtattttgtatatcctgcataaactctaatttagttcctcaacatattttcagtgtttatgcagacctttagagttaagcctttgtatttccatgttattccacaatatgcaatatttctctgagtagcttctgctatgatattcttatgaagaaaaggggcaactttctgtccactataggagagaattcagccgaagatatgagagtaatgagagacattttccagtcattggatcgtgttttcttttgtccattattgtactgtgctgtaccacatttatttctatattcattttgtaaaaaatttaaaagtgctattttgtttgtatttgaaaatctctgtgaataaattctctctttgatcaataaaaaaaaaagcatggagt

SEQ ID NO: 309292 - DNA, 414 bp, Homo sapiens
acagttcatttctgacagagaaggtgtggttgcaagggaatgaagcggctgctcatattgcaaccacagtctggaaacagaaagagatggatgctgatgttagcaagccccaccacacaacacacacacacacacacacacacacacacacacacacacaacaaatctacatatacaaacaagggtttgggttttagttttttttttttaaggtgaggactcagaaaatcaaagggctagtagaaacagtgttatgttgggcccagggttctatttattgccttgctctgccctctcccttccccggttgtgggacaagagccctccctgaacccctgcaaccctccctgaacccctgcaaatgaaaccaaacgtccacctgggtgtgttcattccttccgtgtccttcaaagt

SEQ ID NO: 309293 - DNA, 1910 bp, Homo sapiens
gaggtgactctagcggatcttattcacagactgcgccgggacgcgggagtaaaggtagccgccgcccagccagccatggaccatcatctttagtgcagaggatggaaagttgatgcccagtaagactgaagatccattctgcattacggaactgtggattatctgtgggtccctggtgatttcacaccttcattcactcctgcagtccctgaacacttacttggggtcctcattgccctatctggtgaaagatggcatccagcctgacttgtactggagtaatctgggctttgctgtcttttctttgtgctgccacctcctgcgtggggttctttatgccttactggctctggggatcacagctgggcaagcctgtgtccttcggtaccttccggaggtgctcatatcctgtgcatgatgagagtcggcagatgatggtgatggtggaggaatgtgggcgctatgcctccttccagggcatccccagcgcagaatggaggatctgcaccatagtgaccggcctgggttgtggcctcctcctcctggtggcgctcactgccctcatgggttgctgtgtttccgacctcatctccaggacagtgggaagagtggctggaggaattcagtttcttgggggcttgttgattggtgctggctgtgccctctaccccttgggctgggacagtgaggaagtccggcagacttgtggctacacttctggccagtttgacctggggaagtgtgaaatcggctgggcctactactgcacgggagcaggtgccactgccgccatgctgctgtgcacgtggctggcttgcttttcgggcaagaaacagaagcactacccatactgagatggagctaccaagagcagacagaggagaagatgggccaaaggggcttggagaggtcaaaacatccacctaccttcaaaaggtgggatagtagttctaatccaatacaatgctaataaaatgaaacccgataaaatcaggaacatgatataggaaggaaggattgtaggagatttgtgggggaaaaaaaaggagagtatagaatgatggagaaaaatggaccaaaggctaaaaatattgcagggcatcgggtgtttctattccacagagtattgttaatgtacaacacacacacacacacacacacacacacacacacacacacaacaaatctacatatacaaacaagggtttgggttttagttttttttttttaaggtgaggactcagaaaatcaaagggctagtagaaacagtgttatgttgggaagcagggtacccccaaagatgttccctgtaggtcacggcactcccaaaagcacacaagcacatacagacatatgcatccccacacacgcctatgcacaaacgtggattatcgcacagactgggaggtttagtggtgcatttctcctctgttttctttttaatatacatttaaaatacagtattatcactttataaaacatacattaagcctaataaatggaccaataagccaaactatcagtattttgtatatcctgcataaactctaatttagttcctcaacatattttcagtgtttatgcagacctttagagttaagcctttgtatttccatgttattccacaatatgcaatatttctctgagtagcttctgctatgatattcttatgaagaaaaggggcaactttctgtccactataggagagaattcagccgaagatatgagagtaatgagagacattttccagtcattggatcgtgttttcttttgtccattattgtactgtgctgtaccacatttatttctatattcattttgtaaaaaatttaaaagtgctattttgtttgtatttgaaaatctctgtgaataaattctctctttgatcaataaaaaaaaaagcatggagt

SEQ ID NO: 309294 - DNA, 2202 bp, Homo sapiens
tcctcggggtcacccaggaagacaagcaactttctcccatacttctcggtctgtctgccttccccactcagctttgaatgagacgcagggagagggggcgcgagggggctcggggctaggggaggagccgcgaaagctgcccccgggggtgggcctggacccgcgcggacagcggggcacccccccactcccttcccggcgctccaggaacgtccccggtcgggccccggggttctgcggctgttagggacagaggcaaagaagggcaggacggtccggtttcccgtggatgttcccgcccgagaaagacagcaagttgtgtgtgcgcccgggacgcgggagggaaggtagccgccgcccgccagccatggaccatcatctttagtgcagaggatggaaagttgatgcccagtaagactgaagatccattctgcattacggaactgtggattatctgtgggtccctggtgatttcacaccttcattcactcctgcagtccctgaacacttacttggggtcctcattgccctatctggtgaaagatggcatccagcctgacttgtactggagtaatctgggctttgctgtcttttctttgtgctgccacctcctgcgtggggttctttatgccttactggctctggggatcacagctgggcaagcctgtgtccttcggtaccttccggaggtgctcatatcctgtgcatgatgagagtcggcagatgatggtgatggtggaggaatgtgggcgctatgcctccttccagggcatccccagcgcagaatggaggatctgcaccatagtgaccggcctgggttgtggcctcctcctcctggtggcgctcactgccctcatgggttgctgtgtttccgacctcatctccaggacagtgggaagagtggctggaggaattcagtttcttgggggcttgttgattggtgctggctgtgccctctaccccttgggctgggacagtgaggaagtccggcagacttgtggctacacttctggccagtttgacctggggaagtgtgaaatcggctgggcctactactgcacgggagcaggtgccactgccgccatgctgctgtgcacgtggctggcttgcttttcgggcaagaaacagaagcactacccatactgagatggagctaccaagagcagacagaggagaagatgggccaaaggggcttggagaggtcaaaacatccacctaccttcaaaaggtgggatagtagttctaatccaatacaatgctaataaaatgaaacccgataaaatcaggaacatgatataggaaggaaggattgtaggagatttgtgggggaaaaaaaaggagagtatagaatgatggagaaaaatggaccaaaggctaaaaatattgcagggcatcgggtgtttctattccacagagtattgttaatgtacaacacacacacacacacacacacacacacacacacacacacaacaaatctacatatacaaacaagggtttgggttttagttttttttttttaaggtgaggactcagaaaatcaaagggctagtagaaacagtgttatgttgggaagcagggtacccccaaagatgttccctgtaggtcacggcactcccaaaagcacacaagcacatacagacatatgcatccccacacacgcctatgcacaaacgtggattatcgcacagactgggaggtttagtggtgcatttctcctctgttttctttttaatatacatttaaaatacagtattatcactttataaaacatacattaagcctaataaatggaccaataagccaaactatcagtattttgtatatcctgcataaactctaatttagttcctcaacatattttcagtgtttatgcagacctttagagttaagcctttgtatttccatgttattccacaatatgcaatatttctctgagtagcttctgctatgatattcttatgaagaaaaggggcaactttctgtccactataggagagaattcagccgaagatatgagagtaatgagagacattttccagtcattggatcgtgttttcttttgtccattattgtactgtgctgtaccacatttatttctatattcattttgtaaaaaatttaaaagtgctattttgtttgtatttgaaaatctctgtgaataaattctctctttgatcaataaaaaaaaaagcatggagt

SEQ ID NO: 309295 - DNA, 439 bp, Homo sapiens
  misc_feature (17)..(17): n is a, c, g, or t
ggaagaatcgagccggncccctagttttagaagtttcaatagcaagtatcagtattttgtatatcctgcataaactctaatttagttcctcaacatattttcagtgtttatgcagacctttagagttaagcctttgtatttccatgttattccacaatatgcaatatttctctgagtagcttctgctatgatattcttatgaagaaaaggggcaactttctgtccactataggagagaattcagccgaagatatgagagtaatgagagacattttccagtcattggatcgtgttttcttttgtccattattgtactgtgctgtaccacatttatttctatattcattttgtaaaaaatttaaaagtgctattttgtttgtatttgaaaatctctgtgaataaattctctctttgatcaataaaaaaaaaagcatggagt

SEQ ID NO: 309296 - DNA, 402 bp, Homo sapiens
gctcctgccctcagaaatctcctgctggggctcttctcaccctctccagcctgctctgtctgacccaggctaactgacgattcaaggccacatgtggctcttgggactggtgggacctttggtgacccaaagtgagcagactcccttcagagcattcaatttcaaaaagaaagagaagggctggtactagacaaaccccttctcctgctgagacccatgcatgcggctgccagtcactgtgagcagctcactgtgagccgcccctggccccctcccacctaacagatccactagcaaggagtggactttctgaccccagggccctgcacacgccattcccttggtttgtgggtgaagaaactgagatcaatatggaaaaccagtaccaggactcaaactccc

SEQ ID NO: 309297 - DNA, 685 bp, Homo sapiens
tgtcgagtttatactcatttagctgcaatgtgggacaatgaaaaatgctttacaggcctggagtatcattacttatggtatctcctgctttaaaatctcaagcgatatctatctggttaaattccattttaggagattgagatgcagaacgttaatgttcattacctcctcctaccccaagagaaatggattcagacatgtcttgtctcaacaagaaattgatttttttttaaactatctcattctgttgccaaatatcacagaagtaatgaggagtttagttacatttggctgttgtgctctgaaagagccaggtttggaatttgtgggggtgatctaggaagaaggttccaaagaagcagaggcatttgtcaagttacctaccctatatccagcatcctcctcatgagcttcagtagctgctctttgcccacgcctgtatcctacgtttgctatttgggcaaaccattacttcagttatttaacttccctttttttttaacttcacctttgactatgaacaagtaacggtaacattccttttgtgtattcaataatgcagttagtttacctttttcagaatattttgaacaaagatctttgtctctttctgctggaatgcgcacacagtgaacgtttgttagaactacacacaataaagacactgttttccttttattgcccc

SEQ ID NO: 309298 - DNA, 491 bp, Homo sapiens
tgagcctgtaaagttgttttagcagttgtcataaatgcatatgttgtgaaatcagaacactgtcgagtttatactcatttagctgcaatgtgggacaatgaaaaatgctttacaggcctggagtatcattacttatggtatctcctgctttaaaatctcaagcgatatctatctggttaaattccattttaggagattgagatgcagaacgttaatgttcattacctcctcctaccccaagagaaatggattcagacatgtcttgtctcaacaagaaattgatttttttttaaactatctcattctgttgccaaatatcacagaagtaatgaggagtttagttacatttggctgttgtgctctgaaagagccaggtttggaatttgtgggggtgatctaggaagaaggttccaaagaagcagaggcatttgtcaagttacctaccctatatccagcatcctcctcatgagcttcagtagctgctctttgcc

SEQ ID NO: 309299 - DNA, 211 bp, Homo sapiens
  misc_feature (41)..(41): n is a, c, g, or t
cctcggtcaaggtgaggtgtgcgaggcgaaggatgtggcangccaccggaagatggcgtggtctggagtctccttcgcctccgcacacctcaccttgaccgagccctaccgcggaggctgccaagcccaggactacaccggcggcatgggcatcgtcaacggggccaagtggaacccccggaccgggagtgagtcagcctgggaggggctg

SEQ ID NO: 309300 - DNA, 4087 bp, Homo sapiens
tggagacggctatccgcgcgggagtgcgccacgcggggccggagcgcctattagccgccaggacctcggagcgccccgaccacccctgagcccctctggcttcggagccccccagcaccccttcccgggtcccctcgcccaccctaatccactctccctccctttcccggattccctcgctcaccccatcctctctcccgccccttcctggattccctcacccgtctcgatcccctctccgccctttcccagagacccagagcccctgaccccccgcgccctccccggagccccccgcgcgtgccgcggccatggcggccgtgcgcggggcgcccctgctcagctgcctcctggcgttgctggccctgtgccctggagggcgcccgcagacggtgctgaccgacgacgagatcgaggagttcctcgagggcttcctgtcagagctagaacctgagccccgggaggacgacgtggaggccccgccgcctcccgagcccaccccgcgggtccgaaaagcccaggcggggggcaagccagggaagcggccagggacggccgcagaagtgcctccggaaaagaccaaagacaaagggaagaaaggcaagaaagacaaaggccccaaggtgcccaaggagtccttggaggggtcccccaggccgcccaagaaggggaaggagaagccacccaaggccaccaagaagcccaaggagaagccacctaaggccaccaagaagcccaaggagaagccacccaaggccaccaagaagcccaaagagaagccacccaaggccaccaagaagcccccgtcagggaagaggccccccattctggctccctcagaaaccctggagtggccactgcccccaccccccagccctggccccgaggagctaccccaggagggaggggcgcccctctcaaataactggcagaatccaggagaggagacccatgtggaggcacgggagcaccagcctgagccggaggaggagaccgagcaacccacactggactacaatgaccagatcgagagggaggactatgaggactttgagtacattcggcgccagaagcaacccaggccacccccaagcagaaggaggaggcccgagcgggtctggccagagccccctgaggagaaggccccggccccagccccggaggagaggattgagcctcctgtgaagcctctgctgcccccgctgccccctgactatggtgatggttacgtgatccccaactacgatgacatggactattactttgggcctcctccgccccagaagcccgatgctgagcgccagacggacgaagagaaggaggagctgaagaaacccaaaaaggaggacagcagccccaaggaggagaccgacaagtgggcagtggagaagggcaaggaccacaaagagccccgaaagggcgaggagttggaggaggagtggacgcctacggagaaagtcaagtgtccccccattgggatggagtcacaccgtattgaggacaaccagatccgagcctcctccatgctgcgccacggcctgggggcacagcgcggccggctcaacatgcagaccggtgccactgaggacgactactatgatggtgcgtggtgtgccgaggacgatgccaggacccagtggatagaggtggacaccaggaggactacccggttcacaggcgtcatcacccagggcagagactccagcatccatgacgattttgtgaccaccttcttcgtgggcttcagcaatgacagccagacatgggtgatgtacaccaacggctatgaggaaatgacctttcatgggaacgtggacaaggacacacccgtgctgagtgagctcccagagccggtggtggctcgtttcatccgcatctacccactcacctggaatggcagcctgtgcatgcgcctggaggtgctggggtgctctgtggcccctgtctacagctactacgcacagaatgaggtggtggccaccgatgacctggatttccggcaccacagctacaaggacatgcgccagctcatgaaggtggtgaacgaggagtgccccaccatcacccgcacttacagcctgggcaagagctcacgaggcctcaagatctatgccatggagatctcagacaaccctggggagcatgaactgggggagcccgagttccgctacactgctgggatccatggcaacgaggtgctgggccgagagctgttgctgctgctcatgcagtacctgtgccgagagtaccgcgatgggaacccacgtgtgcgcagcctggtgcaggacacacgcatccacctggtgccctcactgaaccctgatggctacgaggtggcagcgcagatgggctcagagtttgggaactgggcgctgggactgtggactgaggagggctttgacatctttgaagatttcccggatctcaactctgtgctctggggagctgaggagaggaaatgggtcccctaccgggtccccaacaataacttgcccatccctgaacgctacctttcgccagatgccacggtatccacggaggtccgggccatcattgcctggatggagaagaaccccttcgtgctgggagcaaatctgaacggcggcgagcggctagtatcctacccctacgatatggcccgcacgcctacccaggagcagctgctggccgcagccatggcagcagcccggggggaggatgaggacgaggtctccgaggcccaggagactccagaccacgccatcttccggtggcttgccatctccttcgcctccgcacacctcaccttgaccgagccctaccgcggaggctgccaagcccaggactacaccggcggcatgggcatcgtcaacggggccaagtggaacccccggaccgggactatcaatgacttcagttacctgcataccaactgcctggagctctccttctacctgggctgtgacaagttccctcatgagagtgagctgccccgcgagtgggagaacaacaaggaggcgctgctcaccttcatggagcaggtgcaccgcggcattaagggggtggtgacggacgagcaaggcatccccattgccaacgccaccatctctgtgagtggcattaatcacggcgtgaagacagccagtggtggtgattactggcgaatcttgaacccgggtgagtaccgcgtgacagcccacgcggagggctacaccccgagcgccaagacctgcaatgttgactatgacatcggggccactcagtgcaacttcatcctggctcgctccaactggaagcgcatccgggagatcatggccatgaacgggaaccggcctatcccacacatagacccatcgcgccctatgaccccccaacagcgacgcctgcagcagcgacgcctacaacaccgcctgcggcttcgggcacagatgcggctgcggcgcctcaacgccaccaccaccctaggcccccacactgtgcctcccacgctgccccctgcccctgccaccaccctgagcactaccatagagccctggggcctcataccgccaaccaccgctggctgggaggagtcggagactgagacctacacagaggtggtgacagagtttgggaccgaggtggagcccgagtttgggaccaaggtggagcccgagtttgagacccagttggagcctgagtttgagacccagctggaacccgagtttgaggaagaggaggaggaggagaaagaggaggagatagccactggccaggcattccccttcacaacagtagagacctacacagtgaactttggggacttctgagatcagcgtcctaccaagaccccagcccaactcaagctacagcagcagcacttcccaagcctgctgaccacagtcacatcacccatcagcacatggaaggcccctggtatggacactgaaaggaagggctggtcctgcccctttgagggggtgcaaacatgactgggacctaagagccagaggctgtgtagaggctcctgctccacctgccagtctcgtaagagatggggttgctgcagtgttggagtaggggcagagggagggagccaaggtcactccaataaaacaagctcatggca

SEQ ID NO: 309301 - DNA, 4109 bp, Homo sapiens
agcggccgctcgcgatctagaaccggacgcgtgggtcgaacccacgcgtccgacgcggggccggagcgcctattagccgccaggacctcggagcgccccgaccacccctgagcccctctggcttcggagccccccagcaccccttcccgggtcccctcgcccaccctaatccactctccctccctttcccggattccctcgctcaccccatcctctctcccgccccttcctggattccctcacccgtctcgatcccctctccgccctttcccagagacccagagcccctgaccccccgcgccctccccggagccccccgcgcgtgccgcggccatggcggccgtgcgcggggcgcccctgctcagctgcctcctggcgttgctggccctgtgccctggagggcgcccgcagacggtgctgaccgacgacgagatcgaggagttcctcgagggcttcctgtcagagctagaacctgagccccgggaggacgacgtggaggccccgccgcctcccgagcccaccccgcgggtccgaaaagcccaggcggggggcaagccagggaagcggccagggacggccgcagaagtgcctccggaaaagaccaaagacaaagggaagaaaggcaagaaagacaaaggccccaaggtgcccaaggagtccttggaggggtcccccaggccgcccaagaaggggaaggagaagccacccaaggccaccaagaagcccaaggagaagccacctaaggccaccaagaagcccaaggagaagccacccaaggccaccaagaagcccaaagagaagccacccaaggccaccaagaagcccccgtcagggaagaggccccccattctggctccctcagaaaccctggagtggccactgcccccaccccccagccctggccccgaggagctaccccaggagggaggggcgcccctctcaaataactggcagaatccaggagaggagacccatgtggaggcacgggagcaccagcctgagccggaggaggagaccgagcaacccacactggactacaatgaccagatcgagagggaggactatgaggactttgagtacattcggcgccagaagcaacccaggccacccccaagcagaaggaggaggcccgagcgggtctggccagagccccctgaggagaaggccccggccccagccccggaggagaggattgagcctcctgtgaagcctctgctgcccccgctgccccctgactatggtgatggttacgtgatccccaactacgatgacatggactattactttgggcctcctccgccccagaagcccgatgctgagcgccagacggacgaagagaaggaggagctgaagaaacccaaaaaggaggacagcagccccaaggaggagaccgacaagtgggcagtggagaagggcaaggaccacaaagagccccgaaagggcgaggagttggaggaggagtggacgcctacggagaaagtcaagtgtccccccattgggatggagtcacaccgtattgaggacaaccagatccgagcctcctccatgctgcgccacggcctgggggcacagcgcggccggctcaacatgcagaccggtgccactgaggacgactactatgatggtgcgtggtgtgccgaggacgatgccaggacccagtggatagaggtggacaccaggaggactacccggttcacaggcgtcatcacccagggcagagactccagcatccatgacgattttgtgaccaccttcttcgtgggcttcagcaatgacagccagacatgggtgatgtacaccaacggctatgaggaaatgacctttcatgggaacgtggacaaggacacacccgtgctgagtgagctcccagagccggtggtggctcgtttcatccgcatctacccactcacctggaatggcagcctgtgcatgcgcctggaggtgctggggtgctctgtggcccctgtctacagctactacgcacagaatgaggtggtggccaccgatgacctggatttccggcaccacagctacaaggacatgcgccagctcatgaaggtggtgaacgaggagtgccccaccatcacccgcacttacagcctgggcaagagctcacgaggcctcaagatctatgccatggagatctcagacaaccctggggagcatgaactgggggagcccgagttccgctacactgctgggatccatggcaacgaggtgctgggccgagagctgttgctgctgctcatgcagtacctgtgccgagagtaccgcgatgggaacccacgtgtgcgcagcctggtgcaggacacacgcatccacctggtgccctcactgaaccctgatggctacgaggtggcagcgcagatgggctcagagtttgggaactgggcgctgggactgtggactgaggagggctttgacatctttgaagatttcccggatctcaactctgtgctctggggagctgaggagaggaaatgggtcccctaccgggtccccaacaataacttgcccatccctgaacgctacctttcgccagatgccacggtatccacggaggtccgggccatcattgcctggatggagaagaaccccttcgtgctgggagcaaatctgaacggcggcgagcggctagtatcctacccctacgatatggcccgcacgcctacccaggagcagctgctggccgcagccatggcagcagcccggggggaggatgaggacgaggtctccgaggcccaggagactccagaccacgccatcttccggtggcttgccatctccttcgcctccgcacacctcaccttgaccgagccctaccgcggaggctgccaagcccaggactacaccggcggcatgggcatcgtcaacggggccaagtggaacccccggaccgggactatcaatgacttcagttacctgcataccaactgcctggagctctccttctacctgggctgtgacaagttccctcatgagagtgagctgccccgcgagtgggagaacaacaaggaggcgctgctcaccttcatggagcaggtgcaccgcggcattaagggggtggtgacggacgagcaaggcatccccattgccaacgccaccatctctgtgagtggcattaatcacggcgtgaagacagccagtggtggtgattactggcgaatcttgaacccgggtgagtaccgcgtgacagcccacgcggagggctacaccccgagcgccaagacctgcaatgttgactatgacatcggggccactcagtgcaacttcatcctggctcgctccaactggaagcgcatccgggagatcatggccatgaacgggaaccggcctatcccacacatagacccatcgcgccctatgaccccccaacagcgacgcctgcagcagcgacgcctacaacaccgcctgcggcttcgggcacagatgcggctgcggcgcctcaacgccaccaccaccctaggcccccacactgtgcctcccacgctgccccctgcccctgccaccaccctgagcactaccatagagccctggggcctcataccgccaaccaccgctggctgggaggagtcggagactgagacctacacagaggtggtgacagagtttgggaccgaggtggagcccgagtttgggaccaaggtggagcccgagtttgagacccagttggagcctgagtttgagacccagctggaacccgagtttgaggaagaggaggaggaggagaaagaggaggagatagccactggccaggcattccccttcacaacagtagagacctacacagtgaactttggggacttctgagatcagcgtcctaccaagaccccagcccaactcaagctacagcagcagcacttcccaagcctgctgaccacagtcacatcacccatcagcacatggaaggcccctggtatggacactgaaaggaagggctggtcctgcccctttgagggggtgcaaacatgactgggacctaagagccagaggctgtgtagaggctcctgctccacctgccagtctcgtaagagatggggttgctgcagtgttggagtaggggcagagggagggagccaaggtcactccaataaaacaagctcatggca

SEQ ID NO: 309302 - DNA, 4190 bp, Homo sapiens
tggagacggctatccgcgcgggagtgcgccacgcggggccggagcgcctattagccgccaggacctcggagcgccccgaccacccctgagcccctctggcttcggagccccccagcaccccttcccgggtcccctcgcccaccctaatccactctccctccctttcccggattccctcgctcaccccatcctctctcccgccccttcctggattccctcacccgtctcgatcccctctccgccctttcccagagacccagagcccctgaccccccgcgccctccccggagccccccgcgcgtgccgcggccatggcggccgtgcgcggggcgcccctgctcagctgcctcctggcgttgctggccctgtgccctggagggcgcccgcagacggtgctgaccgacgacgagatcgaggagttcctcgagggcttcctgtcagagctagaacctgagccccgggaggacgacgtggaggccccgccgcctcccgagcccaccccgcgggtccgaaaagcccaggcggggggcaagccagggaagcggccagggacggccgcagaagtgcctccggaaaagaccaaagacaaagggaagaaaggcaagaaagacaaaggccccaaggtgcccaaggagtccttggaggggtcccccaggccgcccaagaaggggaaggagaagccacccaaggccaccaagaagcccaaggagaagccacctaaggccaccaagaagcccaaggagaagccacccaaggccaccaagaagcccaaagagaagccacccaaggccaccaagaagcccccgtcagggaagaggccccccattctggctccctcagaaaccctggagtggccactgcccccaccccccagccctggccccgaggagctaccccaggagggaggggcgcccctctcaaataactggcagaatccaggagaggagacccatgtggaggcacgggagcaccagcctgagccggaggaggagaccgagcaacccacactggactacaatgaccagatcgagagggaggactatgaggactttgagtacattcggcgccagaagcaacccaggccacccccaagcagaaggaggaggcccgagcgggtctggccagagccccctgaggagaaggccccggccccagccccggaggagaggattgagcctcctgtgaagcctctgctgcccccgctgccccctgactatggtgatggttacgtgatccccaactacgatgacatggactattactttgggcctcctccgccccagaagcccgatgctgagcgccagacggacgaagagaaggaggagctgaagaaacccaaaaaggaggacagcagccccaaggaggagaccgacaagtgggcagtggagaagggcaaggaccacaaagagccccgaaagggcgaggagttggaggaggagtggacgcctacggagaaagtcaagtgtccccccattgggatggagtcacaccgtattgaggacaaccagatccgagcctcctccatgctgcgccacggcctgggggcacagcgcggccggctcaacatgcagaccggtgccactgaggacgactactatgatggtgcgtggtgtgccgaggacgatgccaggacccagtggatagaggtggacaccaggaggactacccggttcacaggcgtcatcacccagggcagagactccagcatccatgacgattttgtgaccaccttcttcgtgggcttcagcaatgacagccagacatgggtgatgtacaccaacggctatgaggaaatggtgggcaccatgcccaggctcttggctctgctcccattgtctgggcgaggggtgggctctcagaggggctggcagtactgctctgaggcctgcctctccccagacctttcatgggaacgtggacaaggacacacccgtgctgagtgagctcccagagccggtggtggctcgtttcatccgcatctacccactcacctggaatggcagcctgtgcatgcgcctggaggtgctggggtgctctgtggcccctgtctacagctactacgcacagaatgaggtggtggccaccgatgacctggatttccggcaccacagctacaaggacatgcgccagctcatgaaggtggtgaacgaggagtgccccaccatcacccgcacttacagcctgggcaagagctcacgaggcctcaagatctatgccatggagatctcagacaaccctggggagcatgaactgggggagcccgagttccgctacactgctgggatccatggcaacgaggtgctgggccgagagctgttgctgctgctcatgcagtacctgtgccgagagtaccgcgatgggaacccacgtgtgcgcagcctggtgcaggacacacgcatccacctggtgccctcactgaaccctgatggctacgaggtggcagcgcagatgggctcagagtttgggaactgggcgctgggactgtggactgaggagggctttgacatctttgaagatttcccggatctcaactctgtgctctggggagctgaggagaggaaatgggtcccctaccgggtccccaacaataacttgcccatccctgaacgctacctttcgccagatgccacggtatccacggaggtccgggccatcattgcctggatggagaagaaccccttcgtgctgggagcaaatctgaacggcggcgagcggctagtatcctacccctacgatatggcccgcacgcctacccaggagcagctgctggccgcagccatggcagcagcccggggggaggatgaggacgaggtctccgaggcccaggagactccagaccacgccatcttccggtggcttgccatctccttcgcctccgcacacctcaccttgaccgagccctaccgcggaggctgccaagcccaggactacaccggcggcatgggcatcgtcaacggggccaagtggaacccccggaccgggactatcaatgacttcagttacctgcataccaactgcctggagctctccttctacctgggctgtgacaagttccctcatgagagtgagctgccccgcgagtgggagaacaacaaggaggcgctgctcaccttcatggagcaggtgcaccgcggcattaagggggtggtgacggacgagcaaggcatccccattgccaacgccaccatctctgtgagtggcattaatcacggcgtgaagacagccagtggtggtgattactggcgaatcttgaacccgggtgagtaccgcgtgacagcccacgcggagggctacaccccgagcgccaagacctgcaatgttgactatgacatcggggccactcagtgcaacttcatcctggctcgctccaactggaagcgcatccgggagatcatggccatgaacgggaaccggcctatcccacacatagacccatcgcgccctatgaccccccaacagcgacgcctgcagcagcgacgcctacaacaccgcctgcggcttcgggcacagatgcggctgcggcgcctcaacgccaccaccaccctaggcccccacactgtgcctcccacgctgccccctgcccctgccaccaccctgagcactaccatagagccctggggcctcataccgccaaccaccgctggctgggaggagtcggagactgagacctacacagaggtggtgacagagtttgggaccgaggtggagcccgagtttgggaccaaggtggagcccgagtttgagacccagttggagcctgagtttgagacccagctggaacccgagtttgaggaagaggaggaggaggagaaagaggaggagatagccactggccaggcattccccttcacaacagtagagacctacacagtgaactttggggacttctgagatcagcgtcctaccaagaccccagcccaactcaagctacagcagcagcacttcccaagcctgctgaccacagtcacatcacccatcagcacatggaaggcccctggtatggacactgaaaggaagggctggtcctgcccctttgagggggtgcaaacatgactgggacctaagagccagaggctgtgtagaggctcctgctccacctgccagtctcgtaagagatggggttgctgcagtgttggagtaggggcagagggagggagccaaggtcactccaataaaacaagctcatggca

SEQ ID NO: 309303 - DNA, 3077 bp, Homo sapiens
  misc_feature (34)..(34): n is a, c, g, or t
  misc_feature (75)..(75): n is a, c, g, or t
  misc_feature (79)..(79): n is a, c, g, or t
  misc_feature (103)..(103): n is a, c, g, or t
gaggagggaggtcaaggaagaacattcccaggantcctaagaagtggggcagatggcagggctgaggatgggttntgcntccccaaagccatcccttccctanttcccaaatgaagggacggcagtgggaccaggtctgtggaaaagtggtgcatggtcagaatgggtgcagtttgaggggcctgtgcggaggccctcagggagatgttggactgtgcctgggtccccaaccacgatgacatggactattactttgggcctcctccgccccagaagcccgatgctgagcgccagacggacgaagagaaggaggagctgaagaaacccaaaaaggaggacagcagccccaaggaggagaccgacaagtgggcagtggagaagggcaaggaccacaaagagccccgaaagggcgaggagttggaggaggagtggacgcctacggagaaagtcaagtgtccccccattgggatggagtcacaccgtattgaggacaaccagatccgagcctcctccatgctgcgccacggcctgggggcacagcgcggccggctcaacatgcagaccggtgccactgaggacgactactatgatggtgcgtggtgtgccgaggacgatgccaggacccagtggatagaggtggacaccaggaggactacccggttcacaggcgtcatcacccagggcagagactccagcatccatgacgattttgtgaccaccttcttcgtgggcttcagcaatgacagccagacatgggtgatgtacaccaacggctatgaggaaatgacctttcatgggaacgtggacaaggacacacccgtgctgagtgagctcccagagccggtggtggctcgtttcatccgcatctacccactcacctggaatggcagcctgtgcatgcgcctggaggtgctggggtgctctgtggcccctgtctacagctactacgcacagaatgaggtggtggccaccgatgacctggatttccggcaccacagctacaaggacatgcgccagctcatgaaggtggtgaacgaggagtgccccaccatcacccgcacttacagcctgggcaagagctcacgaggcctcaagatctatgccatggagatctcagacaaccctggggagcatgaactgggggagcccgagttccgctacactgctgggatccatggcaacgaggtgctgggccgagagctgttgctgctgctcatgcagtacctgtgccgagagtaccgcgatgggaacccacgtgtgcgcagcctggtgcaggacacacgcatccacctggtgccctcactgaaccctgatggctacgaggtggcagcgcagatgggctcagagtttgggaactgggcgctgggactgtggactgaggagggctttgacatctttgaagatttcccggatctcaactctgtgctctggggagctgaggagaggaaatgggtcccctaccgggtccccaacaataacttgcccatccctgaacgctacctttcgccagatgccacggtatccacggaggtccgggccatcattgcctggatggagaagaaccccttcgtgctgggagcaaatctgaacggcggcgagcggctagtatcctacccctacgatatggcccgcacgcctacccaggagcagctgctggccgcagccatggcagcagcccggggggaggatgaggacgaggtctccgaggcccaggagactccagaccacgccatcttccggtggcttgccatctccttcgcctccgcacacctcaccttgaccgagccctaccgcggaggctgccaagcccaggactacaccggcggcatgggcatcgtcaacggggccaagtggaacccccggaccgggactatcaatgacttcagttacctgcataccaactgcctggagctctccttctacctgggctgtgacaagttccctcatgagagtgagctgccccgcgagtgggagaacaacaaggaggcgctgctcaccttcatggagcaggtgcaccgcggcattaagggggtggtgacggacgagcaaggcatccccattgccaacgccaccatctctgtgagtggcattaatcacggcgtgaagacagccagtggtggtgattactggcgaatcttgaacccgggtgagtaccgcgtgacagcccacgcggagggctacaccccgagcgccaagacctgcaatgttgactatgacatcggggccactcagtgcaacttcatcctggctcgctccaactggaagcgcatccgggagatcatggccatgaacgggaaccggcctatcccacacatagacccatcgcgccctatgaccccccaacagcgacgcctgcagcagcgacgcctacaacaccgcctgcggcttcgggcacagatgcggctgcggcgcctcaacgccaccaccaccctaggcccccacactgtgcctcccacgctgccccctgcccctgccaccaccctgagcactaccatagagccctggggcctcataccgccaaccaccgctggctgggaggagtcggagactgagacctacacagaggtggtgacagagtttgggaccgaggtggagcccgagtttgggaccaaggtggagcccgagtttgagacccagttggagcctgagtttgagacccagctggaacccgagtttgaggaagaggaggaggaggagaaagaggaggagatagccactggccaggcattccccttcacaacagtagagacctacacagtgaactttggggacttctgagatcagcgtcctaccaagaccccagcccaactcaagctacagcagcagcacttcccaagcctgctgaccacagtcacatcacccatcagcacatggaaggcccctggtatggacactgaaaggaagggctggtcctgcccctttgagggggtgcaaacatgactgggacctaagagccagaggctgtgtagaggctcctgctccacctgccagtctcgtaagagatggggttgctgcagtgttggagtaggggcagagggagggagccaaggtcactccaataaaacaagctcatggca

SEQ ID NO: 309304 - DNA, 3272 bp, Homo sapiens
gtgggggccacaggatgggggtgctgggacaagtgactggcccaatgtcacaaacaggacccaggtccccggaaccctttcctactcagattcttgggacccagaagggaggggccccgggagcccaggatagcctcgcttggctgccccagccctggaccccaggctggcctgcttcaggagggtggcagctccccagggcccctagtggctgggcgtggtagggggaggacctggggccttggtggggagtgaggacctcaggtaccttcacaggtatccctgcagggccattgtgcagacggtccccatctggatgacatctgtggctgcgccctgggggagctctacctgtgatttcacgtgtgtcccctgagagctgggcatggtcagcccgttctccagatggggcagctgaggcccagggaggggaagcacaggctgggattggaaacagctcctggcctggctttgagtcgattccaggtgggctggtgcagggcaccagggagccaccagctgaccagagctgccctctgactgtgcccccgatgtgccgggagtgggctctgggctccttggttctgggtttggtggagggaaggatggagctagtgagccaccattctggggtacgcgtcctcagagtgtccccccattgggatggagtcacaccgtattgaggacaaccagatccgagcctcctccatgctgcgccacggcctgggggcacagcgcggccggctcaacatgcagaccggtgccactgaggacgactactatgatggtgcgtggtgtgccgaggacgatgccaggacccagtggatagaggtggacaccaggaggactacccggttcacaggcgtcatcacccagggcagagactccagcatccatgacgattttgtgaccaccttcttcgtgggcttcagcaatgacagccagacatgggtgatgtacaccaacggctatgaggaaatgacctttcatgggaacgtggacaaggacacacccgtgctgagtgagctcccagagccggtggtggctcgtttcatccgcatctacccactcacctggaatggcagcctgtgcatgcgcctggaggtgctggggtgctctgtggcccctgtctacagctactacgcacagaatgaggtggtggccaccgatgacctggatttccggcaccacagctacaaggacatgcgccagctcatgaaggtggtgaacgaggagtgccccaccatcacccgcacttacagcctgggcaagagctcacgaggcctcaagatctatgccatggagatctcagacaaccctggggagcatgaactgggggagcccgagttccgctacactgctgggatccatggcaacgaggtgctgggccgagagctgttgctgctgctcatgcagtacctgtgccgagagtaccgcgatgggaacccacgtgtgcgcagcctggtgcaggacacacgcatccacctggtgccctcactgaaccctgatggctacgaggtggcagcgcagatgggctcagagtttgggaactgggcgctgggactgtggactgaggagggctttgacatctttgaagatttcccggatctcaactctgtgctctggggagctgaggagaggaaatgggtcccctaccgggtccccaacaataacttgcccatccctgaacgctacctttcgccagatgccacggtatccacggaggtccgggccatcattgcctggatggagaagaaccccttcgtgctgggagcaaatctgaacggcggcgagcggctagtatcctacccctacgatatggcccgcacgcctacccaggagcagctgctggccgcagccatggcagcagcccggggggaggatgaggacgaggtctccgaggcccaggagactccagaccacgccatcttccggtggcttgccatctccttcgcctccgcacacctcaccttgaccgagccctaccgcggaggctgccaagcccaggactacaccggcggcatgggcatcgtcaacggggccaagtggaacccccggaccgggactatcaatgacttcagttacctgcataccaactgcctggagctctccttctacctgggctgtgacaagttccctcatgagagtgagctgccccgcgagtgggagaacaacaaggaggcgctgctcaccttcatggagcaggtgcaccgcggcattaagggggtggtgacggacgagcaaggcatccccattgccaacgccaccatctctgtgagtggcattaatcacggcgtgaagacagccagtggtggtgattactggcgaatcttgaacccgggtgagtaccgcgtgacagcccacgcggagggctacaccccgagcgccaagacctgcaatgttgactatgacatcggggccactcagtgcaacttcatcctggctcgctccaactggaagcgcatccgggagatcatggccatgaacgggaaccggcctatcccacacatagacccatcgcgccctatgaccccccaacagcgacgcctgcagcagcgacgcctacaacaccgcctgcggcttcgggcacagatgcggctgcggcgcctcaacgccaccaccaccctaggcccccacactgtgcctcccacgctgccccctgcccctgccaccaccctgagcactaccatagagccctggggcctcataccgccaaccaccgctggctgggaggagtcggagactgagacctacacagaggtggtgacagagtttgggaccgaggtggagcccgagtttgggaccaaggtggagcccgagtttgagacccagttggagcctgagtttgagacccagctggaacccgagtttgaggaagaggaggaggaggagaaagaggaggagatagccactggccaggcattccccttcacaacagtagagacctacacagtgaactttggggacttctgagatcagcgtcctaccaagaccccagcccaactcaagctacagcagcagcacttcccaagcctgctgaccacagtcacatcacccatcagcacatggaaggcccctggtatggacactgaaaggaagggctggtcctgcccctttgagggggtgcaaacatgactgggacctaagagccagaggctgtgtagaggctcctgctccacctgccagtctcgtaagagatggggttgctgcagtgttggagtaggggcagagggagggagccaaggtcactccaataaaacaagctcatggca

SEQ ID NO: 309305 - DNA, 4127 bp, Homo sapiens
tggagacggctatccgcgcgggagtgcgccacgcggggccggagcgcctattagccgccaggacctcggagcgccccgaccacccctgagcccctctggcttcggagccccccagcaccccttcccgggtcccctcgcccaccctaatccactctccctccctttcccggattccctcgctcaccccatcctctctcccgccccttcctggattccctcacccgtctcgatcccctctccgccctttcccagagacccagagcccctgaccccccgcgccctccccggagccccccgcgcgtgccgcggccatggcggccgtgcgcggggcgcccctgctcagctgcctcctggcgttgctggccctgtgccctggagggcgcccgcagacggtgctgaccgacgacgagatcgaggagttcctcgagggcttcctgtcagagctagaacctgagccccgggaggacgacgtggaggccccgccgcctcccgagcccaccccgcgggtccgaaaagcccaggcggggggcaagccagggaagcggccagggacggccgcagaagtgcctccggaaaagaccaaagacaaagggaagaaaggcaagaaagacaaaggccccaaggtgcccaaggagtccttggaggggtcccccaggccgcccaagaaggggaaggagaagccacccaaggccaccaagaagcccaaggagaagccacctaaggccaccaagaagcccaaggagaagccacccaaggccaccaagaagcccaaagagaagccacccaaggccaccaagaagcccccgtcagggaagaggccccccattctggctccctcagaaaccctggagtggccactgcccccaccccccagccctggccccgaggagctaccccaggagggaggggcgcccctctcaaataactggcagaatccaggagaggagacccatgtggaggcacgggagcaccagcctgagccggaggaggagaccgagcaacccacactggactacaatgaccagatcgagagggaggactatgaggactttgagtacattcggcgccagaagcaacccaggccacccccaagcagaaggaggaggcccgagcgggtctggccagagccccctgaggagaaggccccggccccagccccggaggagaggattgagcctcctgtgaagcctctgctgcccccgctgccccctgactatggtgatggttacgtgatccccaactacgatgacatggactattactttgggcctcctccgccccagaagcccgatgctgagcgccagacggacgaagagaaggaggagctgaagaaacccaaaaaggaggacagcagccccaaggaggagaccgacaagtgggcagtggagaagggcaaggaccacaaagagccccgaaagggcgaggagttggaggaggagtggacgcctacggagaaagtcaagtgtccccccattgggatggagtcacaccgtattgaggacaaccagatccgagcctcctccatgctgcgccacggcctgggggcacagcgcggccggctcaacatgcagaccggtgccactgaggacgactactatgatggtgcgtggtgtgccgaggacgatgccaggacccagtggatagaggtggacaccaggaggactacccggttcacaggcgtcatcacccagggcagagactccagcatccatgacgattttgtgaccaccttcttcgtgggcttcagcaatgacagccagacatgggtgatgtacaccaacggctatgaggaaatgacctttcatgggaacgtggacaaggacacacccgtgctgagtgagctcccagagccggtggtggctcgtttcatccgcatctacccactcacctggaatggcagcctgtgcatgcgcctggaggtgctggggtgctctgtggcccctgtctacagctactacgcacagaatgaggtggtggccaccgatgacctggatttccggcaccacagctacaaggacatgcgccagctcatgaaggtggtgaacgaggagtgccccaccatcacccgcacttacagcctgggcaagagctcacgaggcctcaagatctatgccatggagatctcagacaaccctggggagcatgaactgggggagcccgagttccgctacactgctgggatccatggcaacgaggtgctgggccgagagctgttgctgctgctcatgcagtacctgtgccgagagtaccgcgatgggaacccacgtgtgcgcagcctggtgcaggacacacgcatccacctggtgccctcactgaaccctgatggctacgaggtggcagcgcagatgggctcagagtttgggaactgggcgctgggactgtggactgaggagggctttgacatctttgaagatttcccggatctcaactctgtgctctggggagctgaggagaggaaatgggtcccctaccgggtccccaacaataacttgcccatccctgaacgctacctttcgccagatgccacggtatccacggaggtccgggccatcattgcctggatggagaagaaccccttcgtgctgggagcaaatctgaacggcggcgagcggctagtatcctacccctacgatatggcccgcacgcctacccaggagcagctgctggccgcagccatggcagcagcccggggggaggatgaggacgaggtctccgaggcccaggagactccagaccacgccatcttccggtggcttgccatctccttcgcctccgcacacctcaccttgaccgagccctaccgcggaggctgccaagcccaggactacaccggcggcatgggcatcgtcaacggggccaagtggaacccccggaccgggactatcaatgacttcagttacctgcataccaactgcctggagctctccttctacctgggctgtgacaagttccctcatgagagtgagctgccccgcgagtgggagaacaacaaggaggcgctgctcaccttcatggagcaggtgcaccgcggcattaagggggtggtgacggacgagcaaggcatccccattgccaacgccaccatctctgtgagtggcattaatcacggcgtgaagacagccagtggtggtgattactggcgaatcttgaacccgggtgagtaccgcgtgacagcccacgcggagggctacaccccgagcgccaagacctgcaatgttgactatgacatcggggccactcagtgcaacttcatcctggctcgctccaactggaagcgcatccgggagatcatggccatgaacgggaaccggcctatcccacacatagacccatcgcgccctatgaccccccaacagcgacgcctgcagcagcgacgcctacaacaccgcctgcggcttcgggcacagatgcggctgcggcgcctcaacgccaccaccaccctaggcccccacactgtgcctcccacgctgccccctgcccctgccaccaccctgagcactaccatagagccctggggcctcataccgccaaccaccgctggctgggaggagtcggagactgagacctacacagaggtggtgacagagtttgggaccgaggtggagcccgagtttgggaccaaggtggagcccgagtttgagacccagttggagcctgagtttgagacccagctggaacccgagtttgaggaagaggaggaggaggagaaagaggaggagatagccactggccaggcattccccttcacaacagtagagacctacacagtgaactttggggacttctgagatcagcgtcctaccaagaccccagcccaactcaagctacagcagcagcacttcccaagcctgctgaccacagtcacatcacccatcagcacatggaaggcccctggtatggacactgaaaggaagggctggtcctgcccctttgagggggtgcaaacatgactgggacctaagagccagaggctgtgtagaggctcctgctccacctgccagtctcgtaagagatggggttgctgcagtgttggagtaggggcagagggagggagccaaggtcactccaataaaacaagctcatggcaaaaaaaaaaatgaataaaaatataataaaaaaaagggggg

SEQ ID NO: 309306 - DNA, 2673 bp, Homo sapiens
tactgctacctagtggggtactgctacctagtggacggagaaagtcaagtgtccccccattgggatggagtcacaccgtattgaggacaaccagatccgagcctcctccatgctgcgccacggcctgggggcacagcgcggccggctcaacatgcagaccggtgccactgaggacgactactatgatggtgcgtggtgtgccgaggacgatgccaggacccagtggatagaggtggacaccaggaggactacccggttcacaggcgtcatcacccagggcagagactccagcatccatgacgattttgtgaccaccttcttcgtgggcttcagcaatgacagccagacatgggtgatgtacaccaacggctatgaggaaatgacctttcatgggaacgtggacaaggacacacccgtgctgagtgagctcccagagccggtggtggctcgtttcatccgcatctacccactcacctggaatggcagcctgtgcatgcgcctggaggtgctggggtgctctgtggcccctgtctacagctactacgcacagaatgaggtggtggccaccgatgacctggatttccggcaccacagctacaaggacatgcgccagctcatgaaggtggtgaacgaggagtgccccaccatcacccgcacttacagcctgggcaagagctcacgaggcctcaagatctatgccatggagatctcagacaaccctggggagcatgaactgggggagcccgagttccgctacactgctgggatccatggcaacgaggtgctgggccgagagctgttgctgctgctcatgcagtacctgtgccgagagtaccgcgatgggaacccacgtgtgcgcagcctggtgcaggacacacgcatccacctggtgccctcactgaaccctgatggctacgaggtggcagcgcagatgggctcagagtttgggaactgggcgctgggactgtggactgaggagggctttgacatctttgaagatttcccggatctcaactctgtgctctggggagctgaggagaggaaatgggtcccctaccgggtccccaacaataacttgcccatccctgaacgctacctttcgccagatgccacggtatccacggaggtccgggccatcattgcctggatggagaagaaccccttcgtgctgggagcaaatctgaacggcggcgagcggctagtatcctacccctacgatatggcccgcacgcctacccaggagcagctgctggccgcagccatggcagcagcccggggggaggatgaggacgaggtctccgaggcccaggagactccagaccacgccatcttccggtggcttgccatctccttcgcctccgcacacctcaccttgaccgagccctaccgcggaggctgccaagcccaggactacaccggcggcatgggcatcgtcaacggggccaagtggaacccccggaccgggactatcaatgacttcagttacctgcataccaactgcctggagctctccttctacctgggctgtgacaagttccctcatgagagtgagctgccccgcgagtgggagaacaacaaggaggcgctgctcaccttcatggagcaggtgcaccgcggcattaagggggtggtgacggacgagcaaggcatccccattgccaacgccaccatctctgtgagtggcattaatcacggcgtgaagacagccagtggtggtgattactggcgaatcttgaacccgggtgagtaccgcgtgacagcccacgcggagggctacaccccgagcgccaagacctgcaatgttgactatgacatcggggccactcagtgcaacttcatcctggctcgctccaactggaagcgcatccgggagatcatggccatgaacgggaaccggcctatcccacacatagacccatcgcgccctatgaccccccaacagcgacgcctgcagcagcgacgcctacaacaccgcctgcggcttcgggcacagatgcggctgcggcgcctcaacgccaccaccaccctaggcccccacactgtgcctcccacgctgccccctgcccctgccaccaccctgagcactaccatagagccctggggcctcataccgccaaccaccgctggctgggaggagtcggagactgagacctacacagaggtggtgacagagtttgggaccgaggtggagcccgagtttgggaccaaggtggagcccgagtttgagacccagttggagcctgagtttgagacccagctggaacccgagtttgaggaagaggaggaggaggagaaagaggaggagatagccactggccaggcattccccttcacaacagtagagacctacacagtgaactttggggacttctgagatcagcgtcctaccaagaccccagcccaactcaagctacagcagcagcacttcccaagcctgctgaccacagtcacatcacccatcagcacatggaaggcccctggtatggacactgaaaggaagggctggtcctgcccctttgagggggtgcaaacatgactgggacctaagagccagaggctgtgtagaggctcctgctccacctgccagtctcgtaagagatggggttgctgcagtgttggagtaggggcagagggagggagccaaggtcactccaataaaacaagctcatggca

SEQ ID NO: 309307 - DNA, 2658 bp, Homo sapiens
cggacacacgcacatcatatagtcgtcctcagagtgtccccccattgggatggagtcacaccgtattgaggacaaccagatccgagcctcctccatgctgcgccacggcctgggggcacagcgcggccggctcaacatgcagaccggtgccactgaggacgactactatgatggtgcgtggtgtgccgaggacgatgccaggacccagtggatagaggtggacaccaggaggactacccggttcacaggcgtcatcacccagggcagagactccagcatccatgacgattttgtgaccaccttcttcgtgggcttcagcaatgacagccagacatgggtgatgtacaccaacggctatgaggaaatgacctttcatgggaacgtggacaaggacacacccgtgctgagtgagctcccagagccggtggtggctcgtttcatccgcatctacccactcacctggaatggcagcctgtgcatgcgcctggaggtgctggggtgctctgtggcccctgtctacagctactacgcacagaatgaggtggtggccaccgatgacctggatttccggcaccacagctacaaggacatgcgccagctcatgaaggtggtgaacgaggagtgccccaccatcacccgcacttacagcctgggcaagagctcacgaggcctcaagatctatgccatggagatctcagacaaccctggggagcatgaactgggggagcccgagttccgctacactgctgggatccatggcaacgaggtgctgggccgagagctgttgctgctgctcatgcagtacctgtgccgagagtaccgcgatgggaacccacgtgtgcgcagcctggtgcaggacacacgcatccacctggtgccctcactgaaccctgatggctacgaggtggcagcgcagatgggctcagagtttgggaactgggcgctgggactgtggactgaggagggctttgacatctttgaagatttcccggatctcaactctgtgctctggggagctgaggagaggaaatgggtcccctaccgggtccccaacaataacttgcccatccctgaacgctacctttcgccagatgccacggtatccacggaggtccgggccatcattgcctggatggagaagaaccccttcgtgctgggagcaaatctgaacggcggcgagcggctagtatcctacccctacgatatggcccgcacgcctacccaggagcagctgctggccgcagccatggcagcagcccggggggaggatgaggacgaggtctccgaggcccaggagactccagaccacgccatcttccggtggcttgccatctccttcgcctccgcacacctcaccttgaccgagccctaccgcggaggctgccaagcccaggactacaccggcggcatgggcatcgtcaacggggccaagtggaacccccggaccgggactatcaatgacttcagttacctgcataccaactgcctggagctctccttctacctgggctgtgacaagttccctcatgagagtgagctgccccgcgagtgggagaacaacaaggaggcgctgctcaccttcatggagcaggtgcaccgcggcattaagggggtggtgacggacgagcaaggcatccccattgccaacgccaccatctctgtgagtggcattaatcacggcgtgaagacagccagtggtggtgattactggcgaatcttgaacccgggtgagtaccgcgtgacagcccacgcggagggctacaccccgagcgccaagacctgcaatgttgactatgacatcggggccactcagtgcaacttcatcctggctcgctccaactggaagcgcatccgggagatcatggccatgaacgggaaccggcctatcccacacatagacccatcgcgccctatgaccccccaacagcgacgcctgcagcagcgacgcctacaacaccgcctgcggcttcgggcacagatgcggctgcggcgcctcaacgccaccaccaccctaggcccccacactgtgcctcccacgctgccccctgcccctgccaccaccctgagcactaccatagagccctggggcctcataccgccaaccaccgctggctgggaggagtcggagactgagacctacacagaggtggtgacagagtttgggaccgaggtggagcccgagtttgggaccaaggtggagcccgagtttgagacccagttggagcctgagtttgagacccagctggaacccgagtttgaggaagaggaggaggaggagaaagaggaggagatagccactggccaggcattccccttcacaacagtagagacctacacagtgaactttggggacttctgagatcagcgtcctaccaagaccccagcccaactcaagctacagcagcagcacttcccaagcctgctgaccacagtcacatcacccatcagcacatggaaggcccctggtatggacactgaaaggaagggctggtcctgcccctttgagggggtgcaaacatgactgggacctaagagccagaggctgtgtagaggctcctgctccacctgccagtctcgtaagagatggggttgctgcagtgttggagtaggggcagagggagggagccaaggtcactccaataaaacaagctcatggca

SEQ ID NO: 309308 - DNA, 2516 bp, Homo sapiens
gggaagacccttgctctgaccactgtccactccacagtgacgattttgtgaccaccttcttcgtgggcttcagcaatgacagccagacatgggtgatgtacaccaacggctatgaggaaatggtgggcaccatgcccaggctcttggctctgctcccattgtctgggcgaggggtgggctctcagaggggctggcagtactgctctgaggcctgcctctccccagacctttcatgggaacgtggacaaggacacacccgtgctgagtgagctcccagagccggtggtggctcgtttcatccgcatctacccactcacctggaatggcagcctgtgcatgcgcctggaggtgctggggtgctctgtggcccctgtctacagctactacgcacagaatgaggtggtggccaccgatgacctggatttccggcaccacagctacaaggacatgcgccagctcatgaaggtggtgaacgaggagtgccccaccatcacccgcacttacagcctgggcaagagctcacgaggcctcaagatctatgccatggagatctcagacaaccctggggagcatgaactgggggagcccgagttccgctacactgctgggatccatggcaacgaggtgctgggccgagagctgttgctgctgctcatgcagtacctgtgccgagagtaccgcgatgggaacccacgtgtgcgcagcctggtgcaggacacacgcatccacctggtgccctcactgaaccctgatggctacgaggtggcagcgcagatgggctcagagtttgggaactgggcgctgggactgtggactgaggagggctttgacatctttgaagatttcccggatctcaactctgtgctctggggagctgaggagaggaaatgggtcccctaccgggtccccaacaataacttgcccatccctgaacgctacctttcgccagatgccacggtatccacggaggtccgggccatcattgcctggatggagaagaaccccttcgtgctgggagcaaatctgaacggcggcgagcggctagtatcctacccctacgatatggcccgcacgcctacccaggagcagctgctggccgcagccatggcagcagcccggggggaggatgaggacgaggtctccgaggcccaggagactccagaccacgccatcttccggtggcttgccatctccttcgcctccgcacacctcaccttgaccgagccctaccgcggaggctgccaagcccaggactacaccggcggcatgggcatcgtcaacggggccaagtggaacccccggaccgggactatcaatgacttcagttacctgcataccaactgcctggagctctccttctacctgggctgtgacaagttccctcatgagagtgagctgccccgcgagtgggagaacaacaaggaggcgctgctcaccttcatggagcaggtgcaccgcggcattaagggggtggtgacggacgagcaaggcatccccattgccaacgccaccatctctgtgagtggcattaatcacggcgtgaagacagccagtggtggtgattactggcgaatcttgaacccgggtgagtaccgcgtgacagcccacgcggagggctacaccccgagcgccaagacctgcaatgttgactatgacatcggggccactcagtgcaacttcatcctggctcgctccaactggaagcgcatccgggagatcatggccatgaacgggaaccggcctatcccacacatagacccatcgcgccctatgaccccccaacagcgacgcctgcagcagcgacgcctacaacaccgcctgcggcttcgggcacagatgcggctgcggcgcctcaacgccaccaccaccctaggcccccacactgtgcctcccacgctgccccctgcccctgccaccaccctgagcactaccatagagccctggggcctcataccgccaaccaccgctggctgggaggagtcggagactgagacctacacagaggtggtgacagagtttgggaccgaggtggagcccgagtttgggaccaaggtggagcccgagtttgagacccagttggagcctgagtttgagacccagctggaacccgagtttgaggaagaggaggaggaggagaaagaggaggagatagccactggccaggcattccccttcacaacagtagagacctacacagtgaactttggggacttctgagatcagcgtcctaccaagaccccagcccaactcaagctacagcagcagcacttcccaagcctgctgaccacagtcacatcacccatcagcacatggaaggcccctggtatggacactgaaaggaagggctggtcctgcccctttgagggggtgcaaacatgactgggacctaagagccagaggctgtgtagaggctcctgctccacctgccagtctcgtaagagatggggttgctgcagtgttggagtaggggcagagggagggagccaaggtcactccaataaaacaagctcatggca

SEQ ID NO: 309309 - DNA, 1538 bp, Homo sapiens
acgacatctagaggatacccgcacgaggcagaggtgggagcaaatctgaacggcggcgagcggctagtatcctacccctacgatatggcccgcacgcctacccaggagcagctgctggccgcagccatggcagcagcccggggggaggatgaggacgaggtctccgaggcccaggagactccagaccacgccatcttccggtggcttgccatctccttcgcctccgcacacctcaccttgaccgagccctaccgcggaggctgccaagcccaggactacaccggcggcatgggcatcgtcaacggggccaagtggaacccccggaccgggactatcaatgacttcagttacctgcataccaactgcctggagctctccttctacctgggctgtgacaagttccctcatgagagtgagctgccccgcgagtgggagaacaacaaggaggcgctgctcaccttcatggagcaggtgcaccgcggcattaagggggtggtgacggacgagcaaggcatccccattgccaacgccaccatctctgtgagtggcattaatcacggcgtgaagacagccagtggtggtgattactggcgaatcttgaacccgggtgagtaccgcgtgacagcccacgcggagggctacaccccgagcgccaagacctgcaatgttgactatgacatcggggccactcagtgcaacttcatcctggctcgctccaactggaagcgcatccgggagatcatggccatgaacgggaaccggcctatcccacacatagacccatcgcgccctatgaccccccaacagcgacgcctgcagcagcgacgcctacaacaccgcctgcggcttcgggcacagatgcggctgcggcgcctcaacgccaccaccaccctaggcccccacactgtgcctcccacgctgccccctgcccctgccaccaccctgagcactaccatagagccctggggcctcataccgccaaccaccgctggctgggaggagtcggagactgagacctacacagaggtggtgacagagtttgggaccgaggtggagcccgagtttgggaccaaggtggagcccgagtttgagacccagttggagcctgagtttgagacccagctggaacccgagtttgaggaagaggaggaggaggagaaagaggaggagatagccactggccaggcattccccttcacaacagtagagacctacacagtgaactttggggacttctgagatcagcgtcctaccaagaccccagcccaactcaagctacagcagcagcacttcccaagcctgctgaccacagtcacatcacccatcagcacatggaaggcccctggtatggacactgaaaggaagggctggtcctgcccctttgagggggtgcaaacatgactgggacctaagagccagaggctgtgtagaggctcctgctccacctgccagtctcgtaagagatggggttgctgcagtgttggagtaggggcagagggagggagccaaggtcactccaataaaacaagctcatggca

SEQ ID NO: 309310 - DNA, 4102 bp, Homo sapiens
  misc_feature (3943)..(3943): n is a, c, g, or t
  misc_feature (3977)..(3977): n is a, c, g, or t
  misc_feature (3987)..(3988): n is a, c, g, or t
  misc_feature (4018)..(4018): n is a, c, g, or t
  misc_feature (4032)..(4032): n is a, c, g, or t
  misc_feature (4034)..(4034): n is a, c, g, or t
  misc_feature (4037)..(4037): n is a, c, g, or t
  misc_feature (4039)..(4039): n is a, c, g, or t
  misc_feature (4041)..(4041): n is a, c, g, or t
  misc_feature (4102)..(4102): n is a, c, g, or t
tggagacggctatccgcgcgggagtgcgccacgcggggccggagcgcctattagccgccaggacctcggagcgccccgaccacccctgagcccctctggcttcggagccccccagcaccccttcccgggtcccctcgcccaccctaatccactctccctccctttcccggattccctcgctcaccccatcctctctcccgccccttcctggattccctcacccgtctcgatcccctctccgccctttcccagagacccagagcccctgaccccccgcgccctccccggagccccccgcgcgtgccgcggccatggcggccgtgcgcggggcgcccctgctcagctgcctcctggcgttgctggccctgtgccctggagggcgcccgcagacggtgctgaccgacgacgagatcgaggagttcctcgagggcttcctgtcagagctagaacctgagccccgggaggacgacgtggaggccccgccgcctcccgagcccaccccgcgggtccgaaaagcccaggcggggggcaagccagggaagcggccagggacggccgcagaagtgcctccggaaaagaccaaagacaaagggaagaaaggcaagaaagacaaaggccccaaggtgcccaaggagtccttggaggggtcccccaggccgcccaagaaggggaaggagaagccacccaaggccaccaagaagcccaaggagaagccacctaaggccaccaagaagcccaaggagaagccacccaaggccaccaagaagcccaaagagaagccacccaaggccaccaagaagcccccgtcagggaagaggccccccattctggctccctcagaaaccctggagtggccactgcccccaccccccagccctggccccgaggagctaccccaggagggaggggcgcccctctcaaataactggcagaatccaggagaggagacccatgtggaggcacgggagcaccagcctgagccggaggaggagaccgagcaacccacactggactacaatgaccagatcgagagggaggactatgaggactttgagtacattcggcgccagaagcaacccaggccacccccaagcagaaggaggaggcccgagcgggtctggccagagccccctgaggagaaggccccggccccagccccggaggagaggattgagcctcctgtgaagcctctgctgcccccgctgccccctgactatggtgatggttacgtgatccccaactacgatgacatggactattactttgggcctcctccgccccagaagcccgatgctgagcgccagacggacgaagagaaggaggagctgaagaaacccaaaaaggaggacagcagccccaaggaggagaccgacaagtgggcagtggagaagggcaaggaccacaaagagccccgaaagggcgaggagttggaggaggagtggacgcctacggagaaagtcaagtgtccccccattgggatggagtcacaccgtattgaggacaaccagatccgagcctcctccatgctgcgccacggcctgggggcacagcgcggccggctcaacatgcagaccggtgccactgaggacgactactatgatggtgcgtggtgtgccgaggacgatgccaggacccagtggatagaggtggacaccaggaggactacccggttcacaggcgtcatcacccagggcagagactccagcatccatgacgattttgtgaccaccttcttcgtgggcttcagcaatgacagccagacatgggtgatgtacaccaacggctatgaggaaatgacctttcatgggaacgtggacaaggacacacccgtgctgagtgagctcccagagccggtggtggctcgtttcatccgcatctacccactcacctggaatggcagcctgtgcatgcgcctggaggtgctggggtgctctgtggcccctgtctacagctactacgcacagaatgaggtggtggccaccgatgacctggatttccggcaccacagctacaaggacatgcgccagctcatgaaggtggtgaacgaggagtgccccaccatcacccgcacttacagcctgggcaagagctcacgaggcctcaagatctatgccatggagatctcagacaaccctggggagcatgaactgggggagcccgagttccgctacactgctgggatccatggcaacgaggtgctgggccgagagctgttgctgctgctcatgcagtacctgtgccgagagtaccgcgatgggaacccacgtgtgcgcagcctggtgcaggacacacgcatccacctggtgccctcactgaaccctgatggctacgaggtggcagcgcagatgggctcagagtttgggaactgggcgctgggactgtggactgaggagggctttgacatctttgaagatttcccggatctcaactctgtgctctggggagctgaggagaggaaatgggtcccctaccgggtccccaacaataacttgcccatccctgaacgctacctttcgccagatgccacggtatccacggaggtccgggccatcattgcctggatggagaagaaccccttcgtgctgggagcaaatctgaacggcggcgagcggctagtatcctacccctacgatatggcccgcacgcctacccaggagcagctgctggccgcagccatggcagcagcccggggggaggatgaggacgaggtctccgaggcccaggagactccagaccacgccatcttccggtggcttgccatctccttcgcctccgcacacctcaccttgaccgagccctaccgcggaggctgccaagcccaggactacaccggcggcatgggcatcgtcaacggggccaagtggaacccccggaccgggactatcaatgacttcagttacctgcataccaactgcctggagctctccttctacctgggctgtgacaagttccctcatgagagtgagctgccccgcgagtgggagaacaacaaggaggcgctgctcaccttcatggagcaggtgcaccgcggcattaagggggtggtgacggacgagcaaggcatccccattgccaacgccaccatctctgtgagtggcattaatcacggcgtgaagacagccagtggtggtgattactggcgaatcttgaacccgggtgagtaccgcgtgacagcccacgcggagggctacaccccgagcgccaagacctgcaatgttgactatgacatcggggccactcagtgcaacttcatcctggctcgctccaactggaagcgcatccgggagatcatggccatgaacgggaaccggcctatcccacacatagacccatcgcgccctatgaccccccaacagcgacgcctgcagcagcgacgcctacaacaccgcctgcggcttcgggcacagatgcggctgcggcgcctcaacgccaccaccaccctaggcccccacactgtgcctcccacgctgccccctgcccctgccaccaccctgagcactaccatagagccctggggcctcataccgccaaccaccgctggctgggaggagtcggagactgagacctacacagaggtggtgacagagtttgggaccgaggtggagcccgagtttgggaccaaggtggagcccgagtttgagacccagttggagcctgagtttgagacccagctggaacccgagtttgaggaagaggaggaggaggagaaagaggaggagatagccactggccaggcattccccttcacaacagtagagacctacacagtgaactttggggacttctgagatcagcgtcctaccaagaccccagcccaactcaagctacagcagcagcacttcccaagcctgctgaccacagtcacatcacccatcagcacatggaaggcccctggtatggacactgaaaggaagggctggtcctgcccctttgaggcgcgcgntagacacacacacacatagaaacatagagcgcancacactcacnnagacagagcacacgcacgcgacatagatanatacagacagagcntncancntnacatacacacacacatagacacacagatacatacagatacacagacagacatagagagagn

SEQ ID NO: 309311 - DNA, 1251 bp, Homo sapiens
  misc_feature (22)..(22): n is a, c, g, or t
  misc_feature (29)..(29): n is a, c, g, or t
  misc_feature (36)..(37): n is a, c, g, or t
tcgctgggcactcgtcacggcncaagtgnaaccccnngacgggactatcaatgacttcagttacctgcataccaactgcctggagctctccttctacctgggctgtgacaagttccctcatgagagtgagctgccccgcgagtgggagaacaacaaggaggcgctgctcaccttcatggagcaggtgcaccgcggcattaagggggtggtgacggacgagcaaggcatccccattgccaacgccaccatctctgtgagtggcattaatcacggcgtgaagacagccagtggtggtgattactggcgaatcttgaacccgggtgagtaccgcgtgacagcccacgcggagggctacaccccgagcgccaagacctgcaatgttgactatgacatcggggccactcagtgcaacttcatcctggctcgctccaactggaagcgcatccgggagatcatggccatgaacgggaaccggcctatcccacacatagacccatcgcgccctatgaccccccaacagcgacgcctgcagcagcgacgcctacaacaccgcctgcggcttcgggcacagatgcggctgcggcgcctcaacgccaccaccaccctaggcccccacactgtgcctcccacgctgccccctgcccctgccaccaccctgagcactaccatagagccctggggcctcataccgccaaccaccgctggctgggaggagtcggagactgagacctacacagaggtggtgacagagtttgggaccgaggtggagcccgagtttgggaccaaggtggagcccgagtttgagacccagttggagcctgagtttgagacccagctggaacccgagtttgaggaagaggaggaggaggagaaagaggaggagatagccactggccaggcattccccttcacaacagtagagacctacacagtgaactttggggacttctgagatcagcgtcctaccaagaccccagcccaactcaagctacagcagcagcacttcccaagcctgctgaccacagtcacatcacccatcagcacatggaaggcccctggtatggacactgaaaggaagggctggtcctgcccctttgagggggtgcaaacatgactgggacctaagagccagaggctgtgtagaggctcctgctccacctgccagtctcgtaagagatggggttgctgcagtgttggagtaggggcagagggagggagccaaggtcactccaataaaacaagctcatggca

SEQ ID NO: 309312 - DNA, 1226 bp, Homo sapiens
ggcagtgccggacaggatgtgcagacacaactacgagctggacgaggccgtgaccctgcagcgccgagtccagcctaaggtgaacgtttccccctccaagaaggggccccagcagcaccaccaggactcctggtggtgctgctcaccttcatggagcaggtgcaccgcggcattaagggggtggtgacggacgagcaaggcatccccattgccaacgccaccatctctgtgagtggcattaatcacggcgtgaagacagccagtggtggtgattactggcgaatcttgaacccgggtgagtaccgcgtgacagcccacgcggagggctacaccccgagcgccaagacctgcaatgttgactatgacatcggggccactcagtgcaacttcatcctggctcgctccaactggaagcgcatccgggagatcatggccatgaacgggaaccggcctatcccacacatagacccatcgcgccctatgaccccccaacagcgacgcctgcagcagcgacgcctacaacaccgcctgcggcttcgggcacagatgcggctgcggcgcctcaacgccaccaccaccctaggcccccacactgtgcctcccacgctgccccctgcccctgccaccaccctgagcactaccatagagccctggggcctcataccgccaaccaccgctggctgggaggagtcggagactgagacctacacagaggtggtgacagagtttgggaccgaggtggagcccgagtttgggaccaaggtggagcccgagtttgagacccagttggagcctgagtttgagacccagctggaacccgagtttgaggaagaggaggaggaggagaaagaggaggagatagccactggccaggcattccccttcacaacagtagagacctacacagtgaactttggggacttctgagatcagcgtcctaccaagaccccagcccaactcaagctacagcagcagcacttcccaagcctgctgaccacagtcacatcacccatcagcacatggaaggcccctggtatggacactgaaaggaagggctggtcctgcccctttgagggggtgcaaacatgactgggacctaagagccagaggctgtgtagaggctcctgctccacctgccagtctcgtaagagatggggttgctgcagtgttggagtaggggcagagggagggagccaaggtcactccaataaaacaagctcatggca

SEQ ID NO: 309313 - DNA, 2656 bp, Homo sapiens
tggagacggctatccgcgcgggagtgcgccacgcggggccggagcgcctattagccgccaggacctcggagcgccccgaccacccctgagcccctctggcttcggagccccccagcaccccttcccgggtcccctcgcccaccctaatccactctccctccctttcccggattccctcgctcaccccatcctctctcccgccccttcctggattccctcacccgtctcgatcccctctccgccctttcccagagacccagagcccctgaccccccgcgccctccccggagccccccgcgcgtgccgcggccatggcggccgtgcgcggggcgcccctgctcagctgcctcctggcgttgctggccctgtgccctggagggcgcccgcagacggtgctgaccgacgacgagatcgaggagttcctcgagggcttcctgtcagagctagaacctgagccccgggaggacgacgtggaggccccgccgcctcccgagcccaccccgcgggtccgaaaagcccaggcggggggcaagccagggaagcggccagggacggccgcagaagtgcctccggaaaagaccaaagacaaagggaagaaaggcaagaaagacaaaggccccaaggtgcccaaggagtccttggaggggtcccccaggccgcccaagaaggggaaggagaagccacccaaggccaccaagaagcccaaggagaagccacctaaggccaccaagaagcccaaggagaagccacccaaggccaccaagaagcccaaagagaagccacccaaggccaccaagaagcccccgtcagggaagaggccccccattctggctccctcagaaaccctggagtggccactgcccccaccccccagccctggccccgaggagctaccccaggagggaggggcgcccctctcaaataactggcagaatccaggagaggagacccatgtggaggcacgggagcaccagcctgagccggaggaggagaccgagcaacccacactggactacaatgaccagatcgagagggaggactatgaggactttgagtacattcggcgccagaagcaacccaggccacccccaagcagaaggaggaggcccgagcgggtctggccagagccccctgaggagaaggccccggccccagccccggaggagaggattgagcctcctgtgaagcctctgctgcccccgctgccccctgactatggtgatggttacgtgatccccaactacgatgacatggactattactttgggcctcctccgccccagaagcccgatgctgagcgccagacggacgaagagaaggaggagctgaagaaacccaaaaaggaggacagcagccccaaggaggagaccgacaagtgggcagtggagaagggcaaggaccacaaagagccccgaaagggcgaggagttggaggaggagtggacgcctacggagaaagtcaagtgtccccccattgggatggagtcacaccgtattgaggacaaccagatccgagcctcctccatgctgcgccacggcctgggggcacagcgcggccggctcaacatgcagaccggtgccactgaggacgactactatgatggtgcgtggtgtgccgaggacgatgccaggacccagtggatagaggtggacaccaggaggactacccggttcacaggcgtcatcacccagggcagagactccagcatccatgacgattttgtgaccaccttcttcgtgggcttcagcaatgacagccagacatgggtgatgtacaccaacggctatgaggaaatgacctttcatgggaacgtggacaaggacacacccgtgctgagtgagctcccagagccggtggtggctcgtttcatccgcatctacccactcacctggaatggcagcctgtgcatgcgcctggaggtgctggggtgctctgtggcccctgtctacagctactacgcacagaatgaggtggtggccaccgatgacctggatttccggcaccacagctacaaggacatgcgccagctcatgaaggtggtgaacgaggagtgccccaccctgagcactaccatagagccctggggcctcataccgccaaccaccgctggctgggaggagtcggagactgagacctacacagaggtggtgacagagtttgggaccgaggtggagcccgagtttgggaccaaggtggagcccgagtttgagacccagttggagcctgagtttgagacccagctggaacccgagtttgaggaagaggaggaggaggagaaagaggaggagatagccactggccaggcattccccttcacaacagtagagacctacacagtgaactttggggacttctgagatcagcgtcctaccaagaccccagcccaactcaagctacagcagcagcacttcccaagcctgctgaccacagtcacatcacccatcagcacatggaaggcccctggtatggacactgaaaggaagggctggtcctgcccctttgagggggtgcaaacatgactgggacctaagagccagaggctgtgtagaggctcctgctccacctgccagtctcgtaagagatggggttgctgcagtgttggagtaggggcagagggagggagccaaggtcactccaataaaacaagctcatggca

SEQ ID NO: 309314 - DNA, 465 bp, Homo sapiens
tgatgatagcaagaggacaggagtattggagcctgagtttgagacccagctggaacccgagtttgaggaagaggaggaggaggagaaagaggaggagatagccactggccaggcattccccttcacaacagtagagacctacacagtgaactttggggacttctgagatcagcgtcctaccaagaccccagcccaactcaagctacagcagcagcacttcccaagcctgctgaccacagtcacatcacccatcagcacatggaaggcccctggtatggacactgaaaggaagggctggtcctgcccctttgagggggtgcaaacatgactgggacctaagagccagaggctgtgtagaggctcctgctccacctgccagtctcgtaagagatggggttgctgcagtgttggagtaggggcagagggagggagccaaggtcactccaataaaacaagctcatggca

SEQ ID NO: 309315 - DNA, 511 bp, Homo sapiens
aaagctggtggcctatgtgatttgctgggttaccgagctcgatgttcgtcatcagtgggacgacgcgctgtgccgtgctgtgatagatagacatactggaacccgagtttgaggaagaggaggaggaggagaaagaggaggagatagccactggccaggcattccccttcacaacagtagagacctacacagtgaactttggggacttctgagatcagcgtcctaccaagaccccagcccaactcaagctacagcagcagcacttcccaagcctgctgaccacagtcacatcacccatcagcacatggaaggcccctggtatggacactgaaaggaagggctggtcctgcccctttgagggggtgcaaacatgactgggacctaagagccagaggctgtgtagaggctcctgctccacctgccagtctcgtaagagatggggttgctgcagtgttggagtaggggcagagggagggagccaaggtcactccaataaaacaagctcatggca

SEQ ID NO: 309316 - DNA, 2228 bp, Homo sapiens
tggagacggctatccgcgcgggagtgcgccacgcggggccggagcgcctattagccgccaggacctcggagcgccccgaccacccctgagcccctctggcttcggagccccccagcaccccttcccgggtcccctcgcccaccctaatccactctccctccctttcccggattccctcgctcaccccatcctctctcccgccccttcctggattccctcacccgtctcgatcccctctccgccctttcccagagacccagagcccctgaccccccgcgccctccccggagccccccgcgcgtgccgcggccatggcggccgtgcgcggggcgcccctgctcagctgcctcctggcgttgctggccctgtgccctggagggcgcccgcagacggtgctgaccgacgacgagatcgaggagttcctcgagggcttcctgtcagagctagaacctgagccccgggaggacgacgtggaggccccgccgcctcccgagcccaccccgcgggtccgaaaagcccaggcggggggcaagccagggaagcggccagggacggccgcagaagtgcctccggaaaagaccaaagacaaagggaagaaaggcaagaaagacaaaggccccaaggtgcccaaggagtccttggaggggtcccccaggccgcccaagaaggggaaggagaagccacccaaggccaccaagaagcccaaggagaagccacctaaggccaccaagaagcccaaggagaagccacccaaggccaccaagaagcccaaagagaagccacccaaggccaccaagaagcccccgtcagggaagaggccccccattctggctccctcagaaaccctggagtggccactgcccccaccccccagccctggccccgaggagctaccccaggagggaggggcgcccctctcaaataactggcagaatccaggagaggagacccatgtggaggcacgggagcaccagcctgagccggaggaggagaccgagcaacccacactggactacaatgaccagatcgagagggaggactatgaggactttgagtacattcggcgccagaagcaacccaggccacccccaagcagaaggaggaggcccgagcgggtctggccagagccccctgaggagaaggccccggccccagccccggaggagaggattgagcctcctgtgaagcctctgctgcccccgctgccccctgactatggtgatggttacgtgatccccaactacgatgacatggactattactttgggcctcctccgccccagaagcccgatgctgagcgccagacggacgaagagaaggaggagctgaagaaacccaaaaaggaggacagcagccccaaggaggagaccgacaagtgggcagtggagaagggcaaggaccacaaagagccccgaaagggcgaggagttggaggaggagtggacgcctacggagaaagtcaagtgtccccccattgggatggagtcacaccgtattgaggacaaccagatccgagcctcctccatgctgcgccacggcctgggggcacagcgcggccggctcaacatgcagaccggtgccactgaggacgactactatgatggtgcgtggtgtgccgaggacgatgccaggacccagtggatagaggtggacaccaggaggactacccggttcacaggcgtcatcacccagggcagagactccagcatccatgacgattttgtgaccaccttcttcgtgggcttcagcaatgacagccagacatgggtgatgtacaccaacggctatgaggaaatgacctttcatgggaacgtggacaaggacacacccgtgctgagtgagctcccagagccggtggtggctcgtttcatccgcatctacccactcacctggaatggcagcctgtgcatgcgcctggaggtgctggggtgctctgtggcccctgtctacagctactacgcacagaatgaggtggtggccaccgatgacctggatttccggcaccacagctacaaggacatgcgccagctcatgaaggtggtgaacgaggagtgccccaccatcacccgcacttacagcctgggcaagagctcacgaggcctcaagatctatgccatggagatctcagacaaccctggggagcatgaactgggggcggccgagatatacgatacacctgcttagtatctcatttccaccgatgttctcgcctcccagttatatctgttt

SEQ ID NO: 309317 - DNA, 1965 bp, Homo sapiens
tggagacggctatccgcgcgggagtgcgccacgcggggccggagcgcctattagccgccaggacctcggagcgccccgaccacccctgagcccctctggcttcggagccccccagcaccccttcccgggtcccctcgcccaccctaatccactctccctccctttcccggattccctcgctcaccccatcctctctcccgccccttcctggattccctcacccgtctcgatcccctctccgccctttcccagagacccagagcccctgaccccccgcgccctccccggagccccccgcgcgtgccgcggccatggcggccgtgcgcggggcgcccctgctcagctgcctcctggcgttgctggccctgtgccctggagggcgcccgcagacggtgctgaccgacgacgagatcgaggagttcctcgagggcttcctgtcagagctagaacctgagccccgggaggacgacgtggaggccccgccgcctcccgagcccaccccgcgggtccgaaaagcccaggcggggggcaagccagggaagcggccagggacggccgcagaagtgcctccggaaaagaccaaagacaaagggaagaaaggcaagaaagacaaaggccccaaggtgcccaaggagtccttggaggggtcccccaggccgcccaagaaggggaaggagaagccacccaaggccaccaagaagcccaaggagaagccacctaaggccaccaagaagcccaaggagaagccacccaaggccaccaagaagcccaaagagaagccacccaaggccaccaagaagcccccgtcagggaagaggccccccattctggctccctcagaaaccctggagtggccactgcccccaccccccagccctggccccgaggagctaccccaggagggaggggcgcccctctcaaataactggcagaatccaggagaggagacccatgtggaggcacgggagcaccagcctgagccggaggaggagaccgagcaacccacactggactacaatgaccagatcgagagggaggactatgaggactttgagtacattcggcgccagaagcaacccaggccacccccaagcagaaggaggaggcccgagcgggtctggccagagccccctgaggagaaggccccggccccagccccggaggagaggattgagcctcctgtgaagcctctgctgcccccgctgccccctgactatggtgatggttacgtgatccccaactacgatgacatggactattactttgggcctcctccgccccagaagcccgatgctgagcgccagacggacgaagagaaggaggagctgaagaaacccaaaaaggaggacagcagccccaaggaggagaccgacaagtgggcagtggagaagggcaaggaccacaaagagccccgaaagggcgaggagttggaggaggagtggacgcctacggagaaagtcaagtgtccccccattgggatggagtcacaccgtattgaggacaaccagatccgagcctcctccatgctgcgccacggcctgggggcacagcgcggccggctcaacatgcagaccggtgccactgaggacgactactatgatggtgcgtggtgtgccgaggacgatgccaggacccagtggatagaggtggacaccaggaggactacccggttcacaggcgtcatcacccagggcagagactccagcatccatgacgattttgtgaccaccttcttcgtgggcttcagcaatgacagccagacatgggtgatgtacaccaacggctatgaggaaatgacctttcatgggaacgtggacaaggacacacccgtgctgagtgagctcccagagccggtggtggctcgtttcatccgcatctacccactcacctggaatggcagcctgtgcatgcgcctggaggtgctggggtgctctgtggcccgtgagtgtggagggctggcagggg

SEQ ID NO: 309318 - DNA, 3134 bp, Homo sapiens
  misc_feature (70)..(70): n is a, c, g, or t
  misc_feature (198)..(198): n is a, c, g, or t
  misc_feature (230)..(230): n is a, c, g, or t
  misc_feature (1009)..(1009): n is a, c, g, or t
  misc_feature (1630)..(1630): n is a, c, g, or t
aacaaacaggtctgttcttattaccattttccaatctgtcacttcatgtcccatgtcccacatgggcagncaacatggcctgcccatgtggcggcacctccccaggccttccacctcgtgctcctctgcagccccttgcctgtccctgccatcttgccatgcccacgcctgcattgctaagaacacagtttacagccngtgttttttgtgctgccattctgctggcatanggccaggactggaaagcttgattcagtattagaccatcatatatggacaataagtgcttaatttgttctaggcactgtgttaagggggcagaagcaaccatgagtaacatggattcaggccctgccaggttcttcttgtcctaagggaaccacagacacacagctgagtgcgattcagatcatgggcaccacaatgccctatccagaggtgggggacactcagtgctgcatctctctctgcggagtggctctgtgaccatggccaggcttcctgctgcagagcagccctgcacggcctcccccactgtccggggtctttctgtatctccacccccccattttttttttttttttttggagatggagtcacactttgtcgccaggctggagtgcagtggcgtgatctcggctcactgcagcctccacctcccaggtttcaagcaattcacctgcctcagcctcctgagtagctggaactacaggcacacaccaccatacccagctaatttttgtatttttagcagagacgggatttcaccatgttggccaggatggtctcgatctcttgacctcttgatccacctgcctcggcctcccaaagtgctgggattacaggcgtgagccaccacgcccagccatctccacccctttcttctctgctgtctgggtaactgtggactcctttccggagctccccgttctacattttcagtttcctcctgcctggttgccctcctcgttgaccttcagagtgctcagcctttcttcttctgctgaanccctttttgtggcctttgcctgtttttgcccttgtcccacagccagcctcaacggtgttcttttctctctgctcaccctccctgtttgcctacagctctgcggagctgtcctgaaaggtgaagggggcgccttcatcagagcctcaccgccccgcgccactgggctgcatctcttcggtaccctcctgcctattctgtctcccccatctgagtgcctccagctctgcacccacagccgcccccagcctgacctgctgatgccgtatgtcccagtttgaaagcttcctcgaatgcctgcagacaggagcaaaaccctggagagcctggcccccatctgtgggtccatccccccatctccacctacccttgcgtgctgctgccatgggcccatctttccccaggcttctgctctggctgtcccatctgccaggaatgccttttctctcccagggctctccacctgcccaaagtctggaacagctagccatgccaccacctcatctttcgggtggaaggaggctttctcctgtggccctcatccattttacctgccctctcccgtggtggccaccagtccctgtgttcttcccacaagcagtttgagctacctgtcctggaccngtgtggctccatgggcccctgttttgtctcctttctttcttctacgagtcagatctctaagggccagtcctccgctgctatagccagcatggggcattgtaaacagtaggcgtgtaatatatgactcttcggcagctgcaccctctccctggggacaggtttcctagtcccagagttagcctggaggtgagctgaggttaaagccaggttccctgactcccacagttcttccccttaaatgtttctagttttaggttcatcctgaactcaccagtccaaccacaaaagttttctgaggagaagcagaatttaagtctctttcaggcccatcatcaaaattcccatatgtccttgacataaggctaaatagtctatggtgtggcttgtgctaggcttttgccatcaggtacctgcagggcacacagccacctgcactcattctgagggtctcctgcagcatatcgcaggttctcagcagtacagaggcgaagtgtcccagcacagtccagcacggagtggggatgggagtctttggtggctttgttttaggatgacatgcacttacctctcctttacttccctcccaggagatggctggccgagctctcaagcagactggcagcaggagcatcgaggccgccctggagtacatcagcaagatgggctacctggacccgaggaatgagcagattgtgcgggtcattaagcagacctccccaggtgagcccaggcctgcagcatagtgggcaaagatggtttgtggcttaaggacaacaaaaccacgtgcagaggggtccaacctggcctggcctggccagagccagtctcctggcacattgcctcattcagttaacaggcaagctgagcctgccctgccctgacagagtcaggccctggcgggagcagccccaagtggtagaccgtgggacacgcctggcgcttgccccatccagccttgtctgaaattaccttagtacttcctacctaggggaaggtgtgtgcttgttttatgaaagatcaaaaaagtcagcaaagcgggcgtaaaaatggtcttttcactttctcttgggcctgtggagggatctttgacaagggtggcttctttcctcaattctaaacacacctctctcacatcgtagcttctgagagtgggggttcaatggcaggcagtgtgggcagagcgctgggcccccctcagcatcccctgtgatgggcctgaggcaccgcaccaaacccctgctttttactggctatggatgaatgttactttcccaagatggagcacatgggccctgtgattggtacctgaggcccctggggtgtgataaaggattcatggccaggcgcagtggctcaagcctgtaacccaacactgtgtggcctggttttgttttgctttgttttgttttgtgtaatcccaactctttgggaggctgaggccagaggatggaggcaggagttggagaccagcctgggcaacagagggagacctcgtctgtattta

SEQ ID NO: 309319 - DNA, 606 bp, Homo sapiens
gaaatcctaagaccttgctgtgttattgaccatcaatctcagacactgtctgggctctccggcagcgtggagagtcctggccccgcctcgagaacagaggccaaggacgggaagtgcaggggtccgtgtacttgcagttgggttctattctacccacacggtgtcttacaagttttttaaaaatgtctttccaacttttaagaaccaagagctttcacactgaaaattgggcctggagagggggcgagcgcctgtggtcccagtgtgtcaggagactgaggcaggaggatgggacgtagtgagaccctatctctaaaaagaaaaaaaaaaaggaattaagaaaattgggtttttagcattcctagaaatgtagaagccctgagctgcgtctcctgtgtgggagctggtcccactccccggccttcggagccctcggagcccggagccctcgatgcagcgctatggatgccgggagcgatctttggaaaggagtccccggctcgagcgacactgcccccctggggctctgcaggtgcatgcagtgggattgctgggctggactagagggtgagggtggcttcccccacaccccctttcctggctaat

SEQ ID NO: 309320 - DNA, 5501 bp, Homo sapiens
gtctgcgctttggaaccgcggcgtgagcgccccgggaagatggagcagtcgccgtccacgccaccgccgccgcccggggctcccccgtccctgcggggccagcagcagctccagccaccagtgcccggtctcccggcgcgagaggcccgggagccgccggccaggacgcccccgagggtgtagaccgcgcccctggagagagtgataatcttcaaaatgaagactttggaaaattttaggttctctataggaactacaaaaatggaaggaaagaacattttcaaaaggaaattattttgaaagtatgtttacaacaaactgatactattgacagtttttttttttaaataataaaacactttaagaagattgtatttatggtaaaaggaaactggactaacaatgaggccaaagacttttcctgccacgacttattctggaaatagccggcagcgactgcaagagattcgtgaggggttaaaacagccatccaagtcttcggttcaggggctacccgcaggaccaaacagtgacacttccctggatgccaaagtcctggggagcaaagatgccaccaggcagcagcagcagatgagagccaccccaaagttcggaccttatcagaaagccttgagggaaatcagatattccttgttgccttttgctaatgaatcgggcacctctgcagctgcagaagtgaaccggcaaatgctgcaggaactggtgaacgcaggatgcgaccaggagatggctggccgagctctcaagcagactggcagcaggagcatcgaggccgccctggagtacatcagcaagatgggctacctggacccgaggaatgagcagattgtgcgggtcattaagcagacctccccaggaaaggggctcatgccaaccccagtgacgcggaggcccagcttcgaaggaaccggcgattcgtttgcgtcctaccaccagctgagcggtaccccctacgagggcccaagcttcggcgctgacggccccacggcgctggaggagatgccgcggccgtacgtggactaccttttccccggagtcggcccccacgggcccggccaccagcaccagcacccacccaagggctacggtgccagcgtagaggcagcaggggcacacttcccgctgcagggcgcgcactacgggcggccgcacctgctggtgcctggggaacccctgggctacggagtgcagcgcagcccctccttccagagcaagacgccgccggagaccgggggttacgccagcctgcccacgaagggccagggaggaccgccaggcgccggcctcgctttcccaccccctgccgccgggctctacgtgccgcacccacaccacaagcaggccggtcccgcggcccaccagctgcatgtgctgggctcccgcagccaggtgttcgccagcgacagccccccgcagagcctgctcactccctcgcggaacagcctcaacgtggacctgtatgaattgagcagcacctccgtccagcagtggccggctgccaccctggcccgccgggactccctgcagaagccgggcctggaggcgccgccgcgcgcgcacgtggccttccggcctgactgcccagtgcccagcaggaccaactccttcaacagccaccagccgcggcccggtccgcctggcaaggccgagccctccctgcccgcccccaacaccgtgacggctgtcacggccgcgcacatcttgcacccggtgaagagcgtgcgtgtgctgaggccggagccgcagacggctgtggggccctcgcaccccgcctgggtgcccgcgcctgccccggcccccgcccccgcccccgccccggctgcggagggcttggacgccaaggaggagcatgccctggcgctgggcggcgcaggcgccttcccgctggacgtggagtacggaggcccagaccggaggtgcccgcctccgccctacccgaagcacctgctgctgcgcagcaagtcggagcagtacgacctggacagcctgtgcgcaggcatggagcagagcctccgtgcgggccccaacgagcccgagggcggcgacaagagccgcaaaagcgccaagggggacaaaggcggaaaggataaaaagcagattcagacctctcccgttcccgtccgcaaaaacagcagagacgaagagaagagagagtcacgcatcaagagctactcgccatacgcctttaagttcttcatggagcagcacgtggagaatgtcatcaaaacctaccagcagaaggttaaccggaggctgcagctggagcaagaaatggccaaagctggactctgtgaagctgagcaggagcagatgcggaagatcctctaccagaaagagtctaattacaacaggttaaagagggccaagatggacaagtctatgtttgtcaagatcaaaaccctggggatcggtgcctttggagaagtgtgccttgcttgtaaggtggacactcacgccctgtacgccatgaagaccctaaggaaaaaggatgtcctgaaccggaatcaggtggcccacgtcaaggccgagagggacatcctggccgaggcagacaatgagtgggtggtcaaactctactactccttccaagacaaagacagcctgtactttgtgatggactacatccctggtggggacatgatgagcctgctgatccggatggaggtcttccctgagcacctggcccggttctacatcgcagagctgactttggccattgagagtgtccacaagatgggcttcatccaccgagacatcaagcctgataacattttgatagatctggatggtcacattaaactcacagatttcggcctctgcactgggttcaggtggactcacaattccaaatattaccagaaagggagccatgtcagacaggacagcatggagcccagcgacctctgggatgatgtgtctaactgtcggtgtggggacaggctgaagaccctagagcagagggcgcggaagcagcaccagaggtgcctggcacattcactggtggggactccaaactacatcgcacccgaggtgctcctccgcaaagggtacactcaactctgtgactggtggagtgttggagtgattctcttcgagatgctggtggggcagccgccctttttggcacctactcccacagaaacccagctgaaggtgatcaactgggagaacacgctccacattccagcccaggtgaagctgagccctgaggccagggacctcatcaccaagctgtgctgctccgcagaccaccgcctggggcggaatggggccgatgacctgaaggcccaccccttcttcagcgccattgacttctccagtgacatccggaagcagccagccccctacgttcccaccatcagccaccccatggacacctcgaatttcgaccccgtagatgaagaaagcccttggaacgatgccagcgaaggtagcaccaaggcctgggacacactcacctcgcccaataacaagcatcctgagcacgcattttacgaattcaccttccgaaggttctttgatgacaatggctacccctttcgatgcccaaagccttcaggagcagaagcttcacaggctgagagctcagatttagaaagctctgatctggtggatcagactgaaggctgccagcctgtgtacgtgtagatgggggccaggcacccccaccactcgctgcctcccaggtcagggtcccggagccggtgccctcacaggccaatagggaagccgagggctgttttgttttaaattagtccgtcgattacttcacttgaaattctgctcttcaccaagaaaacccaaacaggacacttttgaaaacaggactcagcatcgctttcaataggcttttcaggaccttcactgcattaaaacaatatttttgaaaatttagtacagtttagaaagagcacttattttgtttatatccattttttcttactaaattatagggattaactttgacaaatcatgctgctgttattttctacatttgtattttatccatagcacttattcacatttaggaaaagacataaaaactgaagaacattgatgagaaatctctgtgcaataatgtaaaaaaaaaaaaagataacactctgctcaatgtcacggagaccattttatccacacaatggtttttgttttttattttttcccatgtttcaaaattgtgatataatgatataatgttaaaagctgctttttttggctttttgcatatctagtataataggaagtgtgagcaaggtgatgatgtggctgtgatttccgacgtctggtgtgtggagagtactgcatgagcagagttcttctattataaaattaccatatcttgccattcacagcaggtcctgtgaatacgtttttactgagtgtctttaaatgaggtgttctagacagtgtgctgataatgtattgtgcgggtgacctcttcgctatgattgtatctcttactgttttgttaaagaaatgcagatgtgtaactgagaagtgatttgtgtgtgtgtcttggttgtgattggattctttggggggggggaactgaaacatttgtcatatactgaacttatatacatcaaaagggattaatacagcgatgccaaaaagtttaatcacggacacacgtccgtttctgtagtccgtatgctctttcattcttggtagagctggtatgtggaatgccatacctctgaccctactacttacctttttactgacagactgcccacactgaaagcttcagtgaatgttcttagtcctgttttcttctgttactgtcaggaaactgagtgatctaatggttctctcactttttttttgttcttttagtgtactttgaagtatcaaatcttaacttggtttaaacaatacatattcctaacctttgtaaaaaagcaaagattcttcaaaatgacattgaaataaaaagtaagccatacgtattttcttagaagtatagatgtatgtgcgtgtatacacacacacacacacacagagataaacacaatattccttatttcaaattagtatgattcctatttaaagtgatttatatttgagtaaaaagttcaattcttttttgctttttaaaaaatctgatgcttcataattttcattatattattccacatatttttccttgaagttcttagcataatgtatccattacttagtatatatctaggcaacaacacttagaagtttatcagtgtttaaactaaaaaaataaagattcctgtgtactggtttacatttgtgtgagtggcatactcaagtctgctgtgcctgtcgtcgtgactgtcagtattctcgctattttatagtcgtgccatgttgttactcacagcgctctgacatactttcatgtggtaggttctttctcaggaactcagtttaactattatttattgatatatcattacctttgaaaagcttctactggcacaatttattattaaaattttgaatccaaa

SEQ ID NO: 309321 - DNA, 5723 bp, Homo sapiens
  misc_feature (5707)..(5707): n is a, c, g, or t
gtctgcgctttggaaccgcggcgtgagcgccccgggaagatggagcagtcgccgtccacgccaccgccgccgcccggggctcccccgtccctgcggggccagcagcagctccagccaccagtgcccggtctcccggcgcgagaggcccgggagccgccggccaggacgcccccgagggtgtagaccgcgcccctggagagagtgataatcttcaaaatgaagactttggaaaattttaggttctctataggaactacaaaaatggaaggaaagaacattttcaaaaggaaattattttgaaagtatgtttacaacaaactgatactattgacagtttttttttttaaataataaaacactttaagaagattgtatttatggtaaaaggaaactggactaacaatgaggccaaagacttttcctgccacgacttattctggaaatagccggcagcgactgcaagagattcgtgaggggttaaaacagccatccaagtcttcggttcaggggctacccgcaggaccaaacagtgacacttccctggatgccaaagtcctggggagcaaagatgccaccaggcagcagcagcagatgagagccaccccaaagttcggaccttatcagaaagccttgagggaaatcagatattccttgttgccttttgctaatgaatcgggcacctctgcagctgcagaagtgaaccggcaaatgctgcaggaactggtgaacgcaggatgcgaccaggagatggctggccgagctctcaagcagactggcagcaggagcatcgaggccgccctggagtacatcagcaagatgggctacctggacccgaggaatgagcagattgtgcgggtcattaagcagacctccccaggaaaggggctcatgccaaccccagtgacgcggaggcccagcttcgaaggaaccggcgattcgtttgcgtcctaccaccagctgagcggtaccccctacgagggcccaagcttcggcgctgacggccccacggcgctggaggagatgccgcggccgtacgtggactaccttttccccggagtcggcccccacgggcccggccaccagcaccagcacccacccaagggctacggtgccagcgtagaggcagcaggggcacacttcccgctgcagggcgcgcactacgggcggccgcacctgctggtgcctggggaacccctgggctacggagtgcagcgcagcccctccttccagagcaagacgccgccggagaccgggggttacgccagcctgcccacgaagggccagggaggaccgccaggcgccggcctcgctttcccaccccctgccgccgggctctacgtgccgcacccacaccacaagcaggccggtcccgcggcccaccagctgcatgtgctgggctcccgcagccaggtgttcgccagcgacagccccccgcagagcctgctcactccctcgcggaacagcctcaacgtggacctgtatgaattgagcagcacctccgtccagcagtggccggctgccaccctggcccgccgggactccctgcagaagccgggcctggaggcgccgccgcgcgcgcacgtggccttccggcctgactgcccagtgcccagcaggaccaactccttcaacagccaccagccgcggcccggtccgcctggcaaggccgagccctccctgcccgcccccaacaccgtgacggctgtcacggccgcgcacatcttgcacccggtgaagagcgtgcgtgtgctgaggccggagccgcagacggctgtggggccctcgcaccccgcctgggtgcccgcgcctgccccggcccccgcccccgcccccgccccggctgcggagggcttggacgccaaggaggagcatgccctggcgctgggcggcgcaggcgccttcccgctggacgtggagtacggaggcccagaccggaggtgcccgcctccgccctacccgaagcacctgctgctgcgcagcaagtcggagcagtacgacctggacagcctgtgcgcaggcatggagcagagcctccgtgcgggccccaacgagcccgagggcggcgacaagagccgcaaaagcgccaagggggacaaaggcggaaaggataaaaagcagattcagacctctcccgttcccgtccgcaaaaacagcagagacgaagagaagagagagtcacgcatcaagagctactcgccatacgcctttaagttcttcatggagcagcacgtggagaatgtcatcaaaacctaccagcagaaggttaaccggaggctgcagctggagcaagaaatggccaaagctggactctgtgaagctgagcaggagcagatgcggaagatcctctaccagaaagagtctaattacaacaggttaaagagggccaagatggacaagtctatgtttgtcaagatcaaaaccctggggatcggtgcctttggagaagtgtgccttgcttgtaaggtggacactcacgccctgtacgccatgaagaccctaaggaaaaaggatgtcctgaaccggaatcaggtggcccacgtcaaggccgagagggacatcctggccgaggcagacaatgagtgggtggtcaaactctactactccttccaagacaaagacagcctgtactttgtgatggactacatccctggtggggacatgatgagcctgctgatccggatggaggtcttccctgagcacctggcccggttctacatcgcagagctgactttggccattgagagtgtccacaagatgggcttcatccaccgagacatcaagcctgataacattttgatagatctggatggtcacattaaactcacagatttcggcctctgcactgggttcaggtggactcacaattccaaatattaccagaaagggagccatgtcagacaggacagcatggagcccagcgacctctgggatgatgtgtctaactgtcggtgtggggacaggctgaagaccctagagcagagggcgcggaagcagcaccagaggtgcctggcacattcactggtggggactccaaactacatcgcacccgaggtgctcctccgcaaagggtacactcaactctgtgactggtggagtgttggagtgattctcttcgagatgctggtggggcagccgccctttttggcacctactcccacagaaacccagctgaaggtgatcaactgggagaacacgctccacattccagcccaggtgaagctgagccctgaggccagggacctcatcaccaagctgtgctgctccgcagaccaccgcctggggcggaatggggccgatgacctgaaggcccaccccttcttcagcgccattgacttctccagtgacatccggaagcagccagccccctacgttcccaccatcagccaccccatggacacctcgaatttcgaccccgtagatgaagaaagcccttggaacgatgccagcgaaggtagcaccaaggcctgggacacactcacctcgcccaataacaagcatcctgagcacgcattttacgaattcaccttccgaaggttctttgatgacaatggctacccctttcgatgcccaaagccttcaggagcagaagcttcacaggctgagagctcagatttagaaagctctgatctggtggatcagactgaaggctgccagcctgtgtacgtgtagatgggggccaggcacccccaccactcgctgcctcccaggtcagggtcccggagccggtgccctcacaggccaatagggaagccgagggctgttttgttttaaattagtccgtcgattacttcacttgaaattctgctcttcaccaagaaaacccaaacaggacacttttgaaaacaggactcagcatcgctttcaataggcttttcaggaccttcactgcattaaaacaatatttttgaaaatttagtacagtttagaaagagcacttattttgtttatatccattttttcttactaaattatagggattaactttgacaaatcatgctgctgttattttctacatttgtattttatccatagcacttattcacatttaggaaaagacataaaaactgaagaacattgatgagaaatctctgtgcaataatgtaaaaaaaaaaaaagataacactctgctcaatgtcacggagaccattttatccacacaatggtttttgttttttattttttcccatgtttcaaaattgtgatataatgatataatgttaaaagctgctttttttggctttttgcatatctagtataataggaagtgtgagcaaggtgatgatgtggctgtgatttccgacgtctggtgtgtggagagtactgcatgagcagagttcttctattataaaattaccatatcttgccattcacagcaggtcctgtgaatacgtttttactgagtgtctttaaatgaggtgttctagacagtgtgctgataatgtattgtgcgggtgacctcttcgctatgattgtatctcttactgttttgttaaagaaatgcagatgtgtaactgagaagtgatttgtgtgtgtgtcttggttgtgattggattctttggggggggggaactgaaacatttgtcatatactgaacttatatacatcaaaagggattaatacagcgatgccaaaaagtttaatcacggacacacgtccgtttctgtagtccgtatgctctttcattcttggtagagctggtatgtggaatgccatacctctgaccctactacttacctttttactgacagactgcccacactgaaagcttcagtgaatgttcttagtcctgttttcttctgttactgtcaggaaactgagtgatctaatggttctctcactttttttttgttcttttagtgtactttgaagtatcaaatcttaacttggtttaaacaatacatattcctaacctttgtaaaaaagcaaagattcttcaaaatgacattgaaataaaaagtaagccatacgtattttcttagaagtatagatgtatgtgcgtgtatacacacacacacacacacagagataaacacaatattccttatttcaaattagtatgattcctatttaaagtgatttatatttgagtaaaaagttcaattcttttttgctttttaaaaaatctgatgcttcataattttcattatattattccacatatttttccttgaagttcttagcataatgtatccattacttagtatatatctaggcaacaacacttagaagtttatcagtgtttaaactaaaaaaataaagattcctgtgtactggtttacatttgtgtgagtggcatactcaagtctgctgtgcctgtcgtcgtgactgtcagtattctcgctattttatagtcgtgccatgttgttactcacagcgctctgacatactttcatgtggtaggttctttctcaggaactcagtttaactattatttattgatatatcattacctttgaaaagcttctactggcacaatttattattaaaattttgaatccaaagttttttaagaagggacaaaaggtgggtgaattttctggagccaataaggaaaagcttgaagccaccattaatgaattagtctaatcatgttttctgaaaacataaccagccattggctatttaaaacttgtaatttttttaatttacaaaaatataaaatatgaagacataaacccagttgccatctgcgtgacaataaaacatnaatgctaacacttttt

SEQ ID NO: 309322 - DNA, 5289 bp, Homo sapiens
gaaatcctaagaccttgctgtgttattgaccatcaatctcagacactgtctgggctctccggcagcgtggagagtcctggccccgcctcgagaacagaggccaaggacgggaagtgcaggggtccgtgtacttgcagttgggttctattctacccacacggtgtcttacaagttttttaaaaatgtctttccaacttttaagaaccaagagctttcacactgaaaattgggcctggagagggggcgagcgcctgtggtcccagtgtgtcaggagactgaggcaggaggatgggacgtagtgagaccctatctctaaaaagaaaaaaaaaaaggaattaagaaaattgggtttttagcattcctagaaatgtagaagccctgagctgcgtctcctgtgtgggagctggtcccactccccggccttcggagccctcggagcccggagccctcgatgcagcgctatggatgccgggagcgatctttggaaaggagtccccggctcgagcgacactgcccccctggggctctgcaggagatggctggccgagctctcaagcagactggcagcaggagcatcgaggccgccctggagtacatcagcaagatgggctacctggacccgaggaatgagcagattgtgcgggtcattaagcagacctccccaggaaaggggctcatgccaaccccagtgacgcggaggcccagcttcgaaggaaccggcgattcgtttgcgtcctaccaccagctgagcggtaccccctacgagggcccaagcttcggcgctgacggccccacggcgctggaggagatgccgcggccgtacgtggactaccttttccccggagtcggcccccacgggcccggccaccagcaccagcacccacccaagggctacggtgccagcgtagaggcagcaggggcacacttcccgctgcagggcgcgcactacgggcggccgcacctgctggtgcctggggaacccctgggctacggagtgcagcgcagcccctccttccagagcaagacgccgccggagaccgggggttacgccagcctgcccacgaagggccagggaggaccgccaggcgccggcctcgctttcccaccccctgccgccgggctctacgtgccgcacccacaccacaagcaggccggtcccgcggcccaccagctgcatgtgctgggctcccgcagccaggtgttcgccagcgacagccccccgcagagcctgctcactccctcgcggaacagcctcaacgtggacctgtatgaattgagcagcacctccgtccagcagtggccggctgccaccctggcccgccgggactccctgcagaagccgggcctggaggcgccgccgcgcgcgcacgtggccttccggcctgactgcccagtgcccagcaggaccaactccttcaacagccaccagccgcggcccggtccgcctggcaaggccgagccctccctgcccgcccccaacaccgtgacggctgtcacggccgcgcacatcttgcacccggtgaagagcgtgcgtgtgctgaggccggagccgcagacggctgtggggccctcgcaccccgcctgggtgcccgcgcctgccccggcccccgcccccgcccccgccccggctgcggagggcttggacgccaaggaggagcatgccctggcgctgggcggcgcaggcgccttcccgctggacgtggagtacggaggcccagaccggaggtgcccgcctccgccctacccgaagcacctgctgctgcgcagcaagtcggagcagtacgacctggacagcctgtgcgcaggcatggagcagagcctccgtgcgggccccaacgagcccgagggcggcgacaagagccgcaaaagcgccaagggggacaaaggcggaaaggataaaaagcagattcagacctctcccgttcccgtccgcaaaaacagcagagacgaagagaagagagagtcacgcatcaagagctactcgccatacgcctttaagttcttcatggagcagcacgtggagaatgtcatcaaaacctaccagcagaaggttaaccggaggctgcagctggagcaagaaatggccaaagctggactctgtgaagctgagcaggagcagatgcggaagatcctctaccagaaagagtctaattacaacaggttaaagagggccaagatggacaagtctatgtttgtcaagatcaaaaccctggggatcggtgcctttggagaagtgtgccttgcttgtaaggtggacactcacgccctgtacgccatgaagaccctaaggaaaaaggatgtcctgaaccggaatcaggtggcccacgtcaaggccgagagggacatcctggccgaggcagacaatgagtgggtggtcaaactctactactccttccaagacaaagacagcctgtactttgtgatggactacatccctggtggggacatgatgagcctgctgatccggatggaggtcttccctgagcacctggcccggttctacatcgcagagctgactttggccattgagagtgtccacaagatgggcttcatccaccgagacatcaagcctgataacattttgatagatctggatggtcacattaaactcacagatttcggcctctgcactgggttcaggtggactcacaattccaaatattaccagaaagggagccatgtcagacaggacagcatggagcccagcgacctctgggatgatgtgtctaactgtcggtgtggggacaggctgaagaccctagagcagagggcgcggaagcagcaccagaggtgcctggcacattcactggtggggactccaaactacatcgcacccgaggtgctcctccgcaaagggtacactcaactctgtgactggtggagtgttggagtgattctcttcgagatgctggtggggcagccgccctttttggcacctactcccacagaaacccagctgaaggtgatcaactgggagaacacgctccacattccagcccaggtgaagctgagccctgaggccagggacctcatcaccaagctgtgctgctccgcagaccaccgcctggggcggaatggggccgatgacctgaaggcccaccccttcttcagcgccattgacttctccagtgacatccggaagcagccagccccctacgttcccaccatcagccaccccatggacacctcgaatttcgaccccgtagatgaagaaagcccttggaacgatgccagcgaaggtagcaccaaggcctgggacacactcacctcgcccaataacaagcatcctgagcacgcattttacgaattcaccttccgaaggttctttgatgacaatggctacccctttcgatgcccaaagccttcaggagcagaagcttcacaggctgagagctcagatttagaaagctctgatctggtggatcagactgaaggctgccagcctgtgtacgtgtagatgggggccaggcacccccaccactcgctgcctcccaggtcagggtcccggagccggtgccctcacaggccaatagggaagccgagggctgttttgttttaaattagtccgtcgattacttcacttgaaattctgctcttcaccaagaaaacccaaacaggacacttttgaaaacaggactcagcatcgctttcaataggcttttcaggaccttcactgcattaaaacaatatttttgaaaatttagtacagtttagaaagagcacttattttgtttatatccattttttcttactaaattatagggattaactttgacaaatcatgctgctgttattttctacatttgtattttatccatagcacttattcacatttaggaaaagacataaaaactgaagaacattgatgagaaatctctgtgcaataatgtaaaaaaaaaaaaagataacactctgctcaatgtcacggagaccattttatccacacaatggtttttgttttttattttttcccatgtttcaaaattgtgatataatgatataatgttaaaagctgctttttttggctttttgcatatctagtataataggaagtgtgagcaaggtgatgatgtggctgtgatttccgacgtctggtgtgtggagagtactgcatgagcagagttcttctattataaaattaccatatcttgccattcacagcaggtcctgtgaatacgtttttactgagtgtctttaaatgaggtgttctagacagtgtgctgataatgtattgtgcgggtgacctcttcgctatgattgtatctcttactgttttgttaaagaaatgcagatgtgtaactgagaagtgatttgtgtgtgtgtcttggttgtgattggattctttggggggggggaactgaaacatttgtcatatactgaacttatatacatcaaaagggattaatacagcgatgccaaaaagtttaatcacggacacacgtccgtttctgtagtccgtatgctctttcattcttggtagagctggtatgtggaatgccatacctctgaccctactacttacctttttactgacagactgcccacactgaaagcttcagtgaatgttcttagtcctgttttcttctgttactgtcaggaaactgagtgatctaatggttctctcactttttttttgttcttttagtgtactttgaagtatcaaatcttaacttggtttaaacaatacatattcctaacctttgtaaaaaagcaaagattcttcaaaatgacattgaaataaaaagtaagccatacgtattttcttagaagtatagatgtatgtgcgtgtatacacacacacacacacacagagataaacacaatattccttatttcaaattagtatgattcctatttaaagtgatttatatttgagtaaaaagttcaattcttttttgctttttaaaaaatctgatgcttcataattttcattatattattccacatatttttccttgaagttcttagcataatgtatccattacttagtatatatctaggcaacaacacttagaagtttatcagtgtttaaactaaaaaaataaagattcctgtgtactggtttacatttgtgtgagtggcatactcaagtctgctgtgcctgtcgtcgtgactgtcagtattctcgctattttatagtcgtgccatgttgttactcacagcgctctgacatactttcatgtggtaggttctttctcaggaactcagtttaactattatttattgatatatcattacctttgaaaagcttctactggcacaatttattattaaaattttgaatccaaa

SEQ ID NO: 309323 - DNA, 2881 bp, Homo sapiens
  misc_feature (40)..(40): n is a, c, g, or t
  misc_feature (42)..(42): n is a, c, g, or t
  misc_feature (53)..(54): n is a, c, g, or t
  misc_feature (60)..(60): n is a, c, g, or t
  misc_feature (76)..(76): n is a, c, g, or t
  misc_feature (101)..(101): n is a, c, g, or t
agtctttccggagtagtaagttacaatatgggagattatncngaagcctggtnngataanaatataaacttcaggntgaccgaaaaatcagaataggtgtnggagacacaccgaatgcggtgtgtgtccacaagatgggcttcatccaccgagacatcaagcctgataacattttgatagatctggatggtcacattaaactcacagatttcggcctctgcactgggttcaggtggactcacaattccaaatattaccagaaagggagccatgtcagacaggacagcatggagcccagcgacctctgggatgatgtgtctaactgtcggtgtggggacaggctgaagaccctagagcagagggcgcggaagcagcaccagaggtgcctggcacattcactggtggggactccaaactacatcgcacccgaggtgctcctccgcaaagggtacactcaactctgtgactggtggagtgttggagtgattctcttcgagatgctggtggggcagccgccctttttggcacctactcccacagaaacccagctgaaggtgatcaactgggagaacacgctccacattccagcccaggtgaagctgagccctgaggccagggacctcatcaccaagctgtgctgctccgcagaccaccgcctggggcggaatggggccgatgacctgaaggcccaccccttcttcagcgccattgacttctccagtgacatccggaagcagccagccccctacgttcccaccatcagccaccccatggacacctcgaatttcgaccccgtagatgaagaaagcccttggaacgatgccagcgaaggtagcaccaaggcctgggacacactcacctcgcccaataacaagcatcctgagcacgcattttacgaattcaccttccgaaggttctttgatgacaatggctacccctttcgatgcccaaagccttcaggagcagaagcttcacaggctgagagctcagatttagaaagctctgatctggtggatcagactgaaggctgccagcctgtgtacgtgtagatgggggccaggcacccccaccactcgctgcctcccaggtcagggtcccggagccggtgccctcacaggccaatagggaagccgagggctgttttgttttaaattagtccgtcgattacttcacttgaaattctgctcttcaccaagaaaacccaaacaggacacttttgaaaacaggactcagcatcgctttcaataggcttttcaggaccttcactgcattaaaacaatatttttgaaaatttagtacagtttagaaagagcacttattttgtttatatccattttttcttactaaattatagggattaactttgacaaatcatgctgctgttattttctacatttgtattttatccatagcacttattcacatttaggaaaagacataaaaactgaagaacattgatgagaaatctctgtgcaataatgtaaaaaaaaaaaaagataacactctgctcaatgtcacggagaccattttatccacacaatggtttttgttttttattttttcccatgtttcaaaattgtgatataatgatataatgttaaaagctgctttttttggctttttgcatatctagtataataggaagtgtgagcaaggtgatgatgtggctgtgatttccgacgtctggtgtgtggagagtactgcatgagcagagttcttctattataaaattaccatatcttgccattcacagcaggtcctgtgaatacgtttttactgagtgtctttaaatgaggtgttctagacagtgtgctgataatgtattgtgcgggtgacctcttcgctatgattgtatctcttactgttttgttaaagaaatgcagatgtgtaactgagaagtgatttgtgtgtgtgtcttggttgtgattggattctttggggggggggaactgaaacatttgtcatatactgaacttatatacatcaaaagggattaatacagcgatgccaaaaagtttaatcacggacacacgtccgtttctgtagtccgtatgctctttcattcttggtagagctggtatgtggaatgccatacctctgaccctactacttacctttttactgacagactgcccacactgaaagcttcagtgaatgttcttagtcctgttttcttctgttactgtcaggaaactgagtgatctaatggttctctcactttttttttgttcttttagtgtactttgaagtatcaaatcttaacttggtttaaacaatacatattcctaacctttgtaaaaaagcaaagattcttcaaaatgacattgaaataaaaagtaagccatacgtattttcttagaagtatagatgtatgtgcgtgtatacacacacacacacacacagagataaacacaatattccttatttcaaattagtatgattcctatttaaagtgatttatatttgagtaaaaagttcaattcttttttgctttttaaaaaatctgatgcttcataattttcattatattattccacatatttttccttgaagttcttagcataatgtatccattacttagtatatatctaggcaacaacacttagaagtttatcagtgtttaaactaaaaaaataaagattcctgtgtactggtttacatttgtgtgagtggcatactcaagtctgctgtgcctgtcgtcgtgactgtcagtattctcgctattttatagtcgtgccatgttgttactcacagcgctctgacatactttcatgtggtaggttctttctcaggaactcagtttaactattatttattgatatatcattacctttgaaaagcttctactggcacaatttattattaaaattttgaatccaaa

SEQ ID NO: 309324 - DNA, 2919 bp, Homo sapiens
atcccaggagtttgggaggccgagaagggcggatcacctgaggtcaggagttcaagaccagcctggcccacatggcaaaaccccatatctataaaaatacaaaaatcagccgggtgtggtggcaggcgcctgtaatcccagctactcgggaggctgaggcaggagaatcgcttgaacccaggaggcggaggttgcagtgagccaagatcgcaccactgcactccaacctgggcaacacagcgagactccatctcaaaaaaataaaaagaaagaaagaacttgtagaccatcattctctttcatttttgtggaaagcacaaaattctttggctaaacagtatttctgatagaagaaaatcagtatctttttgtctgtatttgactggtcatcctggcctcaggctgtgagccatcgactgaaatgacactgactttttgtggctgctgagatcaacaactgctgcttgtgtctattctaactcctctcctattgtgaaactaaacatatttgaaagtcacgtcatcacacgctgtcccagaactgcccaagatgtgaggagaaactaacctgttggctctgttgtttcctcaggtgatcaactgggagaacacgctccacattccagcccaggtgaagctgagccctgaggccagggacctcatcaccaagctgtgctgctccgcagaccaccgcctggggcggaatggggccgatgacctgaaggcccaccccttcttcagcgccattgacttctccagtgacatccggaagcagccagccccctacgttcccaccatcagccaccccatggacacctcgaatttcgaccccgtagatgaagaaagcccttggaacgatgccagcgaaggtagcaccaaggcctgggacacactcacctcgcccaataacaagcatcctgagcacgcattttacgaattcaccttccgaaggttctttgatgacaatggctacccctttcgatgcccaaagccttcaggagcagaagcttcacaggctgagagctcagatttagaaagctctgatctggtggatcagactgaaggctgccagcctgtgtacgtgtagatgggggccaggcacccccaccactcgctgcctcccaggtcagggtcccggagccggtgccctcacaggccaatagggaagccgagggctgttttgttttaaattagtccgtcgattacttcacttgaaattctgctcttcaccaagaaaacccaaacaggacacttttgaaaacaggactcagcatcgctttcaataggcttttcaggaccttcactgcattaaaacaatatttttgaaaatttagtacagtttagaaagagcacttattttgtttatatccattttttcttactaaattatagggattaactttgacaaatcatgctgctgttattttctacatttgtattttatccatagcacttattcacatttaggaaaagacataaaaactgaagaacattgatgagaaatctctgtgcaataatgtaaaaaaaaaaaaagataacactctgctcaatgtcacggagaccattttatccacacaatggtttttgttttttattttttcccatgtttcaaaattgtgatataatgatataatgttaaaagctgctttttttggctttttgcatatctagtataataggaagtgtgagcaaggtgatgatgtggctgtgatttccgacgtctggtgtgtggagagtactgcatgagcagagttcttctattataaaattaccatatcttgccattcacagcaggtcctgtgaatacgtttttactgagtgtctttaaatgaggtgttctagacagtgtgctgataatgtattgtgcgggtgacctcttcgctatgattgtatctcttactgttttgttaaagaaatgcagatgtgtaactgagaagtgatttgtgtgtgtgtcttggttgtgattggattctttggggggggggaactgaaacatttgtcatatactgaacttatatacatcaaaagggattaatacagcgatgccaaaaagtttaatcacggacacacgtccgtttctgtagtccgtatgctctttcattcttggtagagctggtatgtggaatgccatacctctgaccctactacttacctttttactgacagactgcccacactgaaagcttcagtgaatgttcttagtcctgttttcttctgttactgtcaggaaactgagtgatctaatggttctctcactttttttttgttcttttagtgtactttgaagtatcaaatcttaacttggtttaaacaatacatattcctaacctttgtaaaaaagcaaagattcttcaaaatgacattgaaataaaaagtaagccatacgtattttcttagaagtatagatgtatgtgcgtgtatacacacacacacacacacagagataaacacaatattccttatttcaaattagtatgattcctatttaaagtgatttatatttgagtaaaaagttcaattcttttttgctttttaaaaaatctgatgcttcataattttcattatattattccacatatttttccttgaagttcttagcataatgtatccattacttagtatatatctaggcaacaacacttagaagtttatcagtgtttaaactaaaaaaataaagattcctgtgtactggtttacatttgtgtgagtggcatactcaagtctgctgtgcctgtcgtcgtgactgtcagtattctcgctattttatagtcgtgccatgttgttactcacagcgctctgacatactttcatgtggtaggttctttctcaggaactcagtttaactattatttattgatatatcattacctttgaaaagcttctactggcacaatttattattaaaattttgaatccaaa

SEQ ID NO: 309325 - DNA, 3914 bp, Homo sapiens
gtctgcgctttggaaccgcggcgtgagcgccccgggaagatggagcagtcgccgtccacgccaccgccgccgcccggggctcccccgtccctgcggggccagcagcagctccagccaccagtgcccggtctcccggcgcgagaggcccgggagccgccggccaggacgcccccgagggtgtagaccgcgcccctggagagagtgataatcttcaaaatgaagactttggaaaattttaggttctctataggaactacaaaaatggaaggaaagaacattttcaaaaggaaattattttgaaagtatgtttacaacaaactgatactattgacagtttttttttttaaataataaaacactttaagaagattgtatttatggtaaaaggaaactggactaacaatgaggccaaagacttttcctgccacgacttattctggaaatagccggcagcgactgcaagagattcgtgaggggttaaaacagccatccaagtcttcggttcaggggctacccgcaggaccaaacagtgacacttccctggatgccaaagtcctggggagcaaagatgccaccaggcagcagcagcagatgagagccaccccaaagttcggaccttatcagaaagccttgagggaaatcagatattccttgttgccttttgctaatgaatcgggcacctctgcagctgcagaagtgaaccggcaaatgctgcaggaactggtgaacgcaggatgcgaccaggagatggctggccgagctctcaagcagactggcagcaggagcatcgaggccgccctggagtacatcagcaagatgggctacctggacccgaggaatgagcagattgtgcgggtcattaagcagacctccccaggaaaggggctcatgccaaccccagtgacgcggaggcccagcttcgaaggaaccggcgattcgtttgcgtcctaccaccagctgagcggtaccccctacgagggcccaagcttcggcgctgacggccccacggcgctggaggagatgccgcggccgtacgtggactaccttttccccggagtcggcccccacgggcccggccaccagcaccagcacccacccaagggctacggtgccagcgtagaggcagcaggggcacacttcccgctgcagggcgcgcactacgggcggccgcacctgctggtgcctggggaacccctgggctacggagtgcagcgcagcccctccttccagagcaagacgccgccggagaccgggggttacgccagcctgcccacgaagggccagggaggaccgccaggcgccggcctcgctttcccaccccctgccgccgggctctacgtgccgcacccacaccacaagcaggccggtcccgcggcccaccagctgcatgtgctgggctcccgcagccaggtgttcgccagcgacagccccccgcagagcctgctcactccctcgcggaacagcctcaacgtggacctgtatgaattgagcagcacctccgtccagcagtggccggctgccaccctggcccgccgggactccctgcagaagccgggcctggaggcgccgccgcgcgcgcacgtggccttccggcctgactgcccagtgcccagcaggaccaactccttcaacagccaccagccgcggcccggtccgcctggcaaggccgagccctccctgcccgcccccaacaccgtgacggctgtcacggccgcgcacatcttgcacccggtgaagagcgtgcgtgtgctgaggccggagccgcagacggctgtggggccctcgcaccccgcctgggtgcccgcgcctgccccggcccccgcccccgcccccgccccggctgcggagggcttggacgccaaggaggagcatgccctggcgctgggcggcgcaggcgccttcccgctggacgtggagtacggaggcccagaccggaggtgcccgcctccgccctacccgaagcacctgctgctgcgcagcaagtcggagcagtacgacctggacagcctgtgcgcaggcatggagcagagcctccgtgcgggccccaacgagcccgagggcggcgacaagagccgcaaaagcgccaagggggacaaaggcggaaaggataaaaagcagattcagacctctcccgttcccgtccgcaaaaacagcagagacgaagagaagagagagtcacgcatcaagagctactcgccatacgcctttaagttcttcatggagcagcacgtggagaatgtcatcaaaacctaccagcagaaggttaaccggaggctgcagctggagcaagaaatggccaaagctggactctgtgaagctgagcaggagcagatgcggaagatcctctaccagaaagagtctaattacaacaggttaaagagggccaagatggacaagtctatgtttgtcaagatcaaaaccctggggatcggtgcctttggagaagtgtgccttgcttgtaaggtggacactcacgccctgtacgccatgaagaccctaaggaaaaaggatgtcctgaaccggaatcaggtggcccacgtcaaggccgagagggacatcctggccgaggcagacaatgagtgggtggtcaaactctactactccttccaagacaaagacagcctgtactttgtgatggactacatccctggtggggacatgatgagcctgctgatccggatggaggtcttccctgagcacctggcccggttctacatcgcagagctgactttggccattgagagtgtccacaagatgggcttcatccaccgagacatcaagcctgataacattttgatagatctggatggtcacattaaactcacagatttcggcctctgcactgggttcaggtggactcacaattccaaatattaccagaaagggagccatgtcagacaggacagcatggagcccagcgacctctgggatgatgtgtctaactgtcggtgtggggacaggctgaagaccctagagcagagggcgcggaagcagcaccagaggtgcctggcacattcactggtggggactccaaactacatcgcacccgaggtgctcctccgcaaagggtacactcaactctgtgactggtggagtgttggagtgattctcttcgagatgctggtggggcagccgccctttttggcacctactcccacagaaacccagctgaaggtgatcaactgggagaacacgctccacattccagcccaggtgaagctgagccctgaggccagggacctcatcaccaagctgtgctgctccgcagaccaccgcctggggcggaatggggccgatgacctgaaggcccaccccttcttcagcgccattgacttctccagtgacatccggaagcagccagccccctacgttcccaccatcagccaccccatggacacctcgaatttcgaccccgtagatgaagaaagcccttggaacgatgccagcgaaggtagcaccaaggcctgggacacactcacctcgcccaataacaagcatcctgagcacgcattttacgaattcaccttccgaaggttctttgatgacaatggctacccctttcgatgcccaaagccttcaggagcagaagcttcacaggctgagagctcagatttagaaagctctgatctggtggatcagactgaaggctgccagcctgtgtacgtgtagatgggggccaggcacccccaccactcgctgcctcccaggtcagggtcccggagccggtgccctcacaggccaatagggaagccgagggctgttttgttttaaattagtccgtcgattacttcacttgaaattctgctcttcaccaagaaaacccaaacaggacacttttgaaaacaggactcagcatcgctttcaataggcttttcaggaccttcactgcattaaaacaatatttttgaaaattt

SEQ ID NO: 309326 - DNA, 1364 bp, Homo sapiens
gtctgcgctttggaaccgcggcgtgagcgccccgggaagatggagcagtcgccgtccacgccaccgccgccgcccggggctcccccgtccctgcggggccagcagcagctccagccaccagtgcccggtctcccggcgcgagaggcccgggagccgccggccaggacgcccccgagggtgtagaccgcgcccctggagagagtgataatcttcaaaatgaagactttggaaaattttaggttctctataggaactacaaaaatggaaggaaagaacattttcaaaaggaaattattttgaaagtatgtttacaacaaactgatactattgacagtttttttttttaaataataaaacactttaagaagattgtatttatggtaaaaggaaactggactaacaatgaggccaaagacttttcctgccacgacttattctggaaatagccggcagcgactgcaagagattcgtgaggggttaaaacagccatccaagtcttcggttcaggggctacccgcaggaccaaacagtgacacttccctggatgccaaagtcctggggagcaaagatgccaccaggcagcagcagcagatgagagccaccccaaagttcggaccttatcagaaagcttcagtgaatgttcttagtcctgttttcttctgttactgtcaggaaactgagtgatctaatggttctctcactttttttttgttcttttagtgtactttgaagtatcaaatcttaacttggtttaaacaatacatattcctaacctttgtaaaaaagcaaagattcttcaaaatgacattgaaataaaaagtaagccatacgtattttcttagaagtatagatgtatgtgcgtgtatacacacacacacacacacagagataaacacaatattccttatttcaaattagtatgattcctatttaaagtgatttatatttgagtaaaaagttcaattcttttttgctttttaaaaaatctgatgcttcataattttcattatattattccacatatttttccttgaagttcttagcataatgtatccattacttagtatatatctaggcaacaacacttagaagtttatcagtgtttaaactaaaaaaataaagattcctgtgtactggtttacatttgtgtgagtggcatactcaagtctgctgtgcctgtcgtcgtgactgtcagtattctcgctattttatagtcgtgccatgttgttactcacagcgctctgacatactttcatgtggtaggttctttctcaggaactcagtttaactattatttattgatatatcattacctttgaaaagcttctactggcacaatttattattaaaattttgaatccaaa

SEQ ID NO: 309327 - DNA, 348 bp, Homo sapiens
gcacgaggaccagaatcccaagagccagagactggtctttgagaaatagtccctgagtattaggatacttttatcaaaatctagtaccagctacggccagaaagggccaggtgggacctgaaagcaaagacaatgttctttaccacacgtttcacatctgcaacatccttcaattgcgggaaaaggaacttgatttaacagaagaacatggtagagcagcatccagaaagtctgttattcctcttggattttttgaaataatcttcagaggaaggaaggaaaatcctattttggggtatcagtgtttgactagggatcatgaaataataaactgaaaaaaactttaga

SEQ ID NO: 309328 - DNA, 4184 bp, Homo sapiens
cctgtggacggccgcgttttaatgtgaccgggcgtcggatgtactggtgtccgtctcccagcatgctctagagaggcggctctggtgcccatcctcccagcacgctctggggaggcggctctggtgcccatcctcccagcatgctctggagaggcggctctggtgcccctcctcccagcatgctctggggaggcggctctggctctcgccttcccagcatgccctttactacaaagggctatttttcttttctttcttttgtttatttatttttctttgttcactccctgtagaacttggatgaaatcagtgtccatggttctttatgtttgtagtcttgatgtgctcctgtggtattacttcccctctgataggacattgtagccagcctcagcactcagtgagttcatcagggccacacccagtagagaaggccaagcaacctccacttcttcagcaccacacacacgcacacacacacacacgcacacatgcgtgtgcacccgcgcacgcacatacacacacacatatagcagtagcagcagcagcagcagcagcagcaacctttgatcaggagtgagattttcgggttctgaaacctgggacacgagtctgcgaatagtcggttttctcagaataatttgaatctgttttcttagtttcaaatgaccatttccctgatgctctgagcttatgatcacacagagccagtccatcctcatttcctggtggcatctgttcatttacctttgtggactgtagctgatggcacagtgcgggttccctaccagccaggggtttccaagggacctttggaggccatgcttagacacattcctgtacctgagaacaaccacataggcaggaccagatccacatcgtgcagtcgtgtcataaaaaaacaaaacaaaacaaaaaaacactaggagtccactcaaccctggaggtctttgctaattggaattatgtattgtctgttgggctgggaaatgtctctttcatattgtaagtccaggatgaactaggagaaagcaatttgttgccctgatgataactgatgattttcaccctctctagctgaggtaactcagacagtgcatgaggtcagtttcttcttgagaagcagtgccttggtcttgtttctgtggttggttctagcccctgcagagcctgggagctgcaggaactgtctgagaaaatctccctaataggggagtgggttcccagaagggagatctgggaggggtcaggagccactaagttgcttcactccttttttctctaattttctaccttcctctctgttcctgcagacagttttgccagctttgcttctggttactagggtctcatgcgtgtcctgcttggagagccataaggaaattgctgtcttgtgctttgtgtctctcatccagtctctggctcttgggattctggtctttgagaaatagtccctgagtattaggatacttttatcaaaatctagtaccagctacggccagaaagggccaggtgggacctgaaagcaaagacaatgttctttaccacacgtttcacatctgcaacatccttcaattgcgggaaaaggaacttgatttaacagaagaacatggtagagcagcatccagaaagtctgttattcctcttggattttttgaaataatcttcagaggaaggaaggaaaatcctattttggggtatcagtgtttgactagggatcatgaaataataaactgaaaaaaactttagagttcagttgatccaacactttcctttaaaagttgagggagcagaggcccatgggattaaatggctggtccaggtcagccagcaggtgtagggcctgacaagaacatattgtttccctgacccctaggccgtcacaccacaccctccatttcctcatgttgctgaccaggtgcccatatgatttctacacttcccaagccttaccctggcatctttcttttaaattatatctgtcccaggtgctctccacacataggatggtaatgccagtcccaggggagggtgtgatagtaaggaaggccactgttaggtttcctttagaaataaagagatctcagcagcttggaagaaatcccagaagcggactccatcaatccaagaaagagttgctttgtggaaggtgaaggaagacccacagagtgctcaggatgatgctattgctggagagcgaaagatggaacagccttgtccaggcagaacagtcataagccaggaaatgaaacaaaggaaaacaggtgcctgaatttcctggggaaacatggcttgtttaaggacttggagttatggatggaatttatgggacccacgtgagcagacctgaggaaggctcgatttcttttgtttcttggtccactctgtcactctgctctggtcaagccccatttggtctacagcccatgagaaggaatgaggctggttctgcactctcagcatgcagtccgaaagcatgtgggagtggggagggaaagtgagatgaattaagacaaagaacaggtgccatagaagtagatttctaggaatgaagtggggcagatcttatctttgtggattacaggcactgtactaaaaacaggtttcctatttaatataaaaagaaagtgaatcttcttttggatagaatcatccattcccatcgccgcaccccctaccccccaaacacacacacacacacacacacacacacacacacacacacacacacgccctactcttcatttgctaggggaaggtcacagcacaactaaatccaggacaggacattgtgaccatgacccagccacagtcaataccagaaagatgattcagagtctgaagtggtgccccaggtgccaacaggataacctctaccccccgactttgtctctggggtcctgttccttcctgcaaagcccaatccaagactggcatggctcagaggttgtgagaaaggcatggactggaacaatcatgtccagaggggtctggagctttgtttcctgttcaccagcaaaaaatgtctctcccatttttctgaaagtggctgatgtaagaacaggcagaaggaaaaccctttttgtcaataactctgtccttaaggaatggtcctctgggagggctgtgctgctagtgggtacctcagtcacacacccccaaccccaggcagcctctagagccttcttgctttcattttccttgaatgtacataggaacaagggggaaagtctcttactgaagtgcctgaaacccaaagctagagcttctagagacgccgttcttcctgtctcagcttggccagcctttcaacaatgttctctagtttcaagctccagcttctcagaaagaattaaagaacttgctgttcaaattaagtagaaagtgagactcaataataactgaactacagcaaaaggcagagaattacagggagaaaaaacttgtacttaccagcccaattctactctcctcaaactgacacacacacacacacacacacacacacacacacacacacactcttttaggggactaagagagagaagcatgttattacattttactcatccaaacagtaatgcaaaaataaaacggtagaatatgaaaagctcaggatctctcccaaggctacctactgcaggagggccaacaggtgagatgggaagaatggaaacagggaccgattttgtagctcatacaattaggacaccttaggaatagcattgtagtaatggtgatgaatatgctctgccaaattcatccagtctgcaccatcttatagctgcccagcacactcgactgttcatgtggtctctttgtagtgtgagtttggagtgtcctattagcctgttctggttaggaatgagttaacggctctttccctcaaccttagtctagtcccagggctgaggattcagctggatccacatggtcttgagggttggcatgaggagggggaagcttttttgaatcgctttttgatcacataatctgccattttaagagtaagatttgctttatggaaatcaattcattaataaaaaatgatattcaagttgcaataccatttcacagtgaaatattttgagtacaattttgttgctagaatagtcatgggcaagagttttatgcaaaatgtttcaattatgttaataaataagacaatgctacaagaaaaaaat

SEQ ID NO: 309329 - DNA, 1750 bp, Homo sapiens
cctgtggacggccgcgttttaatgtgaccgggcgtcggatgtactggtgtccgtctcccagcatgctctagagaggcggctctggtgcccatcctcccagcacgctctggggaggcggctctggtgcccatcctcccagcatgctctggagaggcggctctggtgcccctcctcccagcatgctctggggaggcggctctggctctcgccttcccagcatgccctttactacaaagggctatttttcttttctttcttttgtttatttatttttctttgttcactccctgtagaacttggatgaaatcagtgtccatggttctttatgtttgtagtcttgatgtgctcctgtggtattacttcccctctgataggacattgtagccagcctcagcactcagtgagttcatcagggccacacccagtagagaaggccaagcaacctccacttcttcagcaccacacacacgcacacacacacacacgcacacatgcgtgtgcacccgcgcacgcacatacacacacacatatagcagtagcagcagcagcagcagcagcagcaacctttgatcaggagtgagattttcgggttctgaaacctgggacacgagtctgcgaatagtcggttttctcagaataatttgaatctgttttcttagtttcaaatgaccatttccctgatgctctgagcttatgatcacacagagccagtccatcctcatttcctggtggcatctgttcatttacctttgtggactgtagctgatggcacagtgcgggttccctaccagccaggggtttccaagggacctttggaggccatgcttagacacattcctgtacctgagaacaaccacataggcaggaccagatccacatcgtgcagtcgtgtcataaaaaaacaaaacaaaacaaaaaaacactaggagtccactcaaccctggaggtctttgctaattggaattatgtattgtctgttgggctgggaaatgtctctttcatattgtaagtccaggatgaactaggagaaagcaatttgttgccctgatgataactgatgattttcaccctctctagctgaggtaactcagacagtgcatgaggtcagtttcttcttgagaagcagtgccttggtcttgtttctgtggttggttctagcccctgcagagcctgggagctgcaggaactgtctgagaaaatctccctaataggggagtgggttcccagaagggagatctgggaggggtcaggagccactaagttgcttcactccttttttctctaattttctaccttcctctctgttcctgcagacagttttgccagctttgcttctggttactagggtctcatgcgtgtcctgcttggagagccataaggaaattgctgtcttgtgctttgtgtctctcatccagtctctggctcttgggattctggtctttgagaaatagtccctgagtattaggatacttttatcaaaatctagtaccagctacggccagaaagggccaggtgggacctgaaagcaaagacaatgttctttaccacacgtttcacatctgcaacatccttcaattgcgggaaaaggaacttgatttaacagaagaacatggtagagcagcatccagaaagtctgttattcctcttggattttttgaaataatcttcagaggaaggaaggaaaatcctattttggggtatcagtgtttgactagggatcatgaaataataaactgaaaaaaactttaga

SEQ ID NO: 309330 - DNA, 953 bp, Homo sapiens
caggtgtacgctcggttacgggatcaagctagagcttctagagacgccgttcttcctgtctcagcttggccagcctttcaacaatgttctctagtttcaagctccagcttctcagaaagaattaaagaacttgctgttcaaattaagtagaaagtgagactcaataataactgaactacagcaaaaggcagagaattacagggagaaaaaacttgtacttaccagcccaattctactctcctcaaactgacacacacacacacacacacacacacacacacacacacacactcttttaggggactaagagagagaagcatgttattacattttactcatccaaacagtaatgcaaaaataaaacggtagaatatgaaaagctcaggatctctcccaaggctacctactgcaggagggccaacaggtgagatgggaagaatggaaacagggaccgattttgtagctcatacaattaggacaccttaggaatagcattgtagtaatggtgatgaatatgctctgccaaattcatccagtctgcaccatcttatagctgcccagcacactcgactgttcatgtggtctctttgtagtgtgagtttggagtgtcctattagcctgttctggttaggaatgagttaacggctctttccctcaaccttagtctagtcccagggctgaggattcagctggatccacatggtcttgagggttggcatgaggagggggaagcttttttgaatcgctttttgatcacataatctgccattttaagagtaagatttgctttatggaaatcaattcattaataaaaaatgatattcaagttgcaataccatttcacagtgaaatattttgagtacaattttgttgctagaatagtcatgggcaagagttttatgcaaaatgtttcaattatgttaataaataagacaatgctacaagaaaaaaat

SEQ ID NO: 309331 - DNA, 2556 bp, Homo sapiens
cctgtggacggccgcgttttaatgtgaccgggcgtcggatgtactggtgtccgtctcccagcatgctctagagaggcggctctggtgcccatcctcccagcacgctctggggaggcggctctggtgcccatcctcccagcatgctctggagaggcggctctggtgcccctcctcccagcatgctctggggaggcggctctggctctcgccttcccagcatgccctttactacaaagggctatttttcttttctttcttttgtttatttatttttctttgttcactccctgtagaacttggatgaaatcagtgtccatggttctttatgtttgtagtcttgatgtgctcctgtggtattacttcccctctgataggacattgtagccagcctcagcactcagtgagttcatcagggccacacccagtagagaaggccaagcaacctccacttcttcagcaccacacacacgcacacacacacacacgcacacatgcgtgtgcacccgcgcacgcacatacacacacacatatagcagtagcagcagcagcagcagcagcagcaacctttgatcaggagtgagattttcgggttctgaaacctgggacacgagtctgcgaatagtcggttttctcagaataatttgaatctgttttcttagtttcaaatgaccatttccctgatgctctgagcttatgatcacacagagccagtccatcctcatttcctggtggcatctgttcatttacctttgtggactgtagctgatggcacagtgcgggttccctaccagccaggggtttccaagggacctttggaggccatgcttagacacattcctgtacctgagaacaaccacataggcaggaccagatccacatcgtgcagtcgtgtcataaaaaaacaaaacaaaacaaaaaaacactaggagtccactcaaccctggaggtctttgctaattggaattatgtattgtctgttgggctgggaaatgtctctttcatattgtaagtccaggatgaactaggagaaagcaatttgttgccctgatgataactgatgattttcaccctctctagctgaggtaactcagacagtgcatgaggtcagtttcttcttgagaagcagtgccttggtcttgtttctgtggttggttctagcccctgcagagcctgggagctgcaggaactgtctgagaaaatctccctaataggggagtgggttcccagaagggagatctgggaggggtcaggagccactaagttgcttcactccttttttctctaattttctaccttcctctctgttcctgcagacagttttgccagctttgcttctggttactagggtctcatgcgtgtcctgcttggagagccataaggaaattgctgtcttgtgctttgtgtctctcatccagtctctggctcttgggattctggtctttgagaaatagtccctgagtattaggatacttttatcaaaatctagtaccagctacggccagaaagggccaggtgggacctgaaagcaaagacaatgttctttaccacacgtttcacatctgcaacatccttcaattgcgggaaaaggaacttgatttaacagaagaacatggtagagcagcatccagaaagtctgttattcctcttggattttttgaaataatcttcagaggaaggaaggaaaatcctattttggggtatcagtgtttgactagggatcatgaaataataaactgaaaaaaactttagagttcagttgatccaacactttcctttaaaagttgagggagcagaggcccatgggattaaatggctggtccaggtcagccagcaggtgtagggcctgacaagaacatattgtttccctgacccctaggccgtcacaccacaccctccatttcctcatgttgctgaccaggtgcccatatgatttctacacttcccaagccttaccctggcatctttcttttaaattatatctgtcccaggtgctctccacacataggatggtaatgccagtcccaggggagggtgtgatagtaaggaaggccactgttaggtttcctttagaaataaagagatctcagcagcttggaagaaatcccagaagcggactccatcaatccaagaaagagttgctttgtggaaggtgaaggaagacccacagagtgctcaggatgatgctattgctggagagcgaaagatggaacagccttgtccaggcagaacagtcataagccaggaaatgaaacaaaggaaaacaggtgcctgaatttcctggggaaacatggcttgtttaaggacttggagttatggatggaatttatgggacccacgtgagcagacctgaggaaggctcgatttcttttgtttcttggtccactctgtcactctgctctggtcaagccccatttggtctacagcccatgagaaggaatgaggctggttctgcactctcagcatgcagtccgaaagcatgtgggagtggggagggaaagtgaaatacataacacaaccaggagcacgaatgttcaggtacacgagctcgattcgtaa

SEQ ID NO: 309332 - DNA, 2315 bp, Homo sapiens
cctgtggacggccgcgttttaatgtgaccgggcgtcggatgtactggtgtccgtctcccagcatgctctagagaggcggctctggtgcccatcctcccagcacgctctggggaggcggctctggtgcccatcctcccagcatgctctggagaggcggctctggtgcccctcctcccagcatgctctggggaggcggctctggctctcgccttcccagcatgccctttactacaaagggctatttttcttttctttcttttgtttatttatttttctttgttcactccctgtagaacttggatgaaatcagtgtccatggttctttatgtttgtagtcttgatgtgctcctgtggtattacttcccctctgataggacattgtagccagcctcagcactcagtgagttcatcagggccacacccagtagagaaggccaagcaacctccacttcttcagcaccacacacacgcacacacacacacacgcacacatgcgtgtgcacccgcgcacgcacatacacacacacatatagcagtagcagcagcagcagcagcagcagcaacctttgatcaggagtgagattttcgggttctgaaacctgggacacgagtctgcgaatagtcggttttctcagaataatttgaatctgttttcttagtttcaaatgaccatttccctgatgctctgagcttatgatcacacagagccagtccatcctcatttcctggtggcatctgttcatttacctttgtggactgtagctgatggcacagtgcgggttccctaccagccaggggtttccaagggacctttggaggccatgcttagacacattcctgtacctgagaacaaccacataggcaggaccagatccacatcgtgcagtcgtgtcataaaaaaacaaaacaaaacaaaaaaacactaggagtccactcaaccctggaggtctttgctaattggaattatgtattgtctgttgggctgggaaatgtctctttcatattgtaagtccaggatgaactaggagaaagcaatttgttgccctgatgataactgatgattttcaccctctctagctgaggtaactcagacagtgcatgaggtcagtttcttcttgagaagcagtgccttggtcttgtttctgtggttggttctagcccctgcagagcctgggagctgcaggaactgtctgagaaaatctccctaataggggagtgggttcccagaagggagatctgggaggggtcaggagccactaagttgcttcactccttttttctctaattttctaccttcctctctgttcctgcagacagttttgccagctttgcttctggttactagggtctcatgcgtgtcctgcttggagagccataaggaaattgctgtcttgtgctttgtgtctctcatccagtctctggctcttgggattctggtctttgagaaatagtccctgagtattaggatacttttatcaaaatctagtaccagctacggccagaaagggccaggtgggacctgaaagcaaagacaatgttctttaccacacgtttcacatctgcaacatccttcaattgcgggaaaaggaacttgatttaacagaagaacatggtagagcagcatccagaaagtctgttattcctcttggattttttgaaataatcttcagaggaaggaaggaaaatcctattttggggtatcagtgtttgactagggatcatgaaataataaactgaaaaaaactttagaaaaaaaaaaaaaaaaaaaaaaaaaaaaaaaaaaaaagaaaaaaaaacacaaaaaaaaaaaaaagaaaaaaaacaaaaagaagaggggcggcggcgcaaaaaatatctccccccggggggccccgaaagactgcgcgcgccccacgcatttgtgaacagagggccgcccctcatatggagggggctgttttatatttactccgtgaaagcggagccgcggctcgcggctataataaaaaaccgcagtgagtggtggagaaacaatcgtggctgctgatgaggaggaattaatcttgaggagaagaagacccaacactcattgggaggggggagcgacaactaatgtggggaaacacaccagcacgcagagaatgtattaaaagtcacccccacgcaagggggcatcttcaatgtcaacaataccagaaggatcaaaaaacgtgggacagaaaaacaacgacgagcattactttccgcccggcttcgaagaaaaacatggccgcaatcgacagtatataacatatccacaaaaacttttttacccaggcggagataaaaaacaggga

SEQ ID NO: 309333 - DNA, 1543 bp, Homo sapiens
  misc_feature (1531)..(1531): n is a, c, g, or t
cctgtggacggccgcgttttaatgtgaccgggcgtcggatgtactggtgtccgtctcccagcatgctctagagaggcggctctggtgcccatcctcccagcacgctctggggaggcggctctggtgcccatcctcccagcatgctctggagaggcggctctggtgcccctcctcccagcatgctctggggaggcggctctggctctcgccttcccagcatgccctttactacaaagggctatttttcttttctttcttttgtttatttatttttctttgttcactccctgtagaacttggatgaaatcagtgtccatggttctttatgtttgtagtcttgatgtgctcctgtggtattacttcccctctgataggacattgtagccagcctcagcactcagtgagttcatcagggccacacccagtagagaaggccaagcaacctccacttcttcagcaccacacacacgcacacacacacacacgcacacatgcgtgtgcacccgcgcacgcacatacacacacacatatagcagtagcagcagcagcagcagcagcagcaacctttgatcaggagtgagattttcgggttctgaaacctgggacacgagtctgcgaatagtcggttttctcagaataatttgaatctgttttcttagtttcaaatgaccatttccctgatgctctgagcttatgatcacacagagccagtccatcctcatttcctggtggcatctgttcatttacctttgtggactgtagctgatggcacagtgcgggttccctaccagccaggggtttccaagggacctttggaggccatgcttagacacattcctgtacctgagaacaaccacataggcaggaccagatccacatcgtgcagtcgtgtcataaaaaaacaaaacaaaacaaaaaaacactaggagtccactcaaccctggaggtctttgctaattggaattatgtattgtctgttgggctgggaaatgtctctttcatattgtaagtccaggatgaactaggagaaagcaatttgttgccctgatgataactgatgattttcaccctctctagctgaggtaactcagacagtgcatgaggtcagtttcttcttgagaagcagtgccttggtcttgtttctgtggttggttctagcccctgcagagcctgggagctgcaggaactgtctgagaaaatctccctaataggggagtgggttcccagaagggagatctgggaggggtcaggagccactaagttgcttcactccttttttctctaattttctaccttcctctctgttcctgcagacagttttgccagctttgcttctggttactagggtctcatgcgtgtcctgcttggagagccataaggaaattgctgtcttgtgctttgtgtctctcatccagtctctggctcttgggattctggtctttgagaaatagtccctgagtattaggatacttttatcaaaatctagtaccccccccgccccccccgccccccccggcccccccccgccccncccccgccccct

SEQ ID NO: 309334 - DNA, 3749 bp, Homo sapiens
ccctcggccgtgcgagaggccgagcttgctgcattgcagccgccgcggcgccgctcggctcttcactcccaacaatggcggctccgagcccgagcggcggcggcggctccgggggcggcagcggcagcggcacccccggccccgtagggtccccggcgccaggccacccggccgtcagcagcatgcagggtaaacgcaaagcactgaagttgaattttgcaaatccacctttcaaatctacagcaaggtttactctgaatcccaatcctacaggagttcaaaacccacacatagagagactgagaacacacagcattgagtcatcaggaaaactgaagatctcccctgaacaacactgggatttcactgcagaggacttgaaagaccttggagaaattggacgaggagcttatggttctgtcaacaaaatggtccacaaaccaagtgggcaaataatggcagttaaaagaattcggtcaacagtggatgaaaaagaacaaaaacaacttcttatggatttggatgtagtaatgcggagtagtgattgcccatacattgttcagttttatggtgcactcttcagagagggtgactgttggatctgtatggaactcatgtctacctcgtttgataagttttacaaatatgtatatagtgtattagatgatgttattccagaagaaattttaggcaaaatcactttagcaactgtgaaagcactaaaccacttaaaagaaaacttgaaaattattcacagagatatcaaaccttccaatattcttctggacagaagtggaaatattaagctctgtgacttcggcatcagtggacagcttgtggactctattgccaagacaagagatgctggctgtaggccatacatggcacctgaaagaatagacccaagcgcatcacgacaaggatatgatgtccgctctgatgtctggagtttggggatcacattgtatgagttggccacaggccgatttccttatccaaagtggaatagtgtatttgatcaactaacacaagtcgtgaaaggagatcctccgcagctgagtaattctgaggaaagggaattctccccgagtttcatcaactttgtcaacttgtgccttacgaaggatgaatccaaaaggccaaagtataaagagcttctgaaacatccctttattttgatgtatgaagaacgtgccgttgaggtcgcatgctatgtttgtaaaatcctggatcaaatgccagctactcccagctctcccatgtatgtcgattgatatcgctgctacatcagactctagaaaaaagggctgagaggaagcaagacgtaaagaattttcatcccgtatcacagtgtttttattgctcgcccagacaccatgtgcaataagattggtgttcgtttccatcatgtctgtatactcctgtcacctagaacgtgcatccttgtaatacctgattgatcacacagtgttagtgctggtcagagagacctcatcctgctcttttgtgatgaacatattcatgaaatgtggaagtcagtacgatcaagttgttgactgtgattagatcacatcttaaattcatttctagactcaaaacctggagatgcagctactggaatggtgttttgtcagacttccaaatcctggaaggacacagtgatgaatgtactatgtctgaacatagaaactcgggcttgagtgagaagagcttgcacagccaacgagacacattgccttctggagctgggagacaaaggaggaatttactttcttcaccaagtgcaatagattactgatgtgatattctgttgctttacagttacagttgatgtttggggatcgatgtgctcagccaaatttcctgtttgaaatatcatgttaaattagaatgaatttatctttaccaaaaaccatgttgcgttcaaagaggtgaacattaaaatatagagacaggacagaatgtgttcttttctcctttaccagtcctatttttcaatgggaagactcaggagtctgccacttgtcaaagaaggtgctgatcctaagaatttttcattctcagaattcggtgtgctgccaacttgatgttccacctgccacaaaccaccaggactgaaagaagaaaacagtacagaaggcaaagtttacagatgtttttaattctagtattttatctggaacaacttgtagcagctatatatttccccttggtcccaagcctgatactttagccatcataactcactaacagggagaagtagctagtagcaatgtgccttgattgattagataaagatttctagtaggcagcaaaagaccaaatctcagttgtttgcttcttgccatcactggtccaggtcttcagtttccgaatctctttcccttcccctgtggtctattgtcgctatgtgacttgcgcttaatccaatattttgccttttttctatatcaaaaaacctttacagttagcagggatgttccttaccaaggatttttagccccaaatctctcatattcgctagtgtttaaaaggctaagaatagtggggcccagccgatgtggtaggtgataaagaggcatcttttctagagacacattggaccagatgaggatccgaaacggcagcctttacgttcatcacctgctagaacctctcgtagtccatcaccatttcttggcattggaattctactggaaaaaaatacaaaaagcaaaacaaaaccctcagcactgttacaagaggccatttaagtatcttgtgcttcttcacttacccattagccaggttctcattaggtttgcttgggcctccctggcactgaaccttaggctttgtatgacagtgaagcagcactgtgagtggttcaagcacactggaatataaaacagtcatggcctgagatgcaggtgatgccattacagaaccaaatcgtggcacgtattgctgtgtctcctctcagagtgacagtcataaatactgtcaaacaataaagggagaatggtgctgtttaaagtcacatccctgtaaattgcagaattcaaaagtgattatctctttgatctacttgcctcatttccctatcttctcccccacggtatcctaaactttagacttcccactgttctgaaaggagacattgctctatgtctgccttcgaccacagcaagccatcatcctccattgctcccggggactcaagaggaatctgtttctctgctgtcaacttcccatctggctcagcatagggtcactttgccattatgcaaatggagataaaagcaattctgactgtccaggagctaatctgaccgttctattgtgtggatgaccacataagaaggcaattttagtgtattaatcatagattattataaactataaacttaagggcaaggagtttattacaatgtatctttattaaaacaaaagggtgtatagtgttcacaaactgtgaaaatagtgtaagaactgtacattgtgagctctggttatttttctcttgtaccatagaaaaatgtataaaaattatcaaaaagctaatgtgcagggatattgccttatttgtctgtaaaaaatggagctcagtaacataactgcttcttggagctttggaatattttatcctgtattcttgtttgaattcctcctctatttaagatatatacatggaatcgaagtgtttatgtaatagttctatccttttgcctgcaggtcagttgtaataaatctaggatgtgatgatgact

SEQ ID NO: 309335 - DNA, 3861 bp, Homo sapiens
  misc_feature (3770)..(3770): n is a, c, g, or t
  misc_feature (3861)..(3861): n is a, c, g, or t
ccctcggccgtgcgagaggccgagcttgctgcattgcagccgccgcggcgccgctcggctcttcactcccaacaatggcggctccgagcccgagcggcggcggcggctccgggggcggcagcggcagcggcacccccggccccgtagggtccccggcgccaggccacccggccgtcagcagcatgcagggtaaacgcaaagcactgaagttgaattttgcaaatccacctttcaaatctacagcaaggtttactctgaatcccaatcctacaggagttcaaaacccacacatagagagactgagaacacacagcattgagtcatcaggaaaactgaagatctcccctgaacaacactgggatttcactgcagaggacttgaaagaccttggagaaattggacgaggagcttatggttctgtcaacaaaatggtccacaaaccaagtgggcaaataatggcagttaaaagaattcggtcaacagtggatgaaaaagaacaaaaacaacttcttatggatttggatgtagtaatgcggagtagtgattgcccatacattgttcagttttatggtgcactcttcagagagggtgactgttggatctgtatggaactcatgtctacctcgtttgataagttttacaaatatgtatatagtgtattagatgatgttattccagaagaaattttaggcaaaatcactttagcaactgtgaaagcactaaaccacttaaaagaaaacttgaaaattattcacagagatatcaaaccttccaatattcttctggacagaagtggaaatattaagctctgtgacttcggcatcagtggacagcttgtggactctattgccaagacaagagatgctggctgtaggccatacatggcacctgaaagaatagacccaagcgcatcacgacaaggatatgatgtccgctctgatgtctggagtttggggatcacattgtatgagttggccacaggccgatttccttatccaaagtggaatagtgtatttgatcaactaacacaagtcgtgaaaggagatcctccgcagctgagtaattctgaggaaagggaattctccccgagtttcatcaactttgtcaacttgtgccttacgaaggatgaatccaaaaggccaaagtataaagagcttctgaaacatccctttattttgatgtatgaagaacgtgccgttgaggtcgcatgctatgtttgtaaaatcctggatcaaatgccagctactcccagctctcccatgtatgtcgattgatatcgctgctacatcagactctagaaaaaagggctgagaggaagcaagacgtaaagaattttcatcccgtatcacagtgtttttattgctcgcccagacaccatgtgcaataagattggtgttcgtttccatcatgtctgtatactcctgtcacctagaacgtgcatccttgtaatacctgattgatcacacagtgttagtgctggtcagagagacctcatcctgctcttttgtgatgaacatattcatgaaatgtggaagtcagtacgatcaagttgttgactgtgattagatcacatcttaaattcatttctagactcaaaacctggagatgcagctactggaatggtgttttgtcagacttccaaatcctggaaggacacagtgatgaatgtactatgtctgaacatagaaactcgggcttgagtgagaagagcttgcacagccaacgagacacattgccttctggagctgggagacaaaggaggaatttactttcttcaccaagtgcaatagattactgatgtgatattctgttgctttacagttacagttgatgtttggggatcgatgtgctcagccaaatttcctgtttgaaatatcatgttaaattagaatgaatttatctttaccaaaaaccatgttgcgttcaaagaggtgaacattaaaatatagagacaggacagaatgtgttcttttctcctttaccagtcctatttttcaatgggaagactcaggagtctgccacttgtcaaagaaggtgctgatcctaagaatttttcattctcagaattcggtgtgctgccaacttgatgttccacctgccacaaaccaccaggactgaaagaagaaaacagtacagaaggcaaagtttacagatgtttttaattctagtattttatctggaacaacttgtagcagctatatatttccccttggtcccaagcctgatactttagccatcataactcactaacagggagaagtagctagtagcaatgtgccttgattgattagataaagatttctagtaggcagcaaaagaccaaatctcagttgtttgcttcttgccatcactggtccaggtcttcagtttccgaatctctttcccttcccctgtggtctattgtcgctatgtgacttgcgcttaatccaatattttgccttttttctatatcaaaaaacctttacagttagcagggatgttccttaccaaggatttttagccccaaatctctcatattcgctagtgtttaaaaggctaagaatagtggggcccagccgatgtggtaggtgataaagaggcatcttttctagagacacattggaccagatgaggatccgaaacggcagcctttacgttcatcacctgctagaacctctcgtagtccatcaccatttcttggcattggaattctactggaaaaaaatacaaaaagcaaaacaaaaccctcagcactgttacaagaggccatttaagtatcttgtgcttcttcacttacccattagccaggttctcattaggtttgcttgggcctccctggcactgaaccttaggctttgtatgacagtgaagcagcactgtgagtggttcaagcacactggaatataaaacagtcatggcctgagatgcaggtgatgccattacagaaccaaatcgtggcacgtattgctgtgtctcctctcagagtgacagtcataaatactgtcaaacaataaagggagaatggtgctgtttaaagtcacatccctgtaaattgcagaattcaaaagtgattatctctttgatctacttgcctcatttccctatcttctcccccacggtatcctaaactttagacttcccactgttctgaaaggagacattgctctatgtctgccttcgaccacagcaagccatcatcctccattgctcccggggactcaagaggaatctgtttctctgctgtcaacttcccatctggctcagcatagggtcactttgccattatgcaaatggagataaaagcaattctgactgtccaggagctaatctgaccgttctattgtgtggatgaccacataagaaggcaattttagtgtattaatcatagattattataaactataaacttaagggcaaggagtttattacaatgtatctttattaaaacaaaagggtgtatagtgttcacaaactgtgaaaatagtgtaagaactgtacattgtgagctctggttatttttctcttgtaccatagaaaaatgtataaaaattatcaaaaagctaatgtgcagggatattgccttatttgtctgtaaaaaatggagctcagtaacataactgcttcttggagctttggaatattttatcctgtattcttgtttgaattcctcctctatttaagatatatacatggaatcgaagtgtttatgtaatagttctatccttttgcctgcaggtcagttgtaataaatctaggatgtgatgatgactaaaaaaaaaaaacctcctctnctcccctctatattcctatatttaatatccatcaaaaaaaacgcggttaaacgttggattgtcctgggttcacaattgcttgggcttcctn

SEQ ID NO: 309336 - DNA, 3847 bp, Homo sapiens
ccctcggccgtgcgagaggccgagcttgctgcattgcagccgccgcggcgccgctcggctcttcactcccaacaatggcggctccgagcccgagcggcggcggcggctccgggggcggcagcggcagcggcacccccggccccgtagggtccccggcgccaggccacccggccgtcagcagcatgcagggtaaacgcaaagcactgaagttgaattttgcaaatccacctttcaaatctacagcaaggtttactctgaatcccaatcctacaggagttcaaaacccacacatagagagactgagaacacacagcattgagtcatcaggaaaactgaagatctcccctgaacaacactgggatttcactgcagaggacttgaaagaccttggagaaattggacgaggagcttatggttctgtcaacaaaatggtccacaaaccaagtgggcaaataatggcagttaaaagaattcggtcaacagtggatgaaaaagaacaaaaacaacttcttatggatttggatgtagtaatgcggagtagtgattgcccatacattgttcagttttatggtgcactcttcagagagggtgactgttggatctgtatggaactcatgtctacctcgtttgataagttttacaaatatgtatatagtgtattagatgatgttattccagaagaaattttaggcaaaatcactttagcaactgtgaaagcactaaaccacttaaaagaaaacttgaaaattattcacagagatatcaaaccttccaatattcttctggacagaagtggaaatattaagctctgtgacttcggcatcagtggacagcttgtggactctattgccaagacaagagatgctggctgtaggccatacatggcacctgaaagaatagacccaagcgcatcacgacaaggatatgatgtccgctctgatgtctggagtttggggatcacattgtatgagttggccacaggccgatttccttatccaaagtggaatagtgtatttgatcaactaacacaagtcgtgaaaggagatcctccgcagctgagtaattctgaggaaagggaattctccccgagtttcatcaactttgtcaacttgtgccttacgaaggatgaatccaaaaggccaaagtataaagagcttctgaaacatccctttattttgatgtatgaagaacgtgccgttgaggtcgcatgctatgtttgtaaaatcctggatcaaatgccagctactcccagctctcccatgtatgtcgattgatatcgctgctacatcagactctagaaaaaagggctgagaggaagcaagacgtaaagaattttcatcccgtatcacagtgtttttattgctcgcccagacaccatgtgcaataagattggtgttcgtttccatcatgtctgtatactcctgtcacctagaacgtgcatccttgtaatacctgattgatcacacagtgttagtgctggtcagagagacctcatcctgctcttttgtgatgaacatattcatgaaatgtggaagtcagtacgatcaagttgttgactgtgattagatcacatcttaaattcatttctagactcaaaacctggagatgcagctactggaatggtgttttgtcagacttccaaatcctggaaggacacagtgatgaatgtactatgtctgaacatagaaactcgggcttgagtgagaagagcttgcacagccaacgagacacattgccttctggagctgggagacaaaggaggaatttactttcttcaccaagtgcaatagattactgatgtgatattctgttgctttacagttacagttgatgtttggggatcgatgtgctcagccaaatttcctgtttgaaatatcatgttaaattagaatgaatttatctttaccaaaaaccatgttgcgttcaaagaggtgaacattaaaatatagagacaggacagaatgtgttcttttctcctttaccagtcctatttttcaatgggaagactcaggagtctgccacttgtcaaagaaggtgctgatcctaagaatttttcattctcagaattcggtgtgctgccaacttgatgttccacctgccacaaaccaccaggactgaaagaagaaaacagtacagaaggcaaagtttacagatgtttttaattctagtattttatctggaacaacttgtagcagctatatatttccccttggtcccaagcctgatactttagccatcataactcactaacagggagaagtagctagtagcaatgtgccttgattgattagataaagatttctagtaggcagcaaaagaccaaatctcagttgtttgcttcttgccatcactggtccaggtcttcagtttccgaatctctttcccttcccctgtggtctattgtcgctatgtgacttgcgcttaatccaatattttgccttttttctatatcaaaaaacctttacagttagcagggatgttccttaccaaggatttttagccccaaatctctcatattcgctagtgtttaaaaggctaagaatagtggggcccagccgatgtggtaggtgataaagaggcatcttttctagagacacattggaccagatgaggatccgaaacggcagcctttacgttcatcacctgctagaacctctcgtagtccatcaccatttcttggcattggaattctactggaaaaaaatacaaaaagcaaaacaaaaccctcagcactgttacaagaggccatttaagtatcttgtgcttcttcacttacccattagccaggttctcattaggtttgcttgggcctccctggcactgaaccttaggctttgtatgacagtgaagcagcactgtgagtggttcaagcacactggaatataaaacagtcatggcctgagatgcaggtgatgccattacagaaccaaatcgtggcacgtattgctgtgtctcctctcagagtgacagtcataaatactgtcaaacaataaagggagaatggtgctgtttaaagtcacatccctgtaaattgcagaattcaaaagtgattatctctttgatctacttgcctcatttccctatcttctcccccacggtatcctaaactttagacttcccactgttctgaaaggagacattgctctatgtctgccttcgaccacagcaagccatcatcctccattgctcccggggactcaagaggaatctgtttctctgctgtcaacttcccatctggctcagcatagggtcactttgccattatgcaaatggagataaaagcaattctgactgtccaggagctaatctgaccgttctattgtgtggatgaccacataagaaggcaattttagtgtattaatcatagattattataaactataaacttaagggcaaggagtttattacaatgtatctttattaaaacaaaagggtgtatagtgttcacaaactgtgaaaatagtgtaagaactgtacattgtgagctctggttatttttctcttgtaccatagaaaaatgtataaaaattatcaaaaagctaatgtgcagggatattgccttatttgtctgtaaaaaatggagctcagtaacataactgcttcttggagctttggaatattttatcctgtattcttgtttgaattcctcctctatttaagatatatacatggaatcgaagtgtttatgtaatagttctatccttttgcctgcaggtcagttgtaataaatctaggatgtgatgatgactttgtaatttgattttctgaaatcagaccctgagaggggaaaatcttaaagtaaattacattaaattatctgtgcatttcacaccagggaaaatgacct

SEQ ID NO: 309337 - DNA, 3650 bp, Homo sapiens
tagatcacagcaaagatactcatttgttggtagtgccaggaagcaggcagtttccatggtaactgacagaccgagtttactgtggaaatttccggaattaacagagctgcattgcagaaggatgcataaagcagtattcatctagagatcgtaacagtacggacacagaagaacagttgcagtgatgtgcaggagagagactgagaacacacagcattgagtcatcaggaaaactgaagatctcccctgaacaacactgggatttcactgcagaggacttgaaagaccttggagaaattggacgaggagcttatggttctgtcaacaaaatggtccacaaaccaagtgggcaaataatggcagttaaaagaattcggtcaacagtggatgaaaaagaacaaaaacaacttcttatggatttggatgtagtaatgcggagtagtgattgcccatacattgttcagttttatggtgcactcttcagagagggtgactgttggatctgtatggaactcatgtctacctcgtttgataagttttacaaatatgtatatagtgtattagatgatgttattccagaagaaattttaggcaaaatcactttagcaactgtgaaagcactaaaccacttaaaagaaaacttgaaaattattcacagagatatcaaaccttccaatattcttctggacagaagtggaaatattaagctctgtgacttcggcatcagtggacagcttgtggactctattgccaagacaagagatgctggctgtaggccatacatggcacctgaaagaatagacccaagcgcatcacgacaaggatatgatgtccgctctgatgtctggagtttggggatcacattgtatgagttggccacaggccgatttccttatccaaagtggaatagtgtatttgatcaactaacacaagtcgtgaaaggagatcctccgcagctgagtaattctgaggaaagggaattctccccgagtttcatcaactttgtcaacttgtgccttacgaaggatgaatccaaaaggccaaagtataaagagcttctgaaacatccctttattttgatgtatgaagaacgtgccgttgaggtcgcatgctatgtttgtaaaatcctggatcaaatgccagctactcccagctctcccatgtatgtcgattgatatcgctgctacatcagactctagaaaaaagggctgagaggaagcaagacgtaaagaattttcatcccgtatcacagtgtttttattgctcgcccagacaccatgtgcaataagattggtgttcgtttccatcatgtctgtatactcctgtcacctagaacgtgcatccttgtaatacctgattgatcacacagtgttagtgctggtcagagagacctcatcctgctcttttgtgatgaacatattcatgaaatgtggaagtcagtacgatcaagttgttgactgtgattagatcacatcttaaattcatttctagactcaaaacctggagatgcagctactggaatggtgttttgtcagacttccaaatcctggaaggacacagtgatgaatgtactatgtctgaacatagaaactcgggcttgagtgagaagagcttgcacagccaacgagacacattgccttctggagctgggagacaaaggaggaatttactttcttcaccaagtgcaatagattactgatgtgatattctgttgctttacagttacagttgatgtttggggatcgatgtgctcagccaaatttcctgtttgaaatatcatgttaaattagaatgaatttatctttaccaaaaaccatgttgcgttcaaagaggtgaacattaaaatatagagacaggacagaatgtgttcttttctcctttaccagtcctatttttcaatgggaagactcaggagtctgccacttgtcaaagaaggtgctgatcctaagaatttttcattctcagaattcggtgtgctgccaacttgatgttccacctgccacaaaccaccaggactgaaagaagaaaacagtacagaaggcaaagtttacagatgtttttaattctagtattttatctggaacaacttgtagcagctatatatttccccttggtcccaagcctgatactttagccatcataactcactaacagggagaagtagctagtagcaatgtgccttgattgattagataaagatttctagtaggcagcaaaagaccaaatctcagttgtttgcttcttgccatcactggtccaggtcttcagtttccgaatctctttcccttcccctgtggtctattgtcgctatgtgacttgcgcttaatccaatattttgccttttttctatatcaaaaaacctttacagttagcagggatgttccttaccaaggatttttagccccaaatctctcatattcgctagtgtttaaaaggctaagaatagtggggcccagccgatgtggtaggtgataaagaggcatcttttctagagacacattggaccagatgaggatccgaaacggcagcctttacgttcatcacctgctagaacctctcgtagtccatcaccatttcttggcattggaattctactggaaaaaaatacaaaaagcaaaacaaaaccctcagcactgttacaagaggccatttaagtatcttgtgcttcttcacttacccattagccaggttctcattaggtttgcttgggcctccctggcactgaaccttaggctttgtatgacagtgaagcagcactgtgagtggttcaagcacactggaatataaaacagtcatggcctgagatgcaggtgatgccattacagaaccaaatcgtggcacgtattgctgtgtctcctctcagagtgacagtcataaatactgtcaaacaataaagggagaatggtgctgtttaaagtcacatccctgtaaattgcagaattcaaaagtgattatctctttgatctacttgcctcatttccctatcttctcccccacggtatcctaaactttagacttcccactgttctgaaaggagacattgctctatgtctgccttcgaccacagcaagccatcatcctccattgctcccggggactcaagaggaatctgtttctctgctgtcaacttcccatctggctcagcatagggtcactttgccattatgcaaatggagataaaagcaattctgactgtccaggagctaatctgaccgttctattgtgtggatgaccacataagaaggcaattttagtgtattaatcatagattattataaactataaacttaagggcaaggagtttattacaatgtatctttattaaaacaaaagggtgtatagtgttcacaaactgtgaaaatagtgtaagaactgtacattgtgagctctggttatttttctcttgtaccatagaaaaatgtataaaaattatcaaaaagctaatgtgcagggatattgccttatttgtctgtaaaaaatggagctcagtaacataactgcttcttggagctttggaatattttatcctgtattcttgtttgaattcctcctctatttaagatatatacatggaatcgaagtgtttatgtaatagttctatccttttgcctgcaggtcagttgtaataaatctaggatgtgatgatgact

SEQ ID NO: 309338 - DNA, 3646 bp, Homo sapiens
ccctcggccgtgcgagaggccgagcttgctgcattgcagccgccgcggcgccgctcggctcttcactcccaacaatggcggctccgagcccgagcggcggcggcggctccgggggcggcagcggcagcggcacccccggccccgtagggtccccggcgccaggccacccggccgtcagcagcatgcaggagagagactgagaacacacagcattgagtcatcaggaaaactgaagatctcccctgaacaacactgggatttcactgcagaggacttgaaagaccttggagaaattggacgaggagcttatggttctgtcaacaaaatggtccacaaaccaagtgggcaaataatggcagttaaaagaattcggtcaacagtggatgaaaaagaacaaaaacaacttcttatggatttggatgtagtaatgcggagtagtgattgcccatacattgttcagttttatggtgcactcttcagagagggtgactgttggatctgtatggaactcatgtctacctcgtttgataagttttacaaatatgtatatagtgtattagatgatgttattccagaagaaattttaggcaaaatcactttagcaactgtgaaagcactaaaccacttaaaagaaaacttgaaaattattcacagagatatcaaaccttccaatattcttctggacagaagtggaaatattaagctctgtgacttcggcatcagtggacagcttgtggactctattgccaagacaagagatgctggctgtaggccatacatggcacctgaaagaatagacccaagcgcatcacgacaaggatatgatgtccgctctgatgtctggagtttggggatcacattgtatgagttggccacaggccgatttccttatccaaagtggaatagtgtatttgatcaactaacacaagtcgtgaaaggagatcctccgcagctgagtaattctgaggaaagggaattctccccgagtttcatcaactttgtcaacttgtgccttacgaaggatgaatccaaaaggccaaagtataaagagcttctgaaacatccctttattttgatgtatgaagaacgtgccgttgaggtcgcatgctatgtttgtaaaatcctggatcaaatgccagctactcccagctctcccatgtatgtcgattgatatcgctgctacatcagactctagaaaaaagggctgagaggaagcaagacgtaaagaattttcatcccgtatcacagtgtttttattgctcgcccagacaccatgtgcaataagattggtgttcgtttccatcatgtctgtatactcctgtcacctagaacgtgcatccttgtaatacctgattgatcacacagtgttagtgctggtcagagagacctcatcctgctcttttgtgatgaacatattcatgaaatgtggaagtcagtacgatcaagttgttgactgtgattagatcacatcttaaattcatttctagactcaaaacctggagatgcagctactggaatggtgttttgtcagacttccaaatcctggaaggacacagtgatgaatgtactatgtctgaacatagaaactcgggcttgagtgagaagagcttgcacagccaacgagacacattgccttctggagctgggagacaaaggaggaatttactttcttcaccaagtgcaatagattactgatgtgatattctgttgctttacagttacagttgatgtttggggatcgatgtgctcagccaaatttcctgtttgaaatatcatgttaaattagaatgaatttatctttaccaaaaaccatgttgcgttcaaagaggtgaacattaaaatatagagacaggacagaatgtgttcttttctcctttaccagtcctatttttcaatgggaagactcaggagtctgccacttgtcaaagaaggtgctgatcctaagaatttttcattctcagaattcggtgtgctgccaacttgatgttccacctgccacaaaccaccaggactgaaagaagaaaacagtacagaaggcaaagtttacagatgtttttaattctagtattttatctggaacaacttgtagcagctatatatttccccttggtcccaagcctgatactttagccatcataactcactaacagggagaagtagctagtagcaatgtgccttgattgattagataaagatttctagtaggcagcaaaagaccaaatctcagttgtttgcttcttgccatcactggtccaggtcttcagtttccgaatctctttcccttcccctgtggtctattgtcgctatgtgacttgcgcttaatccaatattttgccttttttctatatcaaaaaacctttacagttagcagggatgttccttaccaaggatttttagccccaaatctctcatattcgctagtgtttaaaaggctaagaatagtggggcccagccgatgtggtaggtgataaagaggcatcttttctagagacacattggaccagatgaggatccgaaacggcagcctttacgttcatcacctgctagaacctctcgtagtccatcaccatttcttggcattggaattctactggaaaaaaatacaaaaagcaaaacaaaaccctcagcactgttacaagaggccatttaagtatcttgtgcttcttcacttacccattagccaggttctcattaggtttgcttgggcctccctggcactgaaccttaggctttgtatgacagtgaagcagcactgtgagtggttcaagcacactggaatataaaacagtcatggcctgagatgcaggtgatgccattacagaaccaaatcgtggcacgtattgctgtgtctcctctcagagtgacagtcataaatactgtcaaacaataaagggagaatggtgctgtttaaagtcacatccctgtaaattgcagaattcaaaagtgattatctctttgatctacttgcctcatttccctatcttctcccccacggtatcctaaactttagacttcccactgttctgaaaggagacattgctctatgtctgccttcgaccacagcaagccatcatcctccattgctcccggggactcaagaggaatctgtttctctgctgtcaacttcccatctggctcagcatagggtcactttgccattatgcaaatggagataaaagcaattctgactgtccaggagctaatctgaccgttctattgtgtggatgaccacataagaaggcaattttagtgtattaatcatagattattataaactataaacttaagggcaaggagtttattacaatgtatctttattaaaacaaaagggtgtatagtgttcacaaactgtgaaaatagtgtaagaactgtacattgtgagctctggttatttttctcttgtaccatagaaaaatgtataaaaattatcaaaaagctaatgtgcagggatattgccttatttgtctgtaaaaaatggagctcagtaacataactgcttcttggagctttggaatattttatcctgtattcttgtttgaattcctcctctatttaagatatatacatggaatcgaagtgtttatgtaatagttctatccttttgcctgcaggtcagttgtaataaatctaggatgtgatgatgact

SEQ ID NO: 309339 - DNA, 3711 bp, Homo sapiens
ccctcggccgtgcgagaggccgagcttgctgcattgcagccgccgcggcgccgctcggctcttcactcccaacaatggcggctccgagcccgagcggcggcggcggctccgggggcggcagcggcagcggcacccccggccccgtagggtccccggcgccaggccacccggccgtcagcagcatgcagggtaaacgcaaagcactgaagttgaattttgcaaatccacctttcaaatctacagcaaggtttactctgaatcccaatcctacaggagttcaaaacccacacatagagagactgagaacacacagcattgagtcatcaggaaaactgaagatctcccctgaacaacactgggatttcactgcagaggacttgaaagaccttggagaaattggacgaggagcttatggttctgtcaacaaaatggtccacaaaccaagtgggcaaataatggcagttaaaagaattcggtcaacagtggatgaaaaagaacaaaaacaacttcttatggatttggatgtagtaatgcggagtagtgattgcccatacattgttcagttttatggtgcactcttcagagagggtgactgttggatctgtatggaactcatgtctacctcgtttgataagttttacaaatatgtatatagtgtattagatgatgttattccagaagaaattttaggcaaaatcactttagcaactgtgaaagcactaaaccacttaaaagaaaacttgaaaattattcacagagaatattaagctctgtgacttcggcatcagtggacagcttgtggactctattgccaagacaagagatgctggctgtaggccatacatggcacctgaaagaatagacccaagcgcatcacgacaaggatatgatgtccgctctgatgtctggagtttggggatcacattgtatgagttggccacaggccgatttccttatccaaagtggaatagtgtatttgatcaactaacacaagtcgtgaaaggagatcctccgcagctgagtaattctgaggaaagggaattctccccgagtttcatcaactttgtcaacttgtgccttacgaaggatgaatccaaaaggccaaagtataaagagcttctgaaacatccctttattttgatgtatgaagaacgtgccgttgaggtcgcatgctatgtttgtaaaatcctggatcaaatgccagctactcccagctctcccatgtatgtcgattgatatcgctgctacatcagactctagaaaaaagggctgagaggaagcaagacgtaaagaattttcatcccgtatcacagtgtttttattgctcgcccagacaccatgtgcaataagattggtgttcgtttccatcatgtctgtatactcctgtcacctagaacgtgcatccttgtaatacctgattgatcacacagtgttagtgctggtcagagagacctcatcctgctcttttgtgatgaacatattcatgaaatgtggaagtcagtacgatcaagttgttgactgtgattagatcacatcttaaattcatttctagactcaaaacctggagatgcagctactggaatggtgttttgtcagacttccaaatcctggaaggacacagtgatgaatgtactatgtctgaacatagaaactcgggcttgagtgagaagagcttgcacagccaacgagacacattgccttctggagctgggagacaaaggaggaatttactttcttcaccaagtgcaatagattactgatgtgatattctgttgctttacagttacagttgatgtttggggatcgatgtgctcagccaaatttcctgtttgaaatatcatgttaaattagaatgaatttatctttaccaaaaaccatgttgcgttcaaagaggtgaacattaaaatatagagacaggacagaatgtgttcttttctcctttaccagtcctatttttcaatgggaagactcaggagtctgccacttgtcaaagaaggtgctgatcctaagaatttttcattctcagaattcggtgtgctgccaacttgatgttccacctgccacaaaccaccaggactgaaagaagaaaacagtacagaaggcaaagtttacagatgtttttaattctagtattttatctggaacaacttgtagcagctatatatttccccttggtcccaagcctgatactttagccatcataactcactaacagggagaagtagctagtagcaatgtgccttgattgattagataaagatttctagtaggcagcaaaagaccaaatctcagttgtttgcttcttgccatcactggtccaggtcttcagtttccgaatctctttcccttcccctgtggtctattgtcgctatgtgacttgcgcttaatccaatattttgccttttttctatatcaaaaaacctttacagttagcagggatgttccttaccaaggatttttagccccaaatctctcatattcgctagtgtttaaaaggctaagaatagtggggcccagccgatgtggtaggtgataaagaggcatcttttctagagacacattggaccagatgaggatccgaaacggcagcctttacgttcatcacctgctagaacctctcgtagtccatcaccatttcttggcattggaattctactggaaaaaaatacaaaaagcaaaacaaaaccctcagcactgttacaagaggccatttaagtatcttgtgcttcttcacttacccattagccaggttctcattaggtttgcttgggcctccctggcactgaaccttaggctttgtatgacagtgaagcagcactgtgagtggttcaagcacactggaatataaaacagtcatggcctgagatgcaggtgatgccattacagaaccaaatcgtggcacgtattgctgtgtctcctctcagagtgacagtcataaatactgtcaaacaataaagggagaatggtgctgtttaaagtcacatccctgtaaattgcagaattcaaaagtgattatctctttgatctacttgcctcatttccctatcttctcccccacggtatcctaaactttagacttcccactgttctgaaaggagacattgctctatgtctgccttcgaccacagcaagccatcatcctccattgctcccggggactcaagaggaatctgtttctctgctgtcaacttcccatctggctcagcatagggtcactttgccattatgcaaatggagataaaagcaattctgactgtccaggagctaatctgaccgttctattgtgtggatgaccacataagaaggcaattttagtgtattaatcatagattattataaactataaacttaagggcaaggagtttattacaatgtatctttattaaaacaaaagggtgtatagtgttcacaaactgtgaaaatagtgtaagaactgtacattgtgagctctggttatttttctcttgtaccatagaaaaatgtataaaaattatcaaaaagctaatgtgcagggatattgccttatttgtctgtaaaaaatggagctcagtaacataactgcttcttggagctttggaatattttatcctgtattcttgtttgaattcctcctctatttaagatatatacatggaatcgaagtgtttatgtaatagttctatccttttgcctgcaggtcagttgtaataaatctaggatgtgatgatgact

SEQ ID NO: 309340 - DNA, 3616 bp, Homo sapiens
ccctcggccgtgcgagaggccgagcttgctgcattgcagccgccgcggcgccgctcggctcttcactcccaacaatggcggctccgagcccgagcggcggcggcggctccgggggcggcagcggcagcggcacccccggccccgtagggtccccggcgccaggccacccggccgtcagcagcatgcagggtaaacgcaaagcactgaagttgaattttgcaaatccacctttcaaatctacagcaaggtttactctgaatcccaatcctacaggagttcaaaacccacacatagagagactgagaacacacagcattgagtcatcaggaaaactgaagatctcccctgaacaacactgggatttcactgcagaggacttgaaagaccttggagaaattggacgaggagcttatggttctgtcaacaaaatggtccacaaaccaagtgggcaaataatggcagttaaaagaattcggtcaacagtggatgaaaaagaacaaaaacaacttcttatggatttggatgtagtaatgcggagtagtgattgcccatacattgttcagttttatggtgcactcttcagagagggtgactgttggatctgtatggaactcatgtctacctcgtttgataagttttacaaatatgtatatagtgtattagatgatgttattccagaagaaattttaggcaaaatcactttagcaactgtgaaagcactaaaccacttaaaagaaaacttgaaaattattcacagagatatcaaaccttccaatattcttctggacagaagtggaaatattaagctctgtgacttcggcatcagtggacagcttgtggactctattgccaagacaagagatgctggctgtaggccatacatggcacctgaaagaatagacccaagcgcatcacgacaaggatatgatgtccgctctgatgtctggagtttggggatcacattgtatgagttggccacaggccgatttccttatccaaagtggaatagtgtatttgatcaactaacacaagtcgtgaaaggagatcctccgcagctgagtaattctgaggaaagggaattctccccgagtttcatcaactttgtcaacttgtgccttacgaaggatgaatccaaaaggccaaagtataaagagcttctgaaacatccctttattttgatgtatgaagaacgtgccgttgaggtcgcatgctatgtttgtaaaatcctggatcaaatgccagctactcccagctctcccatgtatgtcgattgatatcgctgctacatcagacacctagaacgtgcatccttgtaatacctgattgatcacacagtgttagtgctggtcagagagacctcatcctgctcttttgtgatgaacatattcatgaaatgtggaagtcagtacgatcaagttgttgactgtgattagatcacatcttaaattcatttctagactcaaaacctggagatgcagctactggaatggtgttttgtcagacttccaaatcctggaaggacacagtgatgaatgtactatgtctgaacatagaaactcgggcttgagtgagaagagcttgcacagccaacgagacacattgccttctggagctgggagacaaaggaggaatttactttcttcaccaagtgcaatagattactgatgtgatattctgttgctttacagttacagttgatgtttggggatcgatgtgctcagccaaatttcctgtttgaaatatcatgttaaattagaatgaatttatctttaccaaaaaccatgttgcgttcaaagaggtgaacattaaaatatagagacaggacagaatgtgttcttttctcctttaccagtcctatttttcaatgggaagactcaggagtctgccacttgtcaaagaaggtgctgatcctaagaatttttcattctcagaattcggtgtgctgccaacttgatgttccacctgccacaaaccaccaggactgaaagaagaaaacagtacagaaggcaaagtttacagatgtttttaattctagtattttatctggaacaacttgtagcagctatatatttccccttggtcccaagcctgatactttagccatcataactcactaacagggagaagtagctagtagcaatgtgccttgattgattagataaagatttctagtaggcagcaaaagaccaaatctcagttgtttgcttcttgccatcactggtccaggtcttcagtttccgaatctctttcccttcccctgtggtctattgtcgctatgtgacttgcgcttaatccaatattttgccttttttctatatcaaaaaacctttacagttagcagggatgttccttaccaaggatttttagccccaaatctctcatattcgctagtgtttaaaaggctaagaatagtggggcccagccgatgtggtaggtgataaagaggcatcttttctagagacacattggaccagatgaggatccgaaacggcagcctttacgttcatcacctgctagaacctctcgtagtccatcaccatttcttggcattggaattctactggaaaaaaatacaaaaagcaaaacaaaaccctcagcactgttacaagaggccatttaagtatcttgtgcttcttcacttacccattagccaggttctcattaggtttgcttgggcctccctggcactgaaccttaggctttgtatgacagtgaagcagcactgtgagtggttcaagcacactggaatataaaacagtcatggcctgagatgcaggtgatgccattacagaaccaaatcgtggcacgtattgctgtgtctcctctcagagtgacagtcataaatactgtcaaacaataaagggagaatggtgctgtttaaagtcacatccctgtaaattgcagaattcaaaagtgattatctctttgatctacttgcctcatttccctatcttctcccccacggtatcctaaactttagacttcccactgttctgaaaggagacattgctctatgtctgccttcgaccacagcaagccatcatcctccattgctcccggggactcaagaggaatctgtttctctgctgtcaacttcccatctggctcagcatagggtcactttgccattatgcaaatggagataaaagcaattctgactgtccaggagctaatctgaccgttctattgtgtggatgaccacataagaaggcaattttagtgtattaatcatagattattataaactataaacttaagggcaaggagtttattacaatgtatctttattaaaacaaaagggtgtatagtgttcacaaactgtgaaaatagtgtaagaactgtacattgtgagctctggttatttttctcttgtaccatagaaaaatgtataaaaattatcaaaaagctaatgtgcagggatattgccttatttgtctgtaaaaaatggagctcagtaacataactgcttcttggagctttggaatattttatcctgtattcttgtttgaattcctcctctatttaagatatatacatggaatcgaagtgtttatgtaatagttctatccttttgcctgcaggtcagttgtaataaatctaggatgtgatgatgact

SEQ ID NO: 309341 - DNA, 2681 bp, Homo sapiens
caaattaattactatagcttccaaattaaaaaaacccggggcgcttactggtaacaagcagaatcctaaggccaaagtacaaagagcttctgaaacatccctttattttgatgtatgaagaacgtgccgttgaggtcgcatgctatgtttgtaaaatcctggatcaaatgccagctactcccagctctcccatgtatgtcgattgatatcgctgctacatcagactctagaaaaaagggctgagaggaagcaagacgtaaagaattttcatcccgtatcacagtgtttttattgctcgcccagacaccatgtgcaataagattggtgttcgtttccatcatgtctgtatactcctgtcacctagaacgtgcatccttgtaatacctgattgatcacacagtgttagtgctggtcagagagacctcatcctgctcttttgtgatgaacatattcatgaaatgtggaagtcagtacgatcaagttgttgactgtgattagatcacatcttaaattcatttctagactcaaaacctggagatgcagctactggaatggtgttttgtcagacttccaaatcctggaaggacacagtgatgaatgtactatgtctgaacatagaaactcgggcttgagtgagaagagcttgcacagccaacgagacacattgccttctggagctgggagacaaaggaggaatttactttcttcaccaagtgcaatagattactgatgtgatattctgttgctttacagttacagttgatgtttggggatcgatgtgctcagccaaatttcctgtttgaaatatcatgttaaattagaatgaatttatctttaccaaaaaccatgttgcgttcaaagaggtgaacattaaaatatagagacaggacagaatgtgttcttttctcctttaccagtcctatttttcaatgggaagactcaggagtctgccacttgtcaaagaaggtgctgatcctaagaatttttcattctcagaattcggtgtgctgccaacttgatgttccacctgccacaaaccaccaggactgaaagaagaaaacagtacagaaggcaaagtttacagatgtttttaattctagtattttatctggaacaacttgtagcagctatatatttccccttggtcccaagcctgatactttagccatcataactcactaacagggagaagtagctagtagcaatgtgccttgattgattagataaagatttctagtaggcagcaaaagaccaaatctcagttgtttgcttcttgccatcactggtccaggtcttcagtttccgaatctctttcccttcccctgtggtctattgtcgctatgtgacttgcgcttaatccaatattttgccttttttctatatcaaaaaacctttacagttagcagggatgttccttaccaaggatttttagccccaaatctctcatattcgctagtgtttaaaaggctaagaatagtggggcccagccgatgtggtaggtgataaagaggcatcttttctagagacacattggaccagatgaggatccgaaacggcagcctttacgttcatcacctgctagaacctctcgtagtccatcaccatttcttggcattggaattctactggaaaaaaatacaaaaagcaaaacaaaaccctcagcactgttacaagaggccatttaagtatcttgtgcttcttcacttacccattagccaggttctcattaggtttgcttgggcctccctggcactgaaccttaggctttgtatgacagtgaagcagcactgtgagtggttcaagcacactggaatataaaacagtcatggcctgagatgcaggtgatgccattacagaaccaaatcgtggcacgtattgctgtgtctcctctcagagtgacagtcataaatactgtcaaacaataaagggagaatggtgctgtttaaagtcacatccctgtaaattgcagaattcaaaagtgattatctctttgatctacttgcctcatttccctatcttctcccccacggtatcctaaactttagacttcccactgttctgaaaggagacattgctctatgtctgccttcgaccacagcaagccatcatcctccattgctcccggggactcaagaggaatctgtttctctgctgtcaacttcccatctggctcagcatagggtcactttgccattatgcaaatggagataaaagcaattctgactgtccaggagctaatctgaccgttctattgtgtggatgaccacataagaaggcaattttagtgtattaatcatagattattataaactataaacttaagggcaaggagtttattacaatgtatctttattaaaacaaaagggtgtatagtgttcacaaactgtgaaaatagtgtaagaactgtacattgtgagctctggttatttttctcttgtaccatagaaaaatgtataaaaattatcaaaaagctaatgtgcagggatattgccttatttgtctgtaaaaaatggagctcagtaacataactgcttcttggagctttggaatattttatcctgtattcttgtttgaattcctcctctatttaagatatatacatggaatcgaagtgtttatgtaatagttctatccttttgcctgcaggtcagttgtaataaatctaggatgtgatgatgact

SEQ ID NO: 309342 - DNA, 2049 bp, Homo sapiens
cgagctcggtacctgacagtaaaatgaacacattgccttctggagctgggagacaaaggaggaatttactttcttcaccaagtgcaatagattactgatgtgatattctgttgctttacagttacagttgatgtttggggatcgatgtgctcagccaaatttcctgtttgaaatatcatgttaaattagaatgaatttatctttaccaaaaaccatgttgcgttcaaagaggtgaacattaaaatatagagacaggacagaatgtgttcttttctcctttaccagtcctatttttcaatgggaagactcaggagtctgccacttgtcaaagaaggtgctgatcctaagaatttttcattctcagaattcggtgtgctgccaacttgatgttccacctgccacaaaccaccaggactgaaagaagaaaacagtacagaaggcaaagtttacagatgtttttaattctagtattttatctggaacaacttgtagcagctatatatttccccttggtcccaagcctgatactttagccatcataactcactaacagggagaagtagctagtagcaatgtgccttgattgattagataaagatttctagtaggcagcaaaagaccaaatctcagttgtttgcttcttgccatcactggtccaggtcttcagtttccgaatctctttcccttcccctgtggtctattgtcgctatgtgacttgcgcttaatccaatattttgccttttttctatatcaaaaaacctttacagttagcagggatgttccttaccaaggatttttagccccaaatctctcatattcgctagtgtttaaaaggctaagaatagtggggcccagccgatgtggtaggtgataaagaggcatcttttctagagacacattggaccagatgaggatccgaaacggcagcctttacgttcatcacctgctagaacctctcgtagtccatcaccatttcttggcattggaattctactggaaaaaaatacaaaaagcaaaacaaaaccctcagcactgttacaagaggccatttaagtatcttgtgcttcttcacttacccattagccaggttctcattaggtttgcttgggcctccctggcactgaaccttaggctttgtatgacagtgaagcagcactgtgagtggttcaagcacactggaatataaaacagtcatggcctgagatgcaggtgatgccattacagaaccaaatcgtggcacgtattgctgtgtctcctctcagagtgacagtcataaatactgtcaaacaataaagggagaatggtgctgtttaaagtcacatccctgtaaattgcagaattcaaaagtgattatctctttgatctacttgcctcatttccctatcttctcccccacggtatcctaaactttagacttcccactgttctgaaaggagacattgctctatgtctgccttcgaccacagcaagccatcatcctccattgctcccggggactcaagaggaatctgtttctctgctgtcaacttcccatctggctcagcatagggtcactttgccattatgcaaatggagataaaagcaattctgactgtccaggagctaatctgaccgttctattgtgtggatgaccacataagaaggcaattttagtgtattaatcatagattattataaactataaacttaagggcaaggagtttattacaatgtatctttattaaaacaaaagggtgtatagtgttcacaaactgtgaaaatagtgtaagaactgtacattgtgagctctggttatttttctcttgtaccatagaaaaatgtataaaaattatcaaaaagctaatgtgcagggatattgccttatttgtctgtaaaaaatggagctcagtaacataactgcttcttggagctttggaatattttatcctgtattcttgtttgaattcctcctctatttaagatatatacatggaatcgaagtgtttatgtaatagttctatccttttgcctgcaggtcagttgtaataaatctaggatgtgatgatgact

SEQ ID NO: 309343 - DNA, 1957 bp, Homo sapiens
ccctcggccgtgcgagaggccgagcttgctgcattgcagccgccgcggcgccgctcggctcttcactcccaacaatggcggctccgagcccgagcggcggcggcggctccgggggcggcagcggcagcggcacccccggccccgtagggtccccggcgccaggccacccggccgtcagcagcatgcagggtaaacgcaaagcactgaagttgaattttgcaaatccacctttcaaatctacagcaaggtttactctgaatcccaatcctacaggagttcaaaacccacacatagagagactgagaacacacagcattgagtcatcaggaaaactgaagatctcccctgaacaacactgggatttcactgcagaggacttgaaagaccttggagaaattggacgaggagcttatggttctgtcaacaaaatggtccacaaaccaagtgggcaaataatggcagttaaaagaattcggtcaacagtggatgaaaaagaacaaaaacaacttcttatggatttggatgtagtaatgcggagtagtgattgcccatacattgttcagttttatggtgcactcttcagagagggtgactgttggatctgtatggaactcatgtctacctcgtttgataagttttacaaatatgtatatagtgtattagatgatgttattccagaagaaattttaggcaaaatcactttagcaactgtgaaagcactaaaccacttaaaagaaaacttgaaaattattcacagagatatcaaaccttccaatattcttctggacagaagtggaaatattaagctctgtgacttcggcatcagtggacagcttgtggactctattgccaagacaagagatgctggctgtaggccatacatggcacctgaaagaatagacccaagcgcatcacgacaaggatatgatgtccgctctgatgtctggagtttggggatcacattgtatgagttggccacaggccgatttccttatccaaagtggaatagtgtatttgatcaactaacacaagtcgtgaaaggagatcctccgcagctgagtaattctgaggaaagggaattctccccgagtttcatcaactttgtcaacttgtgccttacgaaggatgaatccaaaaggccaaagtataaagagcttctgaaacatccctttattttgatgtatgaagaacgtgccgttgaggtcgcatgctatgtttgtaaaatcctggatcaaatgccagctactcccagctctcccatgtatgtcgattgatatcgctgctacatcagactctagaaaaaagggctgagaggaagcaagacgtaaagaattttcatcccgtatcacagtgtttttattgctcgcccagacaccatgtgcaataagattggtgttcgtttccatcatgtctgtatactcctgtcacctagaacgtgcatccttgtaatacctgattgatcacacagtgttagtgctggtcagagagacctcatcctgctcttttgtgatgaacatattcatgaaatgtggaagtcagtacgatcaagttgttgactgtgattagatcacatcttaaattcatttctagactcaaaacctggagatgcagctactggaatggtgttttgtcagacttccaaatcctggaaggacacagtgatgaatgtactatgtctgaacatagaaactcgggcttgagtgagaagagcttgcacagccaacgagacacattgccttctggagctgggagacaaaggaggaatttactttcttcaccaagtgcaatagattactgatgtgatattctgttgctttacagttacagttgatgtttggggatcgatgtgctcagccaaatttcctgtttgaaatatcatgttaaattagaatgaatttatctttaccaaaaaccatgttgcgttcaaagaggtgaacattaaaatatagagacagga

SEQ ID NO: 309344 - DNA, 1355 bp, Homo sapiens
gaaaatctttctagatcattcgttatggcgcgcggtccctgtcacggtagaagtgaacaatggctcatagctcgtctatcctacgcatgatcctggtcatggactagtagctatgtgaagtgctcaccacgtaataatagaacgcccgagtgggagcgatgcctgttctgagacgaacatcctggatgccgcagtactgaggtcagttactggatctcattctaacgatggcagttccacatgcgtagcatcgcatcatcgatattacagccccgactcctgttggcattggaattctactggaaaaaaatacaaaaagcaaaacaaaaccctcagcactgttacaagaggccatttaagtatcttgtgcttcttcacttacccattagccaggttctcattaggtttgcttgggcctccctggcactgaaccttaggctttgtatgacagtgaagcagcactgtgagtggttcaagcacactggaatataaaacagtcatggcctgagatgcaggtgatgccattacagaaccaaatcgtggcacgtattgctgtgtctcctctcagagtgacagtcataaatactgtcaaacaataaagggagaatggtgctgtttaaagtcacatccctgtaaattgcagaattcaaaagtgattatctctttgatctacttgcctcatttccctatcttctcccccacggtatcctaaactttagacttcccactgttctgaaaggagacattgctctatgtctgccttcgaccacagcaagccatcatcctccattgctcccggggactcaagaggaatctgtttctctgctgtcaacttcccatctggctcagcatagggtcactttgccattatgcaaatggagataaaagcaattctgactgtccaggagctaatctgaccgttctattgtgtggatgaccacataagaaggcaattttagtgtattaatcatagattattataaactataaacttaagggcaaggagtttattacaatgtatctttattaaaacaaaagggtgtatagtgttcacaaactgtgaaaatagtgtaagaactgtacattgtgagctctggttatttttctcttgtaccatagaaaaatgtataaaaattatcaaaaagctaatgtgcagggatattgccttatttgtctgtaaaaaatggagctcagtaacataactgcttcttggagctttggaatattttatcctgtattcttgtttgaattcctcctctatttaagatatatacatggaatcgaagtgtttatgtaatagttctatccttttgcctgcaggtcagttgtaataaatctaggatgtgatgatgact

SEQ ID NO: 309345 - DNA, 688 bp, Homo sapiens
  misc_feature (31)..(31): n is a, c, g, or t
gtcacagctgactctagaggatacactctcnctacggtatcctaaactttagacttcccactgttctgaaaggagacattgctctatgtctgccttcgaccacagcaagccatcatcctccattgctcccggggactcaagaggaatctgtttctctgctgtcaacttcccatctggctcagcatagggtcactttgccattatgcaaatggagataaaagcaattctgactgtccaggagctaatctgaccgttctattgtgtggatgaccacataagaaggcaattttagtgtattaatcatagattattataaactataaacttaagggcaaggagtttattacaatgtatctttattaaaacaaaagggtgtatagtgttcacaaactgtgaaaatagtgtaagaactgtacattgtgagctctggttatttttctcttgtaccatagaaaaatgtataaaaattatcaaaaagctaatgtgcagggatattgccttatttgtctgtaaaaaatggagctcagtaacataactgcttcttggagctttggaatattttatcctgtattcttgtttgaattcctcctctatttaagatatatacatggaatcgaagtgtttatgtaatagttctatccttttgcctgcaggtcagttgtaataaatctaggatgtgatgatgact

SEQ ID NO: 309346 - DNA, 1464 bp, Homo sapiens
ccctcggccgtgcgagaggccgagcttgctgcattgcagccgccgcggcgccgctcggctcttcactcccaacaatggcggctccgagcccgagcggcggcggcggctccgggggcggcagcggcagcggcacccccggccccgtagggtccccggcgccaggccacccggccgtcagcagcatgcagggtaaacgcaaagcactgaagttgaattttgcaaatccacctttcaaatctacagcaaggtttactctgaatcccaatcctacaggagttcaaaacccacacatagagagactgagaacacacagcattgagtcatcaggaaaactgaagatctcccctgaacaacactgggatttcactgcagaggacttgaaagaccttggagaaattggacgaggagcttatggttctgtcaacaaaatggtccacaaaccaagtgggcaaataatggcagttaaaagaattcggtcaacagtggatgaaaaagaacaaaaacaacttcttatggatttggatgtagtaatgcggagtagtgattgcccatacattgttcagttttatggtgcactcttcagagagggtgactgttggatctgtatggaactcatgtctacctcgtttgataagttttacaaatatgtatatagtgtattagatgatgttattccagaagaaattttaggcaaaatcactttagcaactgtgaaagcactaaaccacttaaaagaaaacttgaaaattattcacagagatatcaaaccttccaatattcttctggacagaagtggaaatattaagctctgtgacttcggcatcagtggacagcttgtggactctattgccaagacaagagatgctggctgtaggccatacatggcacctgaaagaatagacccaagcgcatcacgacaaggatatgatgtccgctctgatgtctggagtttggggatcacattggtatgtttatgctgattcaaccttgccacagtagcgtaacaataagaaatttagaagtgaaagaaaacttaatcagacttccccgttcgttaagaactataatcacagacactatggttttaagttgctgaaaaaaaaaaaaaaaaaaaaaaaaaaaaaaaatgtgggtggggggccggggccccggaaaagacttttagaaacacccatggcggggggcgcgcggggggccccgaggagggtaagaggtaacagggggcccaagaggaggtccaagggagaacccgcgggcccagaacaaaaggggggggaattcccaacaccaaaaaaaagcgcgcgccgcgggggaaaacagcgggtcgcgtttgggaacaaaaaacacagaagaggagcatctagagagggcgcaaaaggggggggactatatcaaaaaagggggggtccacagggaacaacccaggaaaactgaaaaaatttagccccccgcaggggggggggt

SEQ ID NO: 309347 - DNA, 630 bp, Homo sapiens
ataatttagtcaattttcaagaattaatattttttctaatttttaactaatcatcctacactgactatcctagagataaatcttcagattatagactcacaattttttgtatgtgcttttactgtgtttagcaggctgtctgcgttgttactttggatctgaaggaaagaactatttcattatttgtaatatttcatctgtgaaaagaaaaatacttaggcaaatgaatctacattttaataatgttatttttatgttattttagccttacgaaggatgaatccaaaaggccaaagtataaagagcttctggtgagtgtgggactgtggggattgtaggtacatcctaaccccggaactctcttaacatgctggttcactaagcaagcagtgggcctctctgtcataaacaaacatctcaaatttattgagtgttttttgttaatgtttttacacaaagatttggaaagagaaaatttgcagttataatttttctactaatactagctaaattctcatggaaaattttggtcttaacatgttataaaaattacccccaaagaattctgactttaagaagccattttccactgcatagtctatttatatgggatgcagccataagaaaaaa

SEQ ID NO: 309348 - DNA, 435 bp, Homo sapiens
gagctcggtacccaatcagtttacacaagagtaaattttaaacgtgaaaattatagatcttgatattgaatccatcagtgattcaagagatacacctatttgcctaaaacaacctaagatgtattggttatggaatcatgtgttggataggttcttaagacctgtttcctcaaatcttgacacagttttcaagggtggcttattgacttgcacggttgggcagataatccagatttacctaagattgggtaaaaaagtcatctgtgactttgctggcagggcatttgctaagtggagtacaggatctaaaagggttttcttagaaagggcaatattgtccaatgaagtaagcagaaggactctgggttagaagcatctgcacaaccgtgcaagtcaataagccacccttgaaaactgtgtcaaaatttgaggaaa

SEQ ID NO: 309349 - DNA, 6033 bp, Homo sapiens
ctccttgggcgatcgcctgggtagaggagaggagtttccggggctcgggtccgggtcgccttccaggggaacgagcgcggaagcaagtgggcggcgagaggcggagcaagagacgctggagggcgtggacgcagcgggctttggaaaggccccaagttaatgaggcgtgcgccggctgccgagcgcctcttggagctgggctttcccccgcggtgcgggcgccaggagccgccttttccgctgggtgtcactcgggggtggggaagatggcccattcaaaagcgccgcgagggggcccggccagtgcccttcagtgagcgctcgcaagaggacggcagaggcccggcagctcggagctccgggaccttgtggcgcatcaggacgcggctgtccctctgccgggacccagagccgccgccgccgctctgcctcctgcgtgttagcctcctctgcgcgctccgggcaggcggccgtgggagccgctggggcgaggacggcgcgaggctgctgctgctgcccccggcccgcgcggctggaaacggagaggccgagccaagcggcggcccctcttatgctgggaggatgctggagagtagcggctgcaaagcgctgaaggagggcgtgctggagaagcgcagcgacgggttgttgcagctctggaagaaaaagtgttgcatcctcaccgaggaagggctgctgcttatcccgcccaagcagctgcaacaccagcagcagcagcaacagcagcagcagcagcagcaacaacagcccgggcaggggccggccgagccgtcccaacccagtggccccgctgtcgccagcctcgagccgccggtcaagctcaaggaactgcacttctccaacatgaagaccgtggactgtgtggagcgcaagggcaagtacatgtacttcactgtggtgatggcagagggcaaggagatcgactttcggtgcccgcaagaccagggctggaacgccgagatcacgctgcagatggtgcagtacaagaatcgtcaggccatcctggcggtcaaatccacgcggcagaagcagcagcacctggtccagcagcagcccccctcgcagccgcagccgcagccgcagctccagccccaaccccagcctcagcctcagccgcaaccccagccccaatcacaaccccagcctcagccccaacccaagcctcagccccagcagctccacccgtatccgcatccacatccacatccacactctcatcctcactcgcacccacaccctcacccgcacccgcatccgcaccaaataccgcacccacacccacagccgcactcgcagccgcacgggcaccggcttctccgcagcacctccaactctgcctgaaaggggcagctcccgggcaagacaaggttttgaggacttgaggaagtgggacgagcacatttctattgtcttcacttggatcaaaagcaaaacagtctctccgccccgcaccagatcaagtagtttggacatcaccctactgaaaacttgcgattcttcttagttttctgcatacttttcatcacgatgcaggaaacgatttcgagtcaagaagacttttatttatgaacctttgaaaggatcgtcttgtatggtgaattttctaggagcgatgatgtactgtaattttattttaatgtattttgatttatgattatttattagttttttttaaatgcttgttctaagacatttctgaatgtagaccattttccaaaaaggaaactttattttcaaaaacctaatccgtagtaattcctaatcttggagaataaaaaagggcggtggaggggaaaacattaagaatttattcattatttctcgagtactttcagaaagtctgacactttcattgttgtgccagctggttgaaattaaaactctgatattactttttttgaggatttttatttttgtttttgcttaaacatatagtttgtctagaagtttaaaaagctaaaagttaaaaatggtgtaattatgaaaatctaacactcaagatagtttctaaaaggaaatcagtagttaaggatacctgatttcaaaatatttaaagcataacctaactgatggtaggatgattgtatcttgaatatgtggtagggccacatctattgtaggaaaaccttgcttttatcatctgtgtgtaaagggcttaataaggagaagaggccttttgactgatttgtgagtataaatgcatttgctgtttcatttcaaaaatgttgtggaggaaaagagtacatttaacttgtataagagaatatttgtactcctgtccaggctgcaggacctttcttcgagagctttgcacacttgacttgaaccacattttctgatccctttactttgttttagaagcacactgaaaaatctcgttgtttaaagtacaatttgtaaatatttcaaaggtctaggagtcataacttttgttttcatactgaaaatgatgttgatcagagaaaccaactgttttgcttttcattgctctgtgagaaatttgaggattctgttttgctgttaggtaagctaaactcagaaattgaaaaggaaaagactggataaacacaggattttcagtaagaaaacaaccccagtcttgtcttagaagccacttgttgaggagtctgttgggggaaaaaagaggatatgcttttaaaggtagaacaaaccttcttctgtgttaaatcaaaaggatgttcaaaatccaccaggacagatgctacttgggtttaaatggagccatagatgatacaaagtcctcttggggctgaaaatcacttcctatttgcatggctttactaactggtttctgttttccattatctttttcacagaaagtcttggtcagtatttttccagcatttaaattgaaacggtcagtattagaccactgctaggttatgtagtcaagaaataaaaatagaattacatgctacagatgtctttattctccttccatctagaaaggagttccaaggtcaaattactttttagtgcaatagttaaatgacattttgagatcataactcatatccaaaaagttgcagggaaaattaaaatagctttcccctattaagctaatggcaaacaaaacttaagtggacccccacttccagtggttgtttaggttgcagttgtgaaaatatgctgccaacatttaaaaacttgtttcatatgtatatatgtatacacatatatgaatatgtatgtatatatacatatatgagaacatgtgtgtacacatatatgaatatgtatatatgtgtatgtatgtatatatgtatatgaaatgagagccacatctaaagatttcttaaatcaagtttggttcagcttccttagaactgtggctgtactttttgaggagtacctcatagtactatatttttaatgcatgcaaatcataatagctccaaatgaaccacagttttttcccaatggaggatttttttttaattcttgtactaaaaaaaaaaaatccataccaaatatttttacaaattaagattgatgtaggttttaaaaaaggcatttgtatgttgttagcttacatatggggctaggtaatttcattgcttaaaaagatgcgcctaggctccctcttggtggctggatttctttttcttcgcccgtggtggccatggttcttaatagggccaccggaatcatggtttcttttttttttttttttttggagatggagtctcgccctgtgacccaggctggagtgcagtggcacgatctcggctcactgcaacctctgcctcctgggttcacgccattctcctgtctcagcctcctgagtagctgggactacaggtgaatgccaccacgcccggctgatttttgtatttttagtagagatggggtttcaccatagtggtcaggctgttctcgaactcctgacctcaggtgatccacctgccttggcctcccaaagtgctaggattacaggtgtgagccaccacacccggccccagagtaatggtttcttgactttctgtagcccttgttccttagtctgctgtgatatttatgttgacctttatcattttctattctgaacccctcttagcatttaatgtgaaatctaagaaattagaagtagaatggcttttattgttttgacacctttgaaattattattaataatttttccagagcaaaaaagcaaacacgctcaataagactaaacaaaacaaaatataaatgtacatcatttaatgtcccagtggctctattctacctgtaagaaaatgatacaaaaccacctaagatattttgaagcctgacaaatcagcttcatggaaaaaggtaaaaaatgcatttttcaaccgaaagggcagatccaatagaagacccgctccttaaataaacataaaatgtaaaaagttggaaaattaagagtaatgttccatctggaaactgaacttttgtccttgaacttgtgttggcaccaagcctcatacacagtgagctcaataactgttgggacaaaggaaggaaggacaaaatgtgtaacttcccagcatctgggagatgctgtctcttgcctcactgagtgttccttttctttgctctcatgtcattccctgagaacaatgaattctgggacaggctaaacatcatgatgaagtttcttaaacagactttcttagtggaaatccatttagatctgggtgtgctctatggggagtgctgacgtcaaagagcaaatgtctataaggggcccttttaaaatgaacattttcctcattgagcaagctgggattctctaatgtagaaatcaagccatctttataatttcacttcagatgtttatgtttttgttttttttgtctccaatgatggtaaaaataaaaactacgcattacttaaaggagtttccctcacatgtaaacactgttaggaagtctggattaagttgaaagtcctgttttaactttttttctctcatataccaaacactctgtatttctcttaaagaagccctttaagagaaagccctaattttatatctgacagtaaagtttgctgcaagtgtatgagttcaaacacatcccttgttttctgtccctaggggaaaagtcatgtagttttagcttggctccagtgttaatattatattcagtagcagccttagaagagtggtctaagacttgaacctggagcaattttatagcacagaatcctacgaagataggactgtgaacatttgttttctttttcgtgtgtgtcaaactaactggtttttgctttaccaataaaatgtcctcggcagagtaaattttaaacgtgaaaattatagatcttgatattgaatccatcagtgattcaagagatacacctatttgcctaaaacaacctaagatgtattggttatggaatcatgtgttggataggttcttaagacctgtttcctcaaatcttgacacagttttcaagggtggcttattgacttgcacggttgggcagataatccagatttacctaagattgggtaaaaaagtcatctgtgactttgctggcagggcatttgctaagtggagtacaggatctaaaagggttttcttagaaagggcaatattgtccaatgaagtaagcagaaggactctgggttagaagcatctgcacaaaaactggtgagacctactctccactgctctgcagctggatggctgatggcaggctgagcagtggggaagcaggttttaacaacagggagtccttccaggtcactgtatattgagaagaaacataaaactattgtctgttacattccgaggtcagccttcttcttaacgttttataatatgcaaatgccagcttctggaaagcaagtatcatcatgtaccaaatgctttatacaccatcacattcatgaattttttagcatggtcagaacttgtgtaaatatgtctcttagatgattttggggagatgtgatttatttttcatattttcaaaatgcatttcatttcaaataaagttatctattgagacaaccga

SEQ ID NO: 309350 - DNA, 6181 bp, Homo sapiens
ctccttgggcgatcgcctgggtagaggagaggagtttccggggctcgggtccgggtcgccttccaggggaacgagcgcggaagcaagtgggcggcgagaggcggagcaagagacgctggagggcgtggacgcagcgggctttggaaaggccccaagttaatgaggcgtgcgccggctgccgagcgcctcttggagctgggctttcccccgcggtgcgggcgccaggagccgccttttccgctgggtgtcactcgggggtggggaagatggcccattcaaaagcgccgcgagggggcccggccagtgcccttcagtgagcgctcgcaagaggacggcagaggcccggcagctcggagctccgggaccttgtggcgcatcaggacgcggctgtccctctgccgggacccagagccgccgccgccgctctgcctcctgcgtgttagcctcctctgcgcgctccgggcaggcggccgtgggagccgctggggcgaggacggcgcgaggctgctgctgctgcccccggcccgcgcggctggaaacggagaggccgagccaagcggcggcccctcttatgctgggaggatgctggagagtagcggctgcaaagcgctgaaggagggcgtgctggagaagcgcagcgacgggttgttgcagctctggaagaaaaagtgttgcatcctcaccgaggaagggctgctgcttatcccgcccaagcagctgcaacaccagcagcagcagcaacagcagcagcagcagcagcaacaacagcccgggcaggggccggccgagccgtcccaacccagtggccccgctgtcgccagcctcgagccgccggtcaagctcaaggaactgcacttctccaacatgaagaccgtggactgtgtggagcgcaagggcaagtacatgtacttcactgtggtgatggcagagggcaaggagatcgactttcggtgcccgcaagaccagggctggaacgccgagatcacgctgcagatggtgcagtacaagaatcgtcaggccatcctggcggtcaaatccacgcggcagaagcagcagcacctggtccagcagcagcccccctcgcagccgcagccgcagccgcagctccagccccaaccccagcctcagcctcagccgcaaccccagccccaatcacaaccccagcctcagccccaacccaagcctcagccccagcagctccacccgtatccgcatccacatccacatccacactctcatcctcactcgcacccacaccctcacccgcacccgcatccgcaccaaataccgcacccacacccacagccgcactcgcagccgcacgggcaccggcttctccgcagcacctccaactctgcctgaaaggggcagctcccgggcaagacaaggttttgaggacttgaggaagtgggacgagcacatttctattgtcttcacttggatcaaaagcaaaacagtctctccgccccgcaccagatcaagtagtttggacatcaccctactgaaaacttgcgattcttcttagttttctgcatacttttcatcacgatgcaggaaacgatttcgagtcaagaagacttttatttatgaacctttgaaaggatcgtcttgtatggtgaattttctaggagcgatgatgtactgtaattttattttaatgtattttgatttatgattatttattagttttttttaaatgcttgttctaagacatttctgaatgtagaccattttccaaaaaggaaactttattttcaaaaacctaatccgtagtaattcctaatcttggagaataaaaaagggcggtggaggggaaaacattaagaatttattcattatttctcgagtactttcagaaagtctgacactttcattgttgtgccagctggttgaaattaaaactctgatattactttttttgaggatttttatttttgtttttgcttaaacatatagtttgtctagaagtttaaaaagctaaaagttaaaaatggtgtaattatgaaaatctaacactcaagatagtttctaaaaggaaatcagtagttaaggatacctgatttcaaaatatttaaagcataacctaactgatggtaggatgattgtatcttgaatatgtggtagggccacatctattgtaggaaaaccttgcttttatcatctgtgtgtaaagggcttaataaggagaagaggccttttgactgatttgtgagtataaatgcatttgctgtttcatttcaaaaatgttgtggaggaaaagagtacatttaacttgtataagagaatatttgtactcctgtccaggctgcaggacctttcttcgagagctttgcacacttgacttgaaccacattttctgatccctttactttgttttagaagcacactgaaaaatctcgttgtttaaagtacaatttgtaaatatttcaaaggtctaggagtcataacttttgttttcatactgaaaatgatgttgatcagagaaaccaactgttttgcttttcattgctctgtgagaaatttgaggattctgttttgctgttaggtaagctaaactcagaaattgaaaaggaaaagactggataaacacaggattttcagtaagaaaacaaccccagtcttgtcttagaagccacttgttgaggagtctgttgggggaaaaaagaggatatgcttttaaaggtagaacaaaccttcttctgtgttaaatcaaaaggatgttcaaaatccaccaggacagatgctacttgggtttaaatggagccatagatgatacaaagtcctcttggggctgaaaatcacttcctatttgcatggctttactaactggtttctgttttccattatctttttcacagaaagtcttggtcagtatttttccagcatttaaattgaaacggtcagtattagaccactgctaggttatgtagtcaagaaataaaaatagaattacatgctacagatgtctttattctccttccatctagaaaggagttccaaggtcaaattactttttagtgcaatagttaaatgacattttgagatcataactcatatccaaaaagttgcagggaaaattaaaatagctttcccctattaagctaatggcaaacaaaacttaagtggacccccacttccagtggttgtttaggttgcagttgtgaaaatatgctgccaacatttaaaaacttgtttcatatgtatatatgtatacacatatatgaatatgtatgtatatatacatatatgagaacatgtgtgtacacatatatgaatatgtatatatgtgtatgtatgtatatatgtatatgaaatgagagccacatctaaagatttcttaaatcaagtttggttcagcttccttagaactgtggctgtactttttgaggagtacctcatagtactatatttttaatgcatgcaaatcataatagctccaaatgaaccacagttttttcccaatggaggatttttttttaattcttgtactaaaaaaaaaaaatccataccaaatatttttacaaattaagattgatgtaggttttaaaaaaggcatttgtatgttgttagcttacatatggggctaggtaatttcattgcttaaaaagatgcgcctaggctccctcttggtggctggatttctttttcttcgcccgtggtggccatggttcttaatagggccaccggaatcatggtttcttttttttttttttttttggagatggagtctcgccctgtgacccaggctggagtgcagtggcacgatctcggctcactgcaacctctgcctcctgggttcacgccattctcctgtctcagcctcctgagtagctgggactacaggtgaatgccaccacgcccggctgatttttgtatttttagtagagatggggtttcaccatagtggtcaggctgttctcgaactcctgacctcaggtgatccacctgccttggcctcccaaagtgctaggattacaggtgtgagccaccacacccggccccagagtaatggtttcttgactttctgtagcccttgttccttagtctgctgtgatatttatgttgacctttatcattttctattctgaacccctcttagcatttaatgtgaaatctaagaaattagaagtagaatggcttttattgttttgacacctttgaaattattattaataatttttccagagcaaaaaagcaaacacgctcaataagactaaacaaaacaaaatataaatgtacatcatttaatgtcccagtggctctattctacctgtaagaaaatgatacaaaaccacctaagatattttgaagcctgacaaatcagcttcatggaaaaaggtaaaaaatgcatttttcaaccgaaagggcagatccaatagaagacccgctccttaaataaacataaaatgtaaaaagttggaaaattaagagtaatgttccatctggaaactgaacttttgtccttgaacttgtgttggcaccaagcctcatacacagtgagctcaataactgttgggacaaaggaaggaaggacaaaatgtgtaacttcccagcatctgggagatgctgtctcttgcctcactgagtgttccttttctttgctctcatgtcattccctgagaacaatgaattctgggacaggctaaacatcatgatgaagtttcttaaacagactttcttagtggaaatccatttagatctgggtgtgctctatggggagtgctgacgtcaaagagcaaatgtctataaggggcccttttaaaatgaacattttcctcattgagcaagctgggattctctaatgtagaaatcaagccatctttataatttcacttcagatgtttatgtttttgttttttttgtctccaatgatggtaaaaataaaaactacgcattacttaaaggagtttccctcacatgtaaacactgttaggaagtctggattaagttgaaagtcctgttttaactttttttctctcatataccaaacactctgtatttctcttaaagaagccctttaagagaaagccctaattttatatctgacagtaaagtttgctgcaagtgtatgagttcaaacacatcccttgttttctgtccctaggggaaaagtcatgtagttttagcttggctccagtgttaatattatattcagtagcagccttagaagagtggtctaagacttgaacctggagcaattttatagcacagaatcctacgaagataggactgtgaacatttgttttctttttcgtgtgtgtcaaactaactggtttttgctttaccaataaaatgtcctcggcagagtaaattttaaacgtgaaaattatagatcttgatattgaatccatcagtgattcaagagatacacctatttgcctaaaacaacctaagatgtattggttatggaatcatgtgttggataggttcttaagacctgtttcctcaaatcttgacacagttttcaagggtggcttattgacttgcacggttgggcagataatccagatttacctaagattgggtaaaaaagtcatctgtgactttgctggcagggcatttgctaagtggagtacaggatctaaaagggttttcttagaaagggcaatattgtccaatgaagtaagcagaaggactctgggttagaagcatctgcacaaaaactggtgagacctactctccactgctctgcagctggatggctgatggcaggctgagcagtggggaagcaggttttaacaacagggagtccttccaggtcactgtatattgagaagaaacataaaactattgtctgttacattccgaggtcagccttcttcttaacgttttataatatgcaaatgccagcttctggaaagcaagtatcatcatgtaccaaatgctttatacaccatcacattcatgaattttttagcatggtcagaacttgtgtaaatatgtctcttagatgattttggggagatgtgatttatttttcatattttcaaaatgcatttcatttcaaataaagttatctattgagacaaccgaaaaaaaaaagggggcgcaaatttcccgagggccaattacgtcccttttcttaaagggctatggagttaaaagcggccgcttaagtccgtggaggttggttggagcctctgggtatgacctatgcgaaaatgtatgattttgtgtttac

SEQ ID NO: 309351 - DNA, 5990 bp, Homo sapiens
ctccttgggcgatcgcctgggtagaggagaggagtttccggggctcgggtccgggtcgccttccaggggaacgagcgcggaagcaagtgggcggcgagaggcggagcaagagacgctggagggcgtggacgcagcgggctttggaaaggccccaagttaatgaggcgtgcgccggctgccgagcgcctcttggagctgggctttcccccgcggtgcgggcgccaggagccgccttttccgctgggtgtcactcgggggtggggaagatggcccattcaaaagcgccgcgagggggcccggccagtgcccttcagtgagcgctcgcaagaggacggcagaggcccggcagctcggagctccgggaccttgtggcgcatcaggacgcggctgtccctctgccgggacccagagccgccgccgccgctctgcctcctgcgtgttagcctcctctgcgcgctccgggcaggcggccgtgggagccgctggggcgaggacggcgcgaggctgctgctgctgcccccggcccgcgcggctggaaacggagaggccgagccaagcggcggcccctcttatgctgggaggatgctggagagtagcggctgcaaagcgctgaaggagggcgtgctggagaagcgcagcgacgggttgttgcagctctggaagaaaaagtgttgcatcctcaccgaggaagggctgctgcttatcccgcccaagcagctgcaacaccagcagcagcagcaacagcagcagcagcagcagcaacaacagcccgggcaggggccggccgagccgtcccaacccagtggccccgctgtcgccagcctcgagccgccggtcaagctcaaggaactgcacttctccaacatgaagaccgtggactgtgtggagcgcaagggcaagtacatgtacttcactgtggtgatggcagagggcaaggagatcgactttcggtgcccgcaagaccagggctggaacgccgagatcacgctgcagatggtgcagtacaagaatcgtcaggccatcctggcggtcaaatccacgcggcagaagcagcagcacctggtccagcagcagcccccctcgcagccgcagccgcagccgcagcccaatcacaaccccagcctcagccccaacccaagcctcagccccagcagctccacccgtatccgcatccacatccacatccacactctcatcctcactcgcacccacaccctcacccgcacccgcatccgcaccaaataccgcacccacacccacagccgcactcgcagccgcacgggcaccggcttctccgcagcacctccaactctgcctgaaaggggcagctcccgggcaagacaaggttttgaggacttgaggaagtgggacgagcacatttctattgtcttcacttggatcaaaagcaaaacagtctctccgccccgcaccagatcaagtagtttggacatcaccctactgaaaacttgcgattcttcttagttttctgcatacttttcatcacgatgcaggaaacgatttcgagtcaagaagacttttatttatgaacctttgaaaggatcgtcttgtatggtgaattttctaggagcgatgatgtactgtaattttattttaatgtattttgatttatgattatttattagttttttttaaatgcttgttctaagacatttctgaatgtagaccattttccaaaaaggaaactttattttcaaaaacctaatccgtagtaattcctaatcttggagaataaaaaagggcggtggaggggaaaacattaagaatttattcattatttctcgagtactttcagaaagtctgacactttcattgttgtgccagctggttgaaattaaaactctgatattactttttttgaggatttttatttttgtttttgcttaaacatatagtttgtctagaagtttaaaaagctaaaagttaaaaatggtgtaattatgaaaatctaacactcaagatagtttctaaaaggaaatcagtagttaaggatacctgatttcaaaatatttaaagcataacctaactgatggtaggatgattgtatcttgaatatgtggtagggccacatctattgtaggaaaaccttgcttttatcatctgtgtgtaaagggcttaataaggagaagaggccttttgactgatttgtgagtataaatgcatttgctgtttcatttcaaaaatgttgtggaggaaaagagtacatttaacttgtataagagaatatttgtactcctgtccaggctgcaggacctttcttcgagagctttgcacacttgacttgaaccacattttctgatccctttactttgttttagaagcacactgaaaaatctcgttgtttaaagtacaatttgtaaatatttcaaaggtctaggagtcataacttttgttttcatactgaaaatgatgttgatcagagaaaccaactgttttgcttttcattgctctgtgagaaatttgaggattctgttttgctgttaggtaagctaaactcagaaattgaaaaggaaaagactggataaacacaggattttcagtaagaaaacaaccccagtcttgtcttagaagccacttgttgaggagtctgttgggggaaaaaagaggatatgcttttaaaggtagaacaaaccttcttctgtgttaaatcaaaaggatgttcaaaatccaccaggacagatgctacttgggtttaaatggagccatagatgatacaaagtcctcttggggctgaaaatcacttcctatttgcatggctttactaactggtttctgttttccattatctttttcacagaaagtcttggtcagtatttttccagcatttaaattgaaacggtcagtattagaccactgctaggttatgtagtcaagaaataaaaatagaattacatgctacagatgtctttattctccttccatctagaaaggagttccaaggtcaaattactttttagtgcaatagttaaatgacattttgagatcataactcatatccaaaaagttgcagggaaaattaaaatagctttcccctattaagctaatggcaaacaaaacttaagtggacccccacttccagtggttgtttaggttgcagttgtgaaaatatgctgccaacatttaaaaacttgtttcatatgtatatatgtatacacatatatgaatatgtatgtatatatacatatatgagaacatgtgtgtacacatatatgaatatgtatatatgtgtatgtatgtatatatgtatatgaaatgagagccacatctaaagatttcttaaatcaagtttggttcagcttccttagaactgtggctgtactttttgaggagtacctcatagtactatatttttaatgcatgcaaatcataatagctccaaatgaaccacagttttttcccaatggaggatttttttttaattcttgtactaaaaaaaaaaaatccataccaaatatttttacaaattaagattgatgtaggttttaaaaaaggcatttgtatgttgttagcttacatatggggctaggtaatttcattgcttaaaaagatgcgcctaggctccctcttggtggctggatttctttttcttcgcccgtggtggccatggttcttaatagggccaccggaatcatggtttcttttttttttttttttttggagatggagtctcgccctgtgacccaggctggagtgcagtggcacgatctcggctcactgcaacctctgcctcctgggttcacgccattctcctgtctcagcctcctgagtagctgggactacaggtgaatgccaccacgcccggctgatttttgtatttttagtagagatggggtttcaccatagtggtcaggctgttctcgaactcctgacctcaggtgatccacctgccttggcctcccaaagtgctaggattacaggtgtgagccaccacacccggccccagagtaatggtttcttgactttctgtagcccttgttccttagtctgctgtgatatttatgttgacctttatcattttctattctgaacccctcttagcatttaatgtgaaatctaagaaattagaagtagaatggcttttattgttttgacacctttgaaattattattaataatttttccagagcaaaaaagcaaacacgctcaataagactaaacaaaacaaaatataaatgtacatcatttaatgtcccagtggctctattctacctgtaagaaaatgatacaaaaccacctaagatattttgaagcctgacaaatcagcttcatggaaaaaggtaaaaaatgcatttttcaaccgaaagggcagatccaatagaagacccgctccttaaataaacataaaatgtaaaaagttggaaaattaagagtaatgttccatctggaaactgaacttttgtccttgaacttgtgttggcaccaagcctcatacacagtgagctcaataactgttgggacaaaggaaggaaggacaaaatgtgtaacttcccagcatctgggagatgctgtctcttgcctcactgagtgttccttttctttgctctcatgtcattccctgagaacaatgaattctgggacaggctaaacatcatgatgaagtttcttaaacagactttcttagtggaaatccatttagatctgggtgtgctctatggggagtgctgacgtcaaagagcaaatgtctataaggggcccttttaaaatgaacattttcctcattgagcaagctgggattctctaatgtagaaatcaagccatctttataatttcacttcagatgtttatgtttttgttttttttgtctccaatgatggtaaaaataaaaactacgcattacttaaaggagtttccctcacatgtaaacactgttaggaagtctggattaagttgaaagtcctgttttaactttttttctctcatataccaaacactctgtatttctcttaaagaagccctttaagagaaagccctaattttatatctgacagtaaagtttgctgcaagtgtatgagttcaaacacatcccttgttttctgtccctaggggaaaagtcatgtagttttagcttggctccagtgttaatattatattcagtagcagccttagaagagtggtctaagacttgaacctggagcaattttatagcacagaatcctacgaagataggactgtgaacatttgttttctttttcgtgtgtgtcaaactaactggtttttgctttaccaataaaatgtcctcggcagagtaaattttaaacgtgaaaattatagatcttgatattgaatccatcagtgattcaagagatacacctatttgcctaaaacaacctaagatgtattggttatggaatcatgtgttggataggttcttaagacctgtttcctcaaatcttgacacagttttcaagggtggcttattgacttgcacggttgggcagataatccagatttacctaagattgggtaaaaaagtcatctgtgactttgctggcagggcatttgctaagtggagtacaggatctaaaagggttttcttagaaagggcaatattgtccaatgaagtaagcagaaggactctgggttagaagcatctgcacaaaaactggtgagacctactctccactgctctgcagctggatggctgatggcaggctgagcagtggggaagcaggttttaacaacagggagtccttccaggtcactgtatattgagaagaaacataaaactattgtctgttacattccgaggtcagccttcttcttaacgttttataatatgcaaatgccagcttctggaaagcaagtatcatcatgtaccaaatgctttatacaccatcacattcatgaattttttagcatggtcagaacttgtgtaaatatgtctcttagatgattttggggagatgtgatttatttttcatattttcaaaatgcatttcatttcaaataaagttatctattgagacaaccga

SEQ ID NO: 309352 - DNA, 5908 bp, Homo sapiens
ctccttgggcgatcgcctgggtagaggagaggagtttccggggctcgggtccgggtcgccttccaggggaacgagcgcggaagcaagtgggcggcgagaggcggagcaagagacgctggagggcgtggacgcagcgggctttggaaaggccccaagttaatgaggcgtgcgccggctgccgagcgcctcttggagctgggctttcccccgcggtgcgggcgccaggagccgccttttccgctgggtgtcactcgggggtggggaagatggcccattcaaaagcgccgcgagggggcccggccagtgcccttcagtgagcgctcgcaagaggacggcagaggcccggcagctcggagctccgggaccttgtggcgcatcaggacgcggctgtccctctgccgggacccagagccgccgccgccgctctgcctcctgcgtgttagcctcctctgcgcgctccgggcaggcggccgtgggagccgctggggcgaggacggcgcgaggctgctgctgctgcccccggcccgcgcggctggaaacggagaggccgagccaagcggcggcccctcttatgctgggaggatgctggagagtagcggctgcaaagcgctgaaggagggcgtgctggagaagccaacaacagcccgggcaggggccggccgagccgtcccaacccagtggccccgctgtcgccagcctcgagccgccggtcaagctcaaggaactgcacttctccaacatgaagaccgtggactgtgtggagcgcaagggcaagtacatgtacttcactgtggtgatggcagagggcaaggagatcgactttcggtgcccgcaagaccagggctggaacgccgagatcacgctgcagatggtgcagtacaagaatcgtcaggccatcctggcggtcaaatccacgcggcagaagcagcagcacctggtccagcagcagcccccctcgcagccgcagccgcagccgcagctccagccccaaccccagcctcagcctcagccgcaaccccagccccaatcacaaccccagcctcagccccaacccaagcctcagccccagcagctccacccgtatccgcatccacatccacatccacactctcatcctcactcgcacccacaccctcacccgcacccgcatccgcaccaaataccgcacccacacccacagccgcactcgcagccgcacgggcaccggcttctccgcagcacctccaactctgcctgaaaggggcagctcccgggcaagacaaggttttgaggacttgaggaagtgggacgagcacatttctattgtcttcacttggatcaaaagcaaaacagtctctccgccccgcaccagatcaagtagtttggacatcaccctactgaaaacttgcgattcttcttagttttctgcatacttttcatcacgatgcaggaaacgatttcgagtcaagaagacttttatttatgaacctttgaaaggatcgtcttgtatggtgaattttctaggagcgatgatgtactgtaattttattttaatgtattttgatttatgattatttattagttttttttaaatgcttgttctaagacatttctgaatgtagaccattttccaaaaaggaaactttattttcaaaaacctaatccgtagtaattcctaatcttggagaataaaaaagggcggtggaggggaaaacattaagaatttattcattatttctcgagtactttcagaaagtctgacactttcattgttgtgccagctggttgaaattaaaactctgatattactttttttgaggatttttatttttgtttttgcttaaacatatagtttgtctagaagtttaaaaagctaaaagttaaaaatggtgtaattatgaaaatctaacactcaagatagtttctaaaaggaaatcagtagttaaggatacctgatttcaaaatatttaaagcataacctaactgatggtaggatgattgtatcttgaatatgtggtagggccacatctattgtaggaaaaccttgcttttatcatctgtgtgtaaagggcttaataaggagaagaggccttttgactgatttgtgagtataaatgcatttgctgtttcatttcaaaaatgttgtggaggaaaagagtacatttaacttgtataagagaatatttgtactcctgtccaggctgcaggacctttcttcgagagctttgcacacttgacttgaaccacattttctgatccctttactttgttttagaagcacactgaaaaatctcgttgtttaaagtacaatttgtaaatatttcaaaggtctaggagtcataacttttgttttcatactgaaaatgatgttgatcagagaaaccaactgttttgcttttcattgctctgtgagaaatttgaggattctgttttgctgttaggtaagctaaactcagaaattgaaaaggaaaagactggataaacacaggattttcagtaagaaaacaaccccagtcttgtcttagaagccacttgttgaggagtctgttgggggaaaaaagaggatatgcttttaaaggtagaacaaaccttcttctgtgttaaatcaaaaggatgttcaaaatccaccaggacagatgctacttgggtttaaatggagccatagatgatacaaagtcctcttggggctgaaaatcacttcctatttgcatggctttactaactggtttctgttttccattatctttttcacagaaagtcttggtcagtatttttccagcatttaaattgaaacggtcagtattagaccactgctaggttatgtagtcaagaaataaaaatagaattacatgctacagatgtctttattctccttccatctagaaaggagttccaaggtcaaattactttttagtgcaatagttaaatgacattttgagatcataactcatatccaaaaagttgcagggaaaattaaaatagctttcccctattaagctaatggcaaacaaaacttaagtggacccccacttccagtggttgtttaggttgcagttgtgaaaatatgctgccaacatttaaaaacttgtttcatatgtatatatgtatacacatatatgaatatgtatgtatatatacatatatgagaacatgtgtgtacacatatatgaatatgtatatatgtgtatgtatgtatatatgtatatgaaatgagagccacatctaaagatttcttaaatcaagtttggttcagcttccttagaactgtggctgtactttttgaggagtacctcatagtactatatttttaatgcatgcaaatcataatagctccaaatgaaccacagttttttcccaatggaggatttttttttaattcttgtactaaaaaaaaaaaatccataccaaatatttttacaaattaagattgatgtaggttttaaaaaaggcatttgtatgttgttagcttacatatggggctaggtaatttcattgcttaaaaagatgcgcctaggctccctcttggtggctggatttctttttcttcgcccgtggtggccatggttcttaatagggccaccggaatcatggtttcttttttttttttttttttggagatggagtctcgccctgtgacccaggctggagtgcagtggcacgatctcggctcactgcaacctctgcctcctgggttcacgccattctcctgtctcagcctcctgagtagctgggactacaggtgaatgccaccacgcccggctgatttttgtatttttagtagagatggggtttcaccatagtggtcaggctgttctcgaactcctgacctcaggtgatccacctgccttggcctcccaaagtgctaggattacaggtgtgagccaccacacccggccccagagtaatggtttcttgactttctgtagcccttgttccttagtctgctgtgatatttatgttgacctttatcattttctattctgaacccctcttagcatttaatgtgaaatctaagaaattagaagtagaatggcttttattgttttgacacctttgaaattattattaataatttttccagagcaaaaaagcaaacacgctcaataagactaaacaaaacaaaatataaatgtacatcatttaatgtcccagtggctctattctacctgtaagaaaatgatacaaaaccacctaagatattttgaagcctgacaaatcagcttcatggaaaaaggtaaaaaatgcatttttcaaccgaaagggcagatccaatagaagacccgctccttaaataaacataaaatgtaaaaagttggaaaattaagagtaatgttccatctggaaactgaacttttgtccttgaacttgtgttggcaccaagcctcatacacagtgagctcaataactgttgggacaaaggaaggaaggacaaaatgtgtaacttcccagcatctgggagatgctgtctcttgcctcactgagtgttccttttctttgctctcatgtcattccctgagaacaatgaattctgggacaggctaaacatcatgatgaagtttcttaaacagactttcttagtggaaatccatttagatctgggtgtgctctatggggagtgctgacgtcaaagagcaaatgtctataaggggcccttttaaaatgaacattttcctcattgagcaagctgggattctctaatgtagaaatcaagccatctttataatttcacttcagatgtttatgtttttgttttttttgtctccaatgatggtaaaaataaaaactacgcattacttaaaggagtttccctcacatgtaaacactgttaggaagtctggattaagttgaaagtcctgttttaactttttttctctcatataccaaacactctgtatttctcttaaagaagccctttaagagaaagccctaattttatatctgacagtaaagtttgctgcaagtgtatgagttcaaacacatcccttgttttctgtccctaggggaaaagtcatgtagttttagcttggctccagtgttaatattatattcagtagcagccttagaagagtggtctaagacttgaacctggagcaattttatagcacagaatcctacgaagataggactgtgaacatttgttttctttttcgtgtgtgtcaaactaactggtttttgctttaccaataaaatgtcctcggcagagtaaattttaaacgtgaaaattatagatcttgatattgaatccatcagtgattcaagagatacacctatttgcctaaaacaacctaagatgtattggttatggaatcatgtgttggataggttcttaagacctgtttcctcaaatcttgacacagttttcaagggtggcttattgacttgcacggttgggcagataatccagatttacctaagattgggtaaaaaagtcatctgtgactttgctggcagggcatttgctaagtggagtacaggatctaaaagggttttcttagaaagggcaatattgtccaatgaagtaagcagaaggactctgggttagaagcatctgcacaaaaactggtgagacctactctccactgctctgcagctggatggctgatggcaggctgagcagtggggaagcaggttttaacaacagggagtccttccaggtcactgtatattgagaagaaacataaaactattgtctgttacattccgaggtcagccttcttcttaacgttttataatatgcaaatgccagcttctggaaagcaagtatcatcatgtaccaaatgctttatacaccatcacattcatgaattttttagcatggtcagaacttgtgtaaatatgtctcttagatgattttggggagatgtgatttatttttcatattttcaaaatgcatttcatttcaaataaagttatctattgagacaaccga

SEQ ID NO: 309353 - DNA, 5931 bp, Homo sapiens
ctccttgggcgatcgcctgggtagaggagaggagtttccggggctcgggtccgggtcgccttccaggggaacgagcgcggaagcaagtgggcggcgagaggcggagcaagagacgctggagggcgtggacgcagcgggctttggaaaggccccaagttaatgaggcgtgcgccggctgccgagcgcctcttggagctgggctttcccccgcggtgcgggcgccaggagccgccttttccgctgggtgtcactcgggggtggggaagatggcccattcaaaagcgccgcgagggggcccggccagtgcccttcagtgagcgctcgcaagaggacggcagaggcccggcagctcggagctccgggaccttgtggcgcatcaggacgcggctgtccctctgccgggacccagagccgccgccgccgctctgcctcctgcgtgttagcctcctctgcgcgctccgggcaggcggccgtgggagccgctggggcgaggacggcgcgaggctgctgctgctgcccccggcccgcgcggctggaaacggagaggccgagccaagcggcggcccctcttatgctgggaggatgctggagagtagcggctgcaaagcgctgaaggagggcgtgctggagaagcgcagcgacgggttgttgcagctctggaagaaaaagtgttgcatcctcaccgagccgtcccaacccagtggccccgctgtcgccagcctcgagccgccggtcaagctcaaggaactgcacttctccaacatgaagaccgtggactgtgtggagcgcaagggcaagtacatgtacttcactgtggtgatggcagagggcaaggagatcgactttcggtgcccgcaagaccagggctggaacgccgagatcacgctgcagatggtgcagtacaagaatcgtcaggccatcctggcggtcaaatccacgcggcagaagcagcagcacctggtccagcagcagcccccctcgcagccgcagccgcagccgcagctccagccccaaccccagcctcagcctcagccgcaaccccagccccaatcacaaccccagcctcagccccaacccaagcctcagccccagcagctccacccgtatccgcatccacatccacatccacactctcatcctcactcgcacccacaccctcacccgcacccgcatccgcaccaaataccgcacccacacccacagccgcactcgcagccgcacgggcaccggcttctccgcagcacctccaactctgcctgaaaggggcagctcccgggcaagacaaggttttgaggacttgaggaagtgggacgagcacatttctattgtcttcacttggatcaaaagcaaaacagtctctccgccccgcaccagatcaagtagtttggacatcaccctactgaaaacttgcgattcttcttagttttctgcatacttttcatcacgatgcaggaaacgatttcgagtcaagaagacttttatttatgaacctttgaaaggatcgtcttgtatggtgaattttctaggagcgatgatgtactgtaattttattttaatgtattttgatttatgattatttattagttttttttaaatgcttgttctaagacatttctgaatgtagaccattttccaaaaaggaaactttattttcaaaaacctaatccgtagtaattcctaatcttggagaataaaaaagggcggtggaggggaaaacattaagaatttattcattatttctcgagtactttcagaaagtctgacactttcattgttgtgccagctggttgaaattaaaactctgatattactttttttgaggatttttatttttgtttttgcttaaacatatagtttgtctagaagtttaaaaagctaaaagttaaaaatggtgtaattatgaaaatctaacactcaagatagtttctaaaaggaaatcagtagttaaggatacctgatttcaaaatatttaaagcataacctaactgatggtaggatgattgtatcttgaatatgtggtagggccacatctattgtaggaaaaccttgcttttatcatctgtgtgtaaagggcttaataaggagaagaggccttttgactgatttgtgagtataaatgcatttgctgtttcatttcaaaaatgttgtggaggaaaagagtacatttaacttgtataagagaatatttgtactcctgtccaggctgcaggacctttcttcgagagctttgcacacttgacttgaaccacattttctgatccctttactttgttttagaagcacactgaaaaatctcgttgtttaaagtacaatttgtaaatatttcaaaggtctaggagtcataacttttgttttcatactgaaaatgatgttgatcagagaaaccaactgttttgcttttcattgctctgtgagaaatttgaggattctgttttgctgttaggtaagctaaactcagaaattgaaaaggaaaagactggataaacacaggattttcagtaagaaaacaaccccagtcttgtcttagaagccacttgttgaggagtctgttgggggaaaaaagaggatatgcttttaaaggtagaacaaaccttcttctgtgttaaatcaaaaggatgttcaaaatccaccaggacagatgctacttgggtttaaatggagccatagatgatacaaagtcctcttggggctgaaaatcacttcctatttgcatggctttactaactggtttctgttttccattatctttttcacagaaagtcttggtcagtatttttccagcatttaaattgaaacggtcagtattagaccactgctaggttatgtagtcaagaaataaaaatagaattacatgctacagatgtctttattctccttccatctagaaaggagttccaaggtcaaattactttttagtgcaatagttaaatgacattttgagatcataactcatatccaaaaagttgcagggaaaattaaaatagctttcccctattaagctaatggcaaacaaaacttaagtggacccccacttccagtggttgtttaggttgcagttgtgaaaatatgctgccaacatttaaaaacttgtttcatatgtatatatgtatacacatatatgaatatgtatgtatatatacatatatgagaacatgtgtgtacacatatatgaatatgtatatatgtgtatgtatgtatatatgtatatgaaatgagagccacatctaaagatttcttaaatcaagtttggttcagcttccttagaactgtggctgtactttttgaggagtacctcatagtactatatttttaatgcatgcaaatcataatagctccaaatgaaccacagttttttcccaatggaggatttttttttaattcttgtactaaaaaaaaaaaatccataccaaatatttttacaaattaagattgatgtaggttttaaaaaaggcatttgtatgttgttagcttacatatggggctaggtaatttcattgcttaaaaagatgcgcctaggctccctcttggtggctggatttctttttcttcgcccgtggtggccatggttcttaatagggccaccggaatcatggtttcttttttttttttttttttggagatggagtctcgccctgtgacccaggctggagtgcagtggcacgatctcggctcactgcaacctctgcctcctgggttcacgccattctcctgtctcagcctcctgagtagctgggactacaggtgaatgccaccacgcccggctgatttttgtatttttagtagagatggggtttcaccatagtggtcaggctgttctcgaactcctgacctcaggtgatccacctgccttggcctcccaaagtgctaggattacaggtgtgagccaccacacccggccccagagtaatggtttcttgactttctgtagcccttgttccttagtctgctgtgatatttatgttgacctttatcattttctattctgaacccctcttagcatttaatgtgaaatctaagaaattagaagtagaatggcttttattgttttgacacctttgaaattattattaataatttttccagagcaaaaaagcaaacacgctcaataagactaaacaaaacaaaatataaatgtacatcatttaatgtcccagtggctctattctacctgtaagaaaatgatacaaaaccacctaagatattttgaagcctgacaaatcagcttcatggaaaaaggtaaaaaatgcatttttcaaccgaaagggcagatccaatagaagacccgctccttaaataaacataaaatgtaaaaagttggaaaattaagagtaatgttccatctggaaactgaacttttgtccttgaacttgtgttggcaccaagcctcatacacagtgagctcaataactgttgggacaaaggaaggaaggacaaaatgtgtaacttcccagcatctgggagatgctgtctcttgcctcactgagtgttccttttctttgctctcatgtcattccctgagaacaatgaattctgggacaggctaaacatcatgatgaagtttcttaaacagactttcttagtggaaatccatttagatctgggtgtgctctatggggagtgctgacgtcaaagagcaaatgtctataaggggcccttttaaaatgaacattttcctcattgagcaagctgggattctctaatgtagaaatcaagccatctttataatttcacttcagatgtttatgtttttgttttttttgtctccaatgatggtaaaaataaaaactacgcattacttaaaggagtttccctcacatgtaaacactgttaggaagtctggattaagttgaaagtcctgttttaactttttttctctcatataccaaacactctgtatttctcttaaagaagccctttaagagaaagccctaattttatatctgacagtaaagtttgctgcaagtgtatgagttcaaacacatcccttgttttctgtccctaggggaaaagtcatgtagttttagcttggctccagtgttaatattatattcagtagcagccttagaagagtggtctaagacttgaacctggagcaattttatagcacagaatcctacgaagataggactgtgaacatttgttttctttttcgtgtgtgtcaaactaactggtttttgctttaccaataaaatgtcctcggcagagtaaattttaaacgtgaaaattatagatcttgatattgaatccatcagtgattcaagagatacacctatttgcctaaaacaacctaagatgtattggttatggaatcatgtgttggataggttcttaagacctgtttcctcaaatcttgacacagttttcaagggtggcttattgacttgcacggttgggcagataatccagatttacctaagattgggtaaaaaagtcatctgtgactttgctggcagggcatttgctaagtggagtacaggatctaaaagggttttcttagaaagggcaatattgtccaatgaagtaagcagaaggactctgggttagaagcatctgcacaaaaactggtgagacctactctccactgctctgcagctggatggctgatggcaggctgagcagtggggaagcaggttttaacaacagggagtccttccaggtcactgtatattgagaagaaacataaaactattgtctgttacattccgaggtcagccttcttcttaacgttttataatatgcaaatgccagcttctggaaagcaagtatcatcatgtaccaaatgctttatacaccatcacattcatgaattttttagcatggtcagaacttgtgtaaatatgtctcttagatgattttggggagatgtgatttatttttcatattttcaaaatgcatttcatttcaaataaagttatctattgagacaaccga

SEQ ID NO: 309354 - DNA, 6003 bp, Homo sapiens
ctccttgggcgatcgcctgggtagaggagaggagtttccggggctcgggtccgggtcgccttccaggggaacgagcgcggaagcaagtgggcggcgagaggcggagcaagagacgctggagggcgtggacgcagcgggctttggaaaggccccaagttaatgaggcgtgcgccggctgccgagcgcctcttggagctgggctttcccccgcggtgcgggcgccaggagccgccttttccgctgggtgtcactcgggggtggggaagatggcccattcaaaagcgccgcgagggggcccggccagtgcccttcagtgagcgctcgcaagaggacggcagaggcccggcagctcggagctccgggaccttgtggcgcatcaggacgcggctgtccctctgccgggacccagagccgccgccgccgctctgcctcctgcgtgttagcctcctctgcgcgctccgggcaggcggccgtgggagccgctggggcgaggacggcgcgaggctgctgctgctgcccccggcccgcgcggctggaaacggagaggccgagccaagcggcggcccctcttatgctgggaggatgctggagagtagcggctgcaaagcgctgaaggagggcgtgctggagaagcgcagcgacgggttgttgcagctctggaagaaaaagtgttgcatcctcaccgaggaagggctgctgcttatcccgcccaagcagctgcaacaccagcagcagcagcaacagcagcagcagcagcagcaacaacagcccgggcaggggccggccgagccgtcccaacccagtggccccgctgtcgccagcctcgagccgccggtcaagctcaaggaactgcacttctccaacatgaagaccgtggactgtgtggagcgcaagggcaagtacatgtacttcactgtggtgatggcagagggcaaggagatcgactttcggtgcccgcaagaccagggctggaacgccgagatcacgctgcagatggtgcagtacaagaatcgtcaggccatcctggcggtcaaatccacgcggcagaagcagcagcacctggtccagcagcagcccccctcgcagccgcagccgcagccgcagctccagccccaaccccagcctcagcctcagccgcaaccccagccccaatcacaaccccagcctcagccccaacccaagcctcagccccagcagctccacccgtatccgcatccacatccacatccacactctcatcctcactcgcacccacaccctcacccgcacccacagccgcactcgcagccgcacgggcaccggcttctccgcagcacctccaactctgcctgaaaggggcagctcccgggcaagacaaggttttgaggacttgaggaagtgggacgagcacatttctattgtcttcacttggatcaaaagcaaaacagtctctccgccccgcaccagatcaagtagtttggacatcaccctactgaaaacttgcgattcttcttagttttctgcatacttttcatcacgatgcaggaaacgatttcgagtcaagaagacttttatttatgaacctttgaaaggatcgtcttgtatggtgaattttctaggagcgatgatgtactgtaattttattttaatgtattttgatttatgattatttattagttttttttaaatgcttgttctaagacatttctgaatgtagaccattttccaaaaaggaaactttattttcaaaaacctaatccgtagtaattcctaatcttggagaataaaaaagggcggtggaggggaaaacattaagaatttattcattatttctcgagtactttcagaaagtctgacactttcattgttgtgccagctggttgaaattaaaactctgatattactttttttgaggatttttatttttgtttttgcttaaacatatagtttgtctagaagtttaaaaagctaaaagttaaaaatggtgtaattatgaaaatctaacactcaagatagtttctaaaaggaaatcagtagttaaggatacctgatttcaaaatatttaaagcataacctaactgatggtaggatgattgtatcttgaatatgtggtagggccacatctattgtaggaaaaccttgcttttatcatctgtgtgtaaagggcttaataaggagaagaggccttttgactgatttgtgagtataaatgcatttgctgtttcatttcaaaaatgttgtggaggaaaagagtacatttaacttgtataagagaatatttgtactcctgtccaggctgcaggacctttcttcgagagctttgcacacttgacttgaaccacattttctgatccctttactttgttttagaagcacactgaaaaatctcgttgtttaaagtacaatttgtaaatatttcaaaggtctaggagtcataacttttgttttcatactgaaaatgatgttgatcagagaaaccaactgttttgcttttcattgctctgtgagaaatttgaggattctgttttgctgttaggtaagctaaactcagaaattgaaaaggaaaagactggataaacacaggattttcagtaagaaaacaaccccagtcttgtcttagaagccacttgttgaggagtctgttgggggaaaaaagaggatatgcttttaaaggtagaacaaaccttcttctgtgttaaatcaaaaggatgttcaaaatccaccaggacagatgctacttgggtttaaatggagccatagatgatacaaagtcctcttggggctgaaaatcacttcctatttgcatggctttactaactggtttctgttttccattatctttttcacagaaagtcttggtcagtatttttccagcatttaaattgaaacggtcagtattagaccactgctaggttatgtagtcaagaaataaaaatagaattacatgctacagatgtctttattctccttccatctagaaaggagttccaaggtcaaattactttttagtgcaatagttaaatgacattttgagatcataactcatatccaaaaagttgcagggaaaattaaaatagctttcccctattaagctaatggcaaacaaaacttaagtggacccccacttccagtggttgtttaggttgcagttgtgaaaatatgctgccaacatttaaaaacttgtttcatatgtatatatgtatacacatatatgaatatgtatgtatatatacatatatgagaacatgtgtgtacacatatatgaatatgtatatatgtgtatgtatgtatatatgtatatgaaatgagagccacatctaaagatttcttaaatcaagtttggttcagcttccttagaactgtggctgtactttttgaggagtacctcatagtactatatttttaatgcatgcaaatcataatagctccaaatgaaccacagttttttcccaatggaggatttttttttaattcttgtactaaaaaaaaaaaatccataccaaatatttttacaaattaagattgatgtaggttttaaaaaaggcatttgtatgttgttagcttacatatggggctaggtaatttcattgcttaaaaagatgcgcctaggctccctcttggtggctggatttctttttcttcgcccgtggtggccatggttcttaatagggccaccggaatcatggtttcttttttttttttttttttggagatggagtctcgccctgtgacccaggctggagtgcagtggcacgatctcggctcactgcaacctctgcctcctgggttcacgccattctcctgtctcagcctcctgagtagctgggactacaggtgaatgccaccacgcccggctgatttttgtatttttagtagagatggggtttcaccatagtggtcaggctgttctcgaactcctgacctcaggtgatccacctgccttggcctcccaaagtgctaggattacaggtgtgagccaccacacccggccccagagtaatggtttcttgactttctgtagcccttgttccttagtctgctgtgatatttatgttgacctttatcattttctattctgaacccctcttagcatttaatgtgaaatctaagaaattagaagtagaatggcttttattgttttgacacctttgaaattattattaataatttttccagagcaaaaaagcaaacacgctcaataagactaaacaaaacaaaatataaatgtacatcatttaatgtcccagtggctctattctacctgtaagaaaatgatacaaaaccacctaagatattttgaagcctgacaaatcagcttcatggaaaaaggtaaaaaatgcatttttcaaccgaaagggcagatccaatagaagacccgctccttaaataaacataaaatgtaaaaagttggaaaattaagagtaatgttccatctggaaactgaacttttgtccttgaacttgtgttggcaccaagcctcatacacagtgagctcaataactgttgggacaaaggaaggaaggacaaaatgtgtaacttcccagcatctgggagatgctgtctcttgcctcactgagtgttccttttctttgctctcatgtcattccctgagaacaatgaattctgggacaggctaaacatcatgatgaagtttcttaaacagactttcttagtggaaatccatttagatctgggtgtgctctatggggagtgctgacgtcaaagagcaaatgtctataaggggcccttttaaaatgaacattttcctcattgagcaagctgggattctctaatgtagaaatcaagccatctttataatttcacttcagatgtttatgtttttgttttttttgtctccaatgatggtaaaaataaaaactacgcattacttaaaggagtttccctcacatgtaaacactgttaggaagtctggattaagttgaaagtcctgttttaactttttttctctcatataccaaacactctgtatttctcttaaagaagccctttaagagaaagccctaattttatatctgacagtaaagtttgctgcaagtgtatgagttcaaacacatcccttgttttctgtccctaggggaaaagtcatgtagttttagcttggctccagtgttaatattatattcagtagcagccttagaagagtggtctaagacttgaacctggagcaattttatagcacagaatcctacgaagataggactgtgaacatttgttttctttttcgtgtgtgtcaaactaactggtttttgctttaccaataaaatgtcctcggcagagtaaattttaaacgtgaaaattatagatcttgatattgaatccatcagtgattcaagagatacacctatttgcctaaaacaacctaagatgtattggttatggaatcatgtgttggataggttcttaagacctgtttcctcaaatcttgacacagttttcaagggtggcttattgacttgcacggttgggcagataatccagatttacctaagattgggtaaaaaagtcatctgtgactttgctggcagggcatttgctaagtggagtacaggatctaaaagggttttcttagaaagggcaatattgtccaatgaagtaagcagaaggactctgggttagaagcatctgcacaaaaactggtgagacctactctccactgctctgcagctggatggctgatggcaggctgagcagtggggaagcaggttttaacaacagggagtccttccaggtcactgtatattgagaagaaacataaaactattgtctgttacattccgaggtcagccttcttcttaacgttttataatatgcaaatgccagcttctggaaagcaagtatcatcatgtaccaaatgctttatacaccatcacattcatgaattttttagcatggtcagaacttgtgtaaatatgtctcttagatgattttggggagatgtgatttatttttcatattttcaaaatgcatttcatttcaaataaagttatctattgagacaaccga

SEQ ID NO: 309355 - DNA, 5410 bp, Homo sapiens
acccacacccacagccgcactcgcagccgcacgggcaccggcttctccgcagcacctccaactctgcctgaaaggggcagctcccgggcaagacaaggtaaggtcccggcactcgcgctcccgaggagtgggtctcgggggtagtgagttgggaggagtaggaagcttgttcacaggttcggctcctgtatggagaaatcaaaactcataccaagtttctggggcaatggaagaaacagaaacaagctggggccaggagagctgggcagagaggggaggctggggagatccgggccaggcagggggcctcgcggaccgcgcccgcgcccgcgcccatcacgaccgtccttgtgccgagatcacgctgcagatggtgcagtacaagaatcgtcaggccatcctggcggtcaaatccacgcggcagaagcagcagcacctggtccagcagcagcccccctcgcagccgcagccgcagccgcagctccagccccaaccccagcctcagcctcagccgcaaccccagccccaatcacaaccccagcctcagccccaacccaagcctcagccccagcagctccacccgtatccgcatccacatccacatccacactctcatcctcactcgcacccacaccctcacccgcacccgcatccgcaccaaataccgcacccacacccacagccgcactcgcagccgcacgggcaccggcttctccgcagcacctccaactctgcctgaaaggggcagctcccgggcaagacaaggttttgaggacttgaggaagtgggacgagcacatttctattgtcttcacttggatcaaaagcaaaacagtctctccgccccgcaccagatcaagtagtttggacatcaccctactgaaaacttgcgattcttcttagttttctgcatacttttcatcacgatgcaggaaacgatttcgagtcaagaagacttttatttatgaacctttgaaaggatcgtcttgtatggtgaattttctaggagcgatgatgtactgtaattttattttaatgtattttgatttatgattatttattagttttttttaaatgcttgttctaagacatttctgaatgtagaccattttccaaaaaggaaactttattttcaaaaacctaatccgtagtaattcctaatcttggagaataaaaaagggcggtggaggggaaaacattaagaatttattcattatttctcgagtactttcagaaagtctgacactttcattgttgtgccagctggttgaaattaaaactctgatattactttttttgaggatttttatttttgtttttgcttaaacatatagtttgtctagaagtttaaaaagctaaaagttaaaaatggtgtaattatgaaaatctaacactcaagatagtttctaaaaggaaatcagtagttaaggatacctgatttcaaaatatttaaagcataacctaactgatggtaggatgattgtatcttgaatatgtggtagggccacatctattgtaggaaaaccttgcttttatcatctgtgtgtaaagggcttaataaggagaagaggccttttgactgatttgtgagtataaatgcatttgctgtttcatttcaaaaatgttgtggaggaaaagagtacatttaacttgtataagagaatatttgtactcctgtccaggctgcaggacctttcttcgagagctttgcacacttgacttgaaccacattttctgatccctttactttgttttagaagcacactgaaaaatctcgttgtttaaagtacaatttgtaaatatttcaaaggtctaggagtcataacttttgttttcatactgaaaatgatgttgatcagagaaaccaactgttttgcttttcattgctctgtgagaaatttgaggattctgttttgctgttaggtaagctaaactcagaaattgaaaaggaaaagactggataaacacaggattttcagtaagaaaacaaccccagtcttgtcttagaagccacttgttgaggagtctgttgggggaaaaaagaggatatgcttttaaaggtagaacaaaccttcttctgtgttaaatcaaaaggatgttcaaaatccaccaggacagatgctacttgggtttaaatggagccatagatgatacaaagtcctcttggggctgaaaatcacttcctatttgcatggctttactaactggtttctgttttccattatctttttcacagaaagtcttggtcagtatttttccagcatttaaattgaaacggtcagtattagaccactgctaggttatgtagtcaagaaataaaaatagaattacatgctacagatgtctttattctccttccatctagaaaggagttccaaggtcaaattactttttagtgcaatagttaaatgacattttgagatcataactcatatccaaaaagttgcagggaaaattaaaatagctttcccctattaagctaatggcaaacaaaacttaagtggacccccacttccagtggttgtttaggttgcagttgtgaaaatatgctgccaacatttaaaaacttgtttcatatgtatatatgtatacacatatatgaatatgtatgtatatatacatatatgagaacatgtgtgtacacatatatgaatatgtatatatgtgtatgtatgtatatatgtatatgaaatgagagccacatctaaagatttcttaaatcaagtttggttcagcttccttagaactgtggctgtactttttgaggagtacctcatagtactatatttttaatgcatgcaaatcataatagctccaaatgaaccacagttttttcccaatggaggatttttttttaattcttgtactaaaaaaaaaaaatccataccaaatatttttacaaattaagattgatgtaggttttaaaaaaggcatttgtatgttgttagcttacatatggggctaggtaatttcattgcttaaaaagatgcgcctaggctccctcttggtggctggatttctttttcttcgcccgtggtggccatggttcttaatagggccaccggaatcatggtttcttttttttttttttttttggagatggagtctcgccctgtgacccaggctggagtgcagtggcacgatctcggctcactgcaacctctgcctcctgggttcacgccattctcctgtctcagcctcctgagtagctgggactacaggtgaatgccaccacgcccggctgatttttgtatttttagtagagatggggtttcaccatagtggtcaggctgttctcgaactcctgacctcaggtgatccacctgccttggcctcccaaagtgctaggattacaggtgtgagccaccacacccggccccagagtaatggtttcttgactttctgtagcccttgttccttagtctgctgtgatatttatgttgacctttatcattttctattctgaacccctcttagcatttaatgtgaaatctaagaaattagaagtagaatggcttttattgttttgacacctttgaaattattattaataatttttccagagcaaaaaagcaaacacgctcaataagactaaacaaaacaaaatataaatgtacatcatttaatgtcccagtggctctattctacctgtaagaaaatgatacaaaaccacctaagatattttgaagcctgacaaatcagcttcatggaaaaaggtaaaaaatgcatttttcaaccgaaagggcagatccaatagaagacccgctccttaaataaacataaaatgtaaaaagttggaaaattaagagtaatgttccatctggaaactgaacttttgtccttgaacttgtgttggcaccaagcctcatacacagtgagctcaataactgttgggacaaaggaaggaaggacaaaatgtgtaacttcccagcatctgggagatgctgtctcttgcctcactgagtgttccttttctttgctctcatgtcattccctgagaacaatgaattctgggacaggctaaacatcatgatgaagtttcttaaacagactttcttagtggaaatccatttagatctgggtgtgctctatggggagtgctgacgtcaaagagcaaatgtctataaggggcccttttaaaatgaacattttcctcattgagcaagctgggattctctaatgtagaaatcaagccatctttataatttcacttcagatgtttatgtttttgttttttttgtctccaatgatggtaaaaataaaaactacgcattacttaaaggagtttccctcacatgtaaacactgttaggaagtctggattaagttgaaagtcctgttttaactttttttctctcatataccaaacactctgtatttctcttaaagaagccctttaagagaaagccctaattttatatctgacagtaaagtttgctgcaagtgtatgagttcaaacacatcccttgttttctgtccctaggggaaaagtcatgtagttttagcttggctccagtgttaatattatattcagtagcagccttagaagagtggtctaagacttgaacctggagcaattttatagcacagaatcctacgaagataggactgtgaacatttgttttctttttcgtgtgtgtcaaactaactggtttttgctttaccaataaaatgtcctcggcagagtaaattttaaacgtgaaaattatagatcttgatattgaatccatcagtgattcaagagatacacctatttgcctaaaacaacctaagatgtattggttatggaatcatgtgttggataggttcttaagacctgtttcctcaaatcttgacacagttttcaagggtggcttattgacttgcacggttgggcagataatccagatttacctaagattgggtaaaaaagtcatctgtgactttgctggcagggcatttgctaagtggagtacaggatctaaaagggttttcttagaaagggcaatattgtccaatgaagtaagcagaaggactctgggttagaagcatctgcacaaaaactggtgagacctactctccactgctctgcagctggatggctgatggcaggctgagcagtggggaagcaggttttaacaacagggagtccttccaggtcactgtatattgagaagaaacataaaactattgtctgttacattccgaggtcagccttcttcttaacgttttataatatgcaaatgccagcttctggaaagcaagtatcatcatgtaccaaatgctttatacaccatcacattcatgaattttttagcatggtcagaacttgtgtaaatatgtctcttagatgattttggggagatgtgatttatttttcatattttcaaaatgcatttcatttcaaataaagttatctattgagacaaccga

SEQ ID NO: 309356 - DNA, 2959 bp, Homo sapiens
ctccttgggcgatcgcctgggtagaggagaggagtttccggggctcgggtccgggtcgccttccaggggaacgagcgcggaagcaagtgggcggcgagaggcggagcaagagacgctggagggcgtggacgcagcgggctttggaaaggccccaagttaatgaggcgtgcgccggctgccgagcgcctcttggagctgggctttcccccgcggtgcgggcgccaggagccgccttttccgctgggtgtcactcgggggtggggaagatggcccattcaaaagcgccgcgagggggcccggccagtgcccttcagtgagcgctcgcaagaggacggcagaggcccggcagctcggagctccgggaccttgtggcgcatcaggacgcggctgtccctctgccgggacccagagccgccgccgccgctctgcctcctgcgtgttagcctcctctgcgcgctccgggcaggcggccgtgggagccgctggggcgaggacggcgcgaggctgctgctgctgcccccggcccgcgcggctggaaacggagaggccgagccaagcggcggcccctcttatgctgggaggatgctggagagtagcggctgcaaagcgctgaaggagggcgtgctggagaagcgcagcgacgggttgttgcagctctggaagaaaaagtgttgcatcctcaccgaggaagggctgctgcttatcccgcccaagcagctgcaacaccagcagcagcagcaacagcagcagcagcagcagcaacaacagcccgggcaggggccggccgagccgtcccaacccagtggccccgctgtcgccagcctcgagccgccggtcaagctcaaggaactgcacttctccaacatgaagaccgtggactgtgtggagcgcaagggcaagtacatgtacttcactgtggtgatggcagagggcaaggagatcgactttcggtgcccgcaagaccagggctggaacgccgagatcacgctgcagatggtgcagtacaagaatcgtcaggccatcctggcggtcaaatccacgcggcagaagcagcagcacctggtccagcagcagcccccctcgcagccgcagccgcagccgcagctccagccccaaccccagcctcagcctcagccgcaaccccagccccaatcacaaccccagcctcagccccaacccaagcctcagccccagcagctccacccgtatccgcatccacatccacatccacactctcatcctcactcgcacccacaccctcacccgcacccgcatccgcaccaaataccgcacccacacccacagccgcactcgcagccgcacgggcaccggcttctccgcagcacctccaactctgcctgaaaggggcagctcccgggcaagacaaggttttgaggacttgaggaagtgggacgagcacatttctattgtcttcacttggatcaaaagcaaaacagtctctccgccccgcaccagatcaagtagtttggacatcaccctactgaaaacttgcgattcttcttagttttctgcatacttttcatcacgatgcaggaaacgatttcgagtcaagaagacttttatttatgaacctttgaaaggatcgtcttgtatggtgaattttctaggagcgatgatgtactgtaattttattttaatgtattttgatttatgattatttattagttttttttaaatgcttgttctaagacatttctgaatgtagaccattttccaaaaaggaaactttattttcaaaaacctaatccgtagtaattcctaatcttggagaataaaaaagggcggtggaggggaaaacattaagaatttattcattatttctcgagtactttcagaaagtctgacactttcattgttgtgccagctggttgaaattaaaactctgatattactttttttgaggatttttatttttgtttttgcttaaacatatagtttgtctagaagtttaaaaagctaaaagttaaaaatggtgtaattatgaaaatctaacactcaagatagtttctaaaaggaaatcagtagttaaggatacctgatttcaaaatatttaaagcataacctaactgatggtaggatgattgtatcttgaatatgtggtagggccacatctattgtaggaaaaccttgcttttatcatctgtgtgtaaagggcttaataaggagaagaggccttttgactgatttgtgagtataaatgcatttgctgtttcatttcaaaaatgttgtggaggaaaagagtacatttaacttgtataagagaatatttgtactcctgtccaggctgcaggacctttcttcgagagctttgcacacttgacttgaaccacattttctgatccctttactttgttttagaagcacactgaaaaatctcgttgtttaaagtacaatttgtaaatatttcaaaggtctaggagtcataacttttgttttcatactgaaaatgatgttgatcagagaaaccaactgttttgcttttcattgctctgtgagaaatttgaggattctgttttgctgttaggtaagctaaactcagaaattgaaaaggaaaagactggataaacacaggattttcagtaagaaaacaaccccagtcttgtcttagaagccacttgttgaggagtctgttgggggaaaaaagaggatatgcttttaaaggtagaacaaaccttcttctgtgttaaatcaaaaggatgttcaaaatccaccaggacagatgctacttgggtttaaatggagccatagatgatacaaagtcctcttggggctgaaaatcacttcctatttgcatggctttactaactggtttctgttttccattatctttttcacagaaagtcttggtcagtatttttccagcatttaaattgaaacggtcagtattagaccactgctaggttatgtagtcaagaaataaaaatagaattacatgcta

SEQ ID NO: 309357 - DNA, 1917 bp, Homo sapiens
ctccttgggcgatcgcctgggtagaggagaggagtttccggggctcgggtccgggtcgccttccaggggaacgagcgcggaagcaagtgggcggcgagaggcggagcaagagacgctggagggcgtggacgcagcgggctttggaaaggccccaagttaatgaggcgtgcgccggctgccgagcgcctcttggagctgggctttcccccgcggtgcgggcgccaggagccgccttttccgctgggtgtcactcgggggtggggaagatggcccattcaaaagcgccgcgagggggcccggccagtgcccttcagtgagcgctcgcaagaggacggcagaggcccggcagctcggagctccgggaccttgtggcgcatcaggacgcggctgtccctctgccgggacccagagccgccgccgccgctctgcctcctgcgtgttagcctcctctgcgcgctccgggcaggcggccgtgggagccgctggggcgaggacggcgcgaggctgctgctgctgcccccggcccgcgcggctggaaacggagaggccgagccaagcggcggcccctcttatgctgggaggatgctggagagtagcggctgcaaagcgctgaaggagggcgtgctggagaagcgcagcgacgggttgttgcagctctggaagaaaaagtgttgcatcctcaccgaggaagggctgctgcttatcccgcccaagcagctgcaacaccagcagcagcagcaacagcagcagcagcagcagcaacaacagcccgggcaggggccggccgagccgtcccaacccagtggccccgctgtcgccagcctcgagccgccggtcaagctcaaggaactgcacttctccaacatgaagaccgtggactgtgtggagcgcaagggcaagtacatgtacttcactgtggtgatggcagagggcaaggagatcgactttcggtgcccgcaagaccagggctggaacgccgagatcacgctgcagatggtgcagtacaagaatcgtcaggccatcctggcggtcaaatccacgcggcagaagcagcagcacctggtccagcagcagcccccctcgcagccgcagccgcagccgcagctccagccccaaccccagcctcagcctcagccgcaaccccagccccaatcacaaccccagcctcagccccaacccaagcctcagccccagcagctccacccgtatccgcatccacatccacatccacactctcatcctcactcgcacccacaccctcacccgcacccgcatccgcaccaaataccgcacccacacccacagccgcactcgcagccgcacgggcaccggcttctccgcagcacctccaactctgcctgaaaggggcagctcccgggcaagacaaggttttgaggacttgaggaagtgggacgagcacatttctattgtcttcacttggatcaaaagcaaaacagtctctccgccccgcaccagatcaagtagtttggacatcaccctactgaaaacttgcgattcttcttagttttctgcatacttttcatcacgatgcaggaaacgatttcgagtcaagaagacttttatttatgaacctttgaaaggatcgtcttgtatggtgaattttctaggagcgatgatgtactgtaattttattttaatgtattttgatttatgattatttattagttttttttaaatgcttgttctaagacatttctgaatgtagaccattttccaaaaaggaaactttattttcaaaaacctaatccgtagtaattcctaatcttggagaataaaaaagggcggtggaggggaaaacattaagaatttattcattatttctcgagtactttcagaaagtctgacactttcattgttgtgccagctggttgaaattaaaactctgatattactttt

SEQ ID NO: 309358 - DNA, 3268 bp, Homo sapiens
ctccttgggcgatcgcctgggtagaggagaggagtttccggggctcgggtccgggtcgccttccaggggaacgagcgcggaagcaagtgggcggcgagaggcggagcaagagacgctggagggcgtggacgcagcgggctttggaaaggccccaagttaatgaggcgtgcgccggctgccgagcgcctcttggagctgggctttcccccgcggtgcgggcgccaggagccgccttttccgctgggtgtcactcgggggtggggaagatggcccattcaaaagcgccgcgagggggcccggccagtgcccttcagtgagcgctcgcaagaggacggcagaggcccggcagctcggagctccgggaccttgtggcgcatcaggacgcggctgtccctctgccgggacccagagccgccgccgccgctctgcctcctgcgtgttagcctcctctgcgcgctccgggcaggcggccgtgggagccgctggggcgaggacggcgcgaggctgctgctgctgcccccggcccgcgcggctggaaacggagaggccgagccaagcggcggcccctcttatgctgggaggatgctggagagtagcggctgcaaagcgctgaaggagggcgtgctggagaagcgcagcgacgggttgttgcagctctggaagaaaaagtgttgcatcctcaccgaggaagggctgctgcttatcccgcccaagcagctgcaacaccagcagcagcagcaacagcagcagcagcagcagcaacaacagcccgggcaggggccggccgagccgtcccaacccagtggccccgctgtcgccagcctcgagccgccggtcaagctcaaggaactgcacttctccaacatgaagaccgtggactgtgtggagcgcaagggcaagtacatgtacttcactgtggtgatggcagagggcaaggagatcgactttcggtgcccgcaagaccagggctggaacgccgagatcacgctgcagatggtgcagtacaagaatcgtcaggccatcctggcggtcaaatccacgcggcagaagcagcagcacctggtccagcagcagcccccctcgcagccgcagccgcagccgcagctccagccccaaccccagcctcagcctcagccgcaaccccagccccaatcacaaccccagcctcagccccaacccaagcctcagccccagcagctccacccgtatccgcatccacatccacatccacactctcatcctcactcgcacccacaccctcacccgcacccgcatccgcaccaaataccgcacccacacccacagccgcactcgcagccgcacgggcaccggcttctccgcagcacctccaactctgcctgaaaggggcagctcccgggcaagacaaggttttgaggacttgaggaagtgggacgagcacatttctattgtcttcacttggatcaaaagcaaaacagtctctccgccccgcaccagatcaagtagtttggacatcaccctactgaaaacttgcgattcttcttagttttctgcatacttttcatcacgatgcaggaaacgatttcgagtcaagaagacttttatttatgaacctttgaaaggatcgtcttgtatggtgaattttctaggagcgatgatgtactgtaattttattttaatgtattttgatttatgattatttattagttttttttaaatgcttgttctaagacatttctgaatgtagaccattttccaaaaaggaaactttattttcaaaaacctaatccgtagtaattcctaatcttggagaataaaaaagggcggtggaggggaaaacattaagaatttattcattatttctcgagtactttcagaaagtctgacactttcattgttgtgccagctggttgaaattaaaactctgatattactttttttgaggatttttatttttgtttttgcttaaacatatagtttgtctagaagtttaaaaagctaaaagttaaaaatggtgtaattatgaaaatctaacactcaagatagtttctaaaaggaaatcagtagttaaggatacctgatttcaaaatatttaaagcataacctaactgatggtaggatgattgtatcttgaatatgtggtagggccacatctattgtaggaaaaccttgcttttatcatctgtgtgtaaagggcttaataaggagaagaggccttttgactgatttgtgagtataaatgcatttgctgtttcatttcaaaaatgttgtggaggaaaagagtacatttaacttgtataagagaatatttgtactcctgtccaggctgcaggacctttcttcgagagctttgcacacttgacttgaaccacattttctgatccctttactttgttttagaagcacactgaaaaatctcgttgtttaaagtacaatttgtaaatatttcaaaggtctaggagtcataacttttgttttcatactgaaaatgatgttgatcagagaaaccaactgttttgcttttcattgctctgtgagaaatttgaggattctgttttgctgttaggtaagctaaactcagaaattgaaaaggaaaagactggataaacacaggattttcagtaagaaaacaaccccagtcttgtcttagaagccacttgttgaggagtctgttgggggaaaaaagaggatatgcttttaaaggtagaacaaaccttcttctgtgttaaatcaaaaggatgttcaaaatccaccaggacagatgctacttgggtttaaatggagccatagatgatacaaagtcctcttggggctgaaaatcacttcctatttgcatggctttactaactggtttctgttttccattatctttttcacagaaagtcttggtcagtatttttccagcatttaaattgaaacggtcagtattagaccactgctaggttatgtagtcaagaaataaaaatagaattacatgctaaaaaaaaaaaaaaaaaaaaaaaaaaaaaaaaaaaaaaaaaaaaaaaaaaaaaaaaacaaaaaaaaaatactagagcaggagacctataaaaattctccccaaagaaatcacaacataaacacaacacattttttctcaacaacacagggacaacataaaagagactatataaataccgagaagaacccgcgcgcagtgttattacaaacactcaattagggcaaaaatgtgcattatcagaaaatcattgaggaagagacaaagaaaatgtggagaggataataaatgggcgccactcttttgatcaga

SEQ ID NO: 309359 - DNA, 4772 bp, Homo sapiens
gtatggccgtccgtgtaatccggtacagctattgccctctactatccgagattcagtaggcgcagcaccggcttctccgcagcacctccaactctgcctgaaaggggcagctcccgggcaagacaaggttttgaggacttgaggaagtgggacgagcacatttctattgtcttcacttggatcaaaagcaaaacagtctctccgccccgcaccagatcaagtagtttggacatcaccctactgaaaacttgcgattcttcttagttttctgcatacttttcatcacgatgcaggaaacgatttcgagtcaagaagacttttatttatgaacctttgaaaggatcgtcttgtatggtgaattttctaggagcgatgatgtactgtaattttattttaatgtattttgatttatgattatttattagttttttttaaatgcttgttctaagacatttctgaatgtagaccattttccaaaaaggaaactttattttcaaaaacctaatccgtagtaattcctaatcttggagaataaaaaagggcggtggaggggaaaacattaagaatttattcattatttctcgagtactttcagaaagtctgacactttcattgttgtgccagctggttgaaattaaaactctgatattactttttttgaggatttttatttttgtttttgcttaaacatatagtttgtctagaagtttaaaaagctaaaagttaaaaatggtgtaattatgaaaatctaacactcaagatagtttctaaaaggaaatcagtagttaaggatacctgatttcaaaatatttaaagcataacctaactgatggtaggatgattgtatcttgaatatgtggtagggccacatctattgtaggaaaaccttgcttttatcatctgtgtgtaaagggcttaataaggagaagaggccttttgactgatttgtgagtataaatgcatttgctgtttcatttcaaaaatgttgtggaggaaaagagtacatttaacttgtataagagaatatttgtactcctgtccaggctgcaggacctttcttcgagagctttgcacacttgacttgaaccacattttctgatccctttactttgttttagaagcacactgaaaaatctcgttgtttaaagtacaatttgtaaatatttcaaaggtctaggagtcataacttttgttttcatactgaaaatgatgttgatcagagaaaccaactgttttgcttttcattgctctgtgagaaatttgaggattctgttttgctgttaggtaagctaaactcagaaattgaaaaggaaaagactggataaacacaggattttcagtaagaaaacaaccccagtcttgtcttagaagccacttgttgaggagtctgttgggggaaaaaagaggatatgcttttaaaggtagaacaaaccttcttctgtgttaaatcaaaaggatgttcaaaatccaccaggacagatgctacttgggtttaaatggagccatagatgatacaaagtcctcttggggctgaaaatcacttcctatttgcatggctttactaactggtttctgttttccattatctttttcacagaaagtcttggtcagtatttttccagcatttaaattgaaacggtcagtattagaccactgctaggttatgtagtcaagaaataaaaatagaattacatgctacagatgtctttattctccttccatctagaaaggagttccaaggtcaaattactttttagtgcaatagttaaatgacattttgagatcataactcatatccaaaaagttgcagggaaaattaaaatagctttcccctattaagctaatggcaaacaaaacttaagtggacccccacttccagtggttgtttaggttgcagttgtgaaaatatgctgccaacatttaaaaacttgtttcatatgtatatatgtatacacatatatgaatatgtatgtatatatacatatatgagaacatgtgtgtacacatatatgaatatgtatatatgtgtatgtatgtatatatgtatatgaaatgagagccacatctaaagatttcttaaatcaagtttggttcagcttccttagaactgtggctgtactttttgaggagtacctcatagtactatatttttaatgcatgcaaatcataatagctccaaatgaaccacagttttttcccaatggaggatttttttttaattcttgtactaaaaaaaaaaaatccataccaaatatttttacaaattaagattgatgtaggttttaaaaaaggcatttgtatgttgttagcttacatatggggctaggtaatttcattgcttaaaaagatgcgcctaggctccctcttggtggctggatttctttttcttcgcccgtggtggccatggttcttaatagggccaccggaatcatggtttcttttttttttttttttttggagatggagtctcgccctgtgacccaggctggagtgcagtggcacgatctcggctcactgcaacctctgcctcctgggttcacgccattctcctgtctcagcctcctgagtagctgggactacaggtgaatgccaccacgcccggctgatttttgtatttttagtagagatggggtttcaccatagtggtcaggctgttctcgaactcctgacctcaggtgatccacctgccttggcctcccaaagtgctaggattacaggtgtgagccaccacacccggccccagagtaatggtttcttgactttctgtagcccttgttccttagtctgctgtgatatttatgttgacctttatcattttctattctgaacccctcttagcatttaatgtgaaatctaagaaattagaagtagaatggcttttattgttttgacacctttgaaattattattaataatttttccagagcaaaaaagcaaacacgctcaataagactaaacaaaacaaaatataaatgtacatcatttaatgtcccagtggctctattctacctgtaagaaaatgatacaaaaccacctaagatattttgaagcctgacaaatcagcttcatggaaaaaggtaaaaaatgcatttttcaaccgaaagggcagatccaatagaagacccgctccttaaataaacataaaatgtaaaaagttggaaaattaagagtaatgttccatctggaaactgaacttttgtccttgaacttgtgttggcaccaagcctcatacacagtgagctcaataactgttgggacaaaggaaggaaggacaaaatgtgtaacttcccagcatctgggagatgctgtctcttgcctcactgagtgttccttttctttgctctcatgtcattccctgagaacaatgaattctgggacaggctaaacatcatgatgaagtttcttaaacagactttcttagtggaaatccatttagatctgggtgtgctctatggggagtgctgacgtcaaagagcaaatgtctataaggggcccttttaaaatgaacattttcctcattgagcaagctgggattctctaatgtagaaatcaagccatctttataatttcacttcagatgtttatgtttttgttttttttgtctccaatgatggtaaaaataaaaactacgcattacttaaaggagtttccctcacatgtaaacactgttaggaagtctggattaagttgaaagtcctgttttaactttttttctctcatataccaaacactctgtatttctcttaaagaagccctttaagagaaagccctaattttatatctgacagtaaagtttgctgcaagtgtatgagttcaaacacatcccttgttttctgtccctaggggaaaagtcatgtagttttagcttggctccagtgttaatattatattcagtagcagccttagaagagtggtctaagacttgaacctggagcaattttatagcacagaatcctacgaagataggactgtgaacatttgttttctttttcgtgtgtgtcaaactaactggtttttgctttaccaataaaatgtcctcggcagagtaaattttaaacgtgaaaattatagatcttgatattgaatccatcagtgattcaagagatacacctatttgcctaaaacaacctaagatgtattggttatggaatcatgtgttggataggttcttaagacctgtttcctcaaatcttgacacagttttcaagggtggcttattgacttgcacggttgggcagataatccagatttacctaagattgggtaaaaaagtcatctgtgactttgctggcagggcatttgctaagtggagtacaggatctaaaagggttttcttagaaagggcaatattgtccaatgaagtaagcagaaggactctgggttagaagcatctgcacaaaaactggtgagacctactctccactgctctgcagctggatggctgatggcaggctgagcagtggggaagcaggttttaacaacagggagtccttccaggtcactgtatattgagaagaaacataaaactattgtctgttacattccgaggtcagccttcttcttaacgttttataatatgcaaatgccagcttctggaaagcaagtatcatcatgtaccaaatgctttatacaccatcacattcatgaattttttagcatggtcagaacttgtgtaaatatgtctcttagatgattttggggagatgtgatttatttttcatattttcaaaatgcatttcatttcaaataaagttatctattgagacaaccga

SEQ ID NO: 309360 - DNA, 4837 bp, Homo sapiens
tttcacaattattacggcccgcctgtcgcactactactgttatgcgggcgcaggactcttcacgcgtacaagaggctacggcattactcacactcttcgctcatttatggaccctggtggttaaattgtgcaccggcttctccgcagcacctccaactctgcctgaaaggggcagctcccgggcaagacaaggttttgaggacttgaggaagtgggacgagcacatttctattgtcttcacttggatcaaaagcaaaacagtctctccgccccgcaccagatcaagtagtttggacatcaccctactgaaaacttgcgattcttcttagttttctgcatacttttcatcacgatgcaggaaacgatttcgagtcaagaagacttttatttatgaacctttgaaaggatcgtcttgtatggtgaattttctaggagcgatgatgtactgtaattttattttaatgtattttgatttatgattatttattagttttttttaaatgcttgttctaagacatttctgaatgtagaccattttccaaaaaggaaactttattttcaaaaacctaatccgtagtaattcctaatcttggagaataaaaaagggcggtggaggggaaaacattaagaatttattcattatttctcgagtactttcagaaagtctgacactttcattgttgtgccagctggttgaaattaaaactctgatattactttttttgaggatttttatttttgtttttgcttaaacatatagtttgtctagaagtttaaaaagctaaaagttaaaaatggtgtaattatgaaaatctaacactcaagatagtttctaaaaggaaatcagtagttaaggatacctgatttcaaaatatttaaagcataacctaactgatggtaggatgattgtatcttgaatatgtggtagggccacatctattgtaggaaaaccttgcttttatcatctgtgtgtaaagggcttaataaggagaagaggccttttgactgatttgtgagtataaatgcatttgctgtttcatttcaaaaatgttgtggaggaaaagagtacatttaacttgtataagagaatatttgtactcctgtccaggctgcaggacctttcttcgagagctttgcacacttgacttgaaccacattttctgatccctttactttgttttagaagcacactgaaaaatctcgttgtttaaagtacaatttgtaaatatttcaaaggtctaggagtcataacttttgttttcatactgaaaatgatgttgatcagagaaaccaactgttttgcttttcattgctctgtgagaaatttgaggattctgttttgctgttaggtaagctaaactcagaaattgaaaaggaaaagactggataaacacaggattttcagtaagaaaacaaccccagtcttgtcttagaagccacttgttgaggagtctgttgggggaaaaaagaggatatgcttttaaaggtagaacaaaccttcttctgtgttaaatcaaaaggatgttcaaaatccaccaggacagatgctacttgggtttaaatggagccatagatgatacaaagtcctcttggggctgaaaatcacttcctatttgcatggctttactaactggtttctgttttccattatctttttcacagaaagtcttggtcagtatttttccagcatttaaattgaaacggtcagtattagaccactgctaggttatgtagtcaagaaataaaaatagaattacatgctacagatgtctttattctccttccatctagaaaggagttccaaggtcaaattactttttagtgcaatagttaaatgacattttgagatcataactcatatccaaaaagttgcagggaaaattaaaatagctttcccctattaagctaatggcaaacaaaacttaagtggacccccacttccagtggttgtttaggttgcagttgtgaaaatatgctgccaacatttaaaaacttgtttcatatgtatatatgtatacacatatatgaatatgtatgtatatatacatatatgagaacatgtgtgtacacatatatgaatatgtatatatgtgtatgtatgtatatatgtatatgaaatgagagccacatctaaagatttcttaaatcaagtttggttcagcttccttagaactgtggctgtactttttgaggagtacctcatagtactatatttttaatgcatgcaaatcataatagctccaaatgaaccacagttttttcccaatggaggatttttttttaattcttgtactaaaaaaaaaaaatccataccaaatatttttacaaattaagattgatgtaggttttaaaaaaggcatttgtatgttgttagcttacatatggggctaggtaatttcattgcttaaaaagatgcgcctaggctccctcttggtggctggatttctttttcttcgcccgtggtggccatggttcttaatagggccaccggaatcatggtttcttttttttttttttttttggagatggagtctcgccctgtgacccaggctggagtgcagtggcacgatctcggctcactgcaacctctgcctcctgggttcacgccattctcctgtctcagcctcctgagtagctgggactacaggtgaatgccaccacgcccggctgatttttgtatttttagtagagatggggtttcaccatagtggtcaggctgttctcgaactcctgacctcaggtgatccacctgccttggcctcccaaagtgctaggattacaggtgtgagccaccacacccggccccagagtaatggtttcttgactttctgtagcccttgttccttagtctgctgtgatatttatgttgacctttatcattttctattctgaacccctcttagcatttaatgtgaaatctaagaaattagaagtagaatggcttttattgttttgacacctttgaaattattattaataatttttccagagcaaaaaagcaaacacgctcaataagactaaacaaaacaaaatataaatgtacatcatttaatgtcccagtggctctattctacctgtaagaaaatgatacaaaaccacctaagatattttgaagcctgacaaatcagcttcatggaaaaaggtaaaaaatgcatttttcaaccgaaagggcagatccaatagaagacccgctccttaaataaacataaaatgtaaaaagttggaaaattaagagtaatgttccatctggaaactgaacttttgtccttgaacttgtgttggcaccaagcctcatacacagtgagctcaataactgttgggacaaaggaaggaaggacaaaatgtgtaacttcccagcatctgggagatgctgtctcttgcctcactgagtgttccttttctttgctctcatgtcattccctgagaacaatgaattctgggacaggctaaacatcatgatgaagtttcttaaacagactttcttagtggaaatccatttagatctgggtgtgctctatggggagtgctgacgtcaaagagcaaatgtctataaggggcccttttaaaatgaacattttcctcattgagcaagctgggattctctaatgtagaaatcaagccatctttataatttcacttcagatgtttatgtttttgttttttttgtctccaatgatggtaaaaataaaaactacgcattacttaaaggagtttccctcacatgtaaacactgttaggaagtctggattaagttgaaagtcctgttttaactttttttctctcatataccaaacactctgtatttctcttaaagaagccctttaagagaaagccctaattttatatctgacagtaaagtttgctgcaagtgtatgagttcaaacacatcccttgttttctgtccctaggggaaaagtcatgtagttttagcttggctccagtgttaatattatattcagtagcagccttagaagagtggtctaagacttgaacctggagcaattttatagcacagaatcctacgaagataggactgtgaacatttgttttctttttcgtgtgtgtcaaactaactggtttttgctttaccaataaaatgtcctcggcagagtaaattttaaacgtgaaaattatagatcttgatattgaatccatcagtgattcaagagatacacctatttgcctaaaacaacctaagatgtattggttatggaatcatgtgttggataggttcttaagacctgtttcctcaaatcttgacacagttttcaagggtggcttattgacttgcacggttgggcagataatccagatttacctaagattgggtaaaaaagtcatctgtgactttgctggcagggcatttgctaagtggagtacaggatctaaaagggttttcttagaaagggcaatattgtccaatgaagtaagcagaaggactctgggttagaagcatctgcacaaaaactggtgagacctactctccactgctctgcagctggatggctgatggcaggctgagcagtggggaagcaggttttaacaacagggagtccttccaggtcactgtatattgagaagaaacataaaactattgtctgttacattccgaggtcagccttcttcttaacgttttataatatgcaaatgccagcttctggaaagcaagtatcatcatgtaccaaatgctttatacaccatcacattcatgaattttttagcatggtcagaacttgtgtaaatatgtctcttagatgattttggggagatgtgatttatttttcatattttcaaaatgcatttcatttcaaataaagttatctattgagacaaccga

SEQ ID NO: 309361 - DNA, 4010 bp, Homo sapiens
ccctcacggtactcaaaaaaagtaatatcagagttttaatttcaaccagctggcacaacaatgaaagtgtcagacttcctgaaagtactcgagaaataatgaataaattcttaatgttttcccctccaccgcccttttttattctccaagattaggaattactacggattaggtttttgaaaataaagtttcctttttggaaaatggtctacattcaaaaatgttgtggaggaaaagagtacatttaacttgtataagagaatatttgtactcctgtccaggctgcaggacctttcttcgagagctttgcacacttgacttgaaccacattttctgatccctttactttgttttagaagcacactgaaaaatctcgttgtttaaagtacaatttgtaaatatttcaaaggtctaggagtcataacttttgttttcatactgaaaatgatgttgatcagagaaaccaactgttttgcttttcattgctctgtgagaaatttgaggattctgttttgctgttaggtaagctaaactcagaaattgaaaaggaaaagactggataaacacaggattttcagtaagaaaacaaccccagtcttgtcttagaagccacttgttgaggagtctgttgggggaaaaaagaggatatgcttttaaaggtagaacaaaccttcttctgtgttaaatcaaaaggatgttcaaaatccaccaggacagatgctacttgggtttaaatggagccatagatgatacaaagtcctcttggggctgaaaatcacttcctatttgcatggctttactaactggtttctgttttccattatctttttcacagaaagtcttggtcagtatttttccagcatttaaattgaaacggtcagtattagaccactgctaggttatgtagtcaagaaataaaaatagaattacatgctacagatgtctttattctccttccatctagaaaggagttccaaggtcaaattactttttagtgcaatagttaaatgacattttgagatcataactcatatccaaaaagttgcagggaaaattaaaatagctttcccctattaagctaatggcaaacaaaacttaagtggacccccacttccagtggttgtttaggttgcagttgtgaaaatatgctgccaacatttaaaaacttgtttcatatgtatatatgtatacacatatatgaatatgtatgtatatatacatatatgagaacatgtgtgtacacatatatgaatatgtatatatgtgtatgtatgtatatatgtatatgaaatgagagccacatctaaagatttcttaaatcaagtttggttcagcttccttagaactgtggctgtactttttgaggagtacctcatagtactatatttttaatgcatgcaaatcataatagctccaaatgaaccacagttttttcccaatggaggatttttttttaattcttgtactaaaaaaaaaaaatccataccaaatatttttacaaattaagattgatgtaggttttaaaaaaggcatttgtatgttgttagcttacatatggggctaggtaatttcattgcttaaaaagatgcgcctaggctccctcttggtggctggatttctttttcttcgcccgtggtggccatggttcttaatagggccaccggaatcatggtttcttttttttttttttttttggagatggagtctcgccctgtgacccaggctggagtgcagtggcacgatctcggctcactgcaacctctgcctcctgggttcacgccattctcctgtctcagcctcctgagtagctgggactacaggtgaatgccaccacgcccggctgatttttgtatttttagtagagatggggtttcaccatagtggtcaggctgttctcgaactcctgacctcaggtgatccacctgccttggcctcccaaagtgctaggattacaggtgtgagccaccacacccggccccagagtaatggtttcttgactttctgtagcccttgttccttagtctgctgtgatatttatgttgacctttatcattttctattctgaacccctcttagcatttaatgtgaaatctaagaaattagaagtagaatggcttttattgttttgacacctttgaaattattattaataatttttccagagcaaaaaagcaaacacgctcaataagactaaacaaaacaaaatataaatgtacatcatttaatgtcccagtggctctattctacctgtaagaaaatgatacaaaaccacctaagatattttgaagcctgacaaatcagcttcatggaaaaaggtaaaaaatgcatttttcaaccgaaagggcagatccaatagaagacccgctccttaaataaacataaaatgtaaaaagttggaaaattaagagtaatgttccatctggaaactgaacttttgtccttgaacttgtgttggcaccaagcctcatacacagtgagctcaataactgttgggacaaaggaaggaaggacaaaatgtgtaacttcccagcatctgggagatgctgtctcttgcctcactgagtgttccttttctttgctctcatgtcattccctgagaacaatgaattctgggacaggctaaacatcatgatgaagtttcttaaacagactttcttagtggaaatccatttagatctgggtgtgctctatggggagtgctgacgtcaaagagcaaatgtctataaggggcccttttaaaatgaacattttcctcattgagcaagctgggattctctaatgtagaaatcaagccatctttataatttcacttcagatgtttatgtttttgttttttttgtctccaatgatggtaaaaataaaaactacgcattacttaaaggagtttccctcacatgtaaacactgttaggaagtctggattaagttgaaagtcctgttttaactttttttctctcatataccaaacactctgtatttctcttaaagaagccctttaagagaaagccctaattttatatctgacagtaaagtttgctgcaagtgtatgagttcaaacacatcccttgttttctgtccctaggggaaaagtcatgtagttttagcttggctccagtgttaatattatattcagtagcagccttagaagagtggtctaagacttgaacctggagcaattttatagcacagaatcctacgaagataggactgtgaacatttgttttctttttcgtgtgtgtcaaactaactggtttttgctttaccaataaaatgtcctcggcagagtaaattttaaacgtgaaaattatagatcttgatattgaatccatcagtgattcaagagatacacctatttgcctaaaacaacctaagatgtattggttatggaatcatgtgttggataggttcttaagacctgtttcctcaaatcttgacacagttttcaagggtggcttattgacttgcacggttgggcagataatccagatttacctaagattgggtaaaaaagtcatctgtgactttgctggcagggcatttgctaagtggagtacaggatctaaaagggttttcttagaaagggcaatattgtccaatgaagtaagcagaaggactctgggttagaagcatctgcacaaaaactggtgagacctactctccactgctctgcagctggatggctgatggcaggctgagcagtggggaagcaggttttaacaacagggagtccttccaggtcactgtatattgagaagaaacataaaactattgtctgttacattccgaggtcagccttcttcttaacgttttataatatgcaaatgccagcttctggaaagcaagtatcatcatgtaccaaatgctttatacaccatcacattcatgaattttttagcatggtcagaacttgtgtaaatatgtctcttagatgattttggggagatgtgatttatttttcatattttcaaaatgcatttcatttcaaataaagttatctattgagacaaccga

SEQ ID NO: 309362 - DNA, 1644 bp, Homo sapiens
ctccttgggcgatcgcctgggtagaggagaggagtttccggggctcgggtccgggtcgccttccaggggaacgagcgcggaagcaagtgggcggcgagaggcggagcaagagacgctggagggcgtggacgcagcgggctttggaaaggccccaagttaatgaggcgtgcgccggctgccgagcgcctcttggagctgggctttcccccgcggtgcgggcgccaggagccgccttttccgctgggtgtcactcgggggtggggaagatggcccattcaaaagcgccgcgagggggcccggccagtgcccttcagtgagcgctcgcaagaggacggcagaggcccggcagctcggagctccgggaccttgtggcgcatcaggacgcggctgtccctctgccgggacccagagccgccgccgccgctctgcctcctgcgtgttagcctcctctgcgcgctccgggcaggcggccgtgggagccgctggggcgaggacggcgcgaggctgctgctgctgcccccggcccgcgcggctggaaacggagaggccgagccaagcggcggcccctcttatgctgggaggatgctggagagtagcggctgcaaagcgctgaaggagggcgtgctggagaagcgcagcgacgggttgttgcagctctggaagaaaaagtgttgcatcctcaccgaggaagggctgctgcttatcccgcccaagcagctgcaacaccagcagcagcagcaacagcagcagcagcagcagcaacaacagcccgggcaggggccggccgagccgtcccaacccagtggccccgctgtcgccagcctcgagccgccggtcaagctcaaggaactgcacttctccaacatgaagaccgtggactgtgtggagcgcaagggcaagtacatgtacttcactgtggtgatggcagagggcaaggagatcgactttcggtgcccgcaagaccagggctggaacgccgagatcacgctgcagatggtgcagtacaagaatcgtcaggccatcctggcggtcaaatccacgcggcagaagcagcagcacctggtccagcagcagcccccctcgcagccgcagccgcagccgcagcccaatcacaaccccagcctcagccccaacccaagcctcagccccagcagctccacccgtatccgcatccacatccacatccacactctcatcctcactcgcacccacaccctcacccgcacccgcatccgcaccaaataccgcacccacacccacagccgcactcgcagccgcacgggcaccggcttctccgcagcacctccaactctgcctgaaaggggcagctcccgggcaagacaaggtaaggtcccggcactcgcgctcccgaggagtgggtctcgggggtagtgagttgggaggagtaggaagcttgttcacaggttcggctcctgtatggagaaatcaaaactcataccaagtttctggggcaatggaagaaacagaaacaagctggggccaggagagctgggcagagaggggaggctggggagatccgggccaggcagggggcctcgcggaccgcgcccgcgcccgcgcccatcacgaccgtccttgtcccgtggtgcgtcccccagccccacttgactatatgtttgggca

SEQ ID NO: 309363 - DNA, 931 bp, Homo sapiens
gacccacgcgtccgcggacgcgtgggtcgacccacgcgtccgattatattcagtagcagccttagaagagtggtctaagacttgaacctggagcaattttatagcacagaatcctacgaagataggactgtgaacatttgttttctttttcgtgtgtgtcaaactaactggtttttgctttaccaataaaatgtcctcggcagagtaaattttaaacgtgaaaattatagatcttgatattgaatccatcagtgattcaagagatacacctatttgcctaaaacaacctaagatgtattggttatggaatcatgtgttggataggttcttaagacctgtttcctcaaatcttgacacagttttcaagggtggcttattgacttgcacggttgggcagataatccagatttacctaagattgggtaaaaaagtcatctgtgactttgctggcagggcatttgctaagtggagtacaggatctaaaagggttttcttagaaagggcaatattgtccaatgaagtaagcagaaggactctgggttagaagcatctgcacaaaaactggtgagacctactctccactgctctgcagctggatggctgatggcaggctgagcagtggggaagcaggttttaacaacagggagtccttccaggtcactgtatattgagaagaaacataaaactattgtctgttacattccgaggtcagccttcttcttaacgttttataatatgcaaatgccagcttctggaaagcaagtatcatcatgtaccaaatgctttatacaccatcacattcatgaattttttagcatggtcagaacttgtgtaaatatgtctcttagatgattttggggagatgtgatttatttttcatattttcaaaatgcatttcatttcaaataaagttatctattgagacaaccga

SEQ ID NO: 309364 - DNA, 757 bp, Homo sapiens
gagctcggtacccaatcagtttacacaagagtaaattttaaacgtgaaaattatagatcttgatattgaatccatcagtgattcaagagatacacctatttgcctaaaacaacctaagatgtattggttatggaatcatgtgttggataggttcttaagacctgtttcctcaaatcttgacacagttttcaagggtggcttattgacttgcacggttgggcagataatccagatttacctaagattgggtaaaaaagtcatctgtgactttgctggcagggcatttgctaagtggagtacaggatctaaaagggttttcttagaaagggcaatattgtccaatgaagtaagcagaaggactctgggttagaagcatctgcacaaaaactggtgagacctactctccactgctctgcagctggatggctgatggcaggctgagcagtggggaagcaggttttaacaacagggagtccttccaggtcactgtatattgagaagaaacataaaactattgtctgttacattccgaggtcagccttcttcttaacgttttataatatgcaaatgccagcttctggaaagcaagtatcatcatgtaccaaatgctttatacaccatcacattcatgaattttttagcatggtcagaacttgtgtaaatatgtctcttagatgattttggggagatgtgatttatttttcatattttcaaaatgcatttcatttcaaataaagttatctattgagacaaccga

SEQ ID NO: 309365 - DNA, 1005 bp, Homo sapiens
ttctttttggcatatctctttttctaacttttttttttctttttacaaaaaacaattgttatttgtgtacttttaaaacctcacagtaatattttcacactaccttcttggctgaaagttcacactcggaattccagagcagtccatggccaggcccactgggctccccttgctctctccttggctttggtaaccactggccccagggactcagcctgctttcctatccatcccctcagtagctgtcaccatgcaggttaccccttctgtcgtcttctaccactaactccatgtctgactgcaagtgaaaggaacagaagcccaaacctttgggttttaaggagtttattgctaatctgtaaaacagaaagagacaggagataagcatgacaaaatatagggaagaaatgacttttgcctaaacttcccaattgtgtacaattgaagcctctgctttatagctcttagcacacctctcaaataagaaggcagtactgggaaggctctgaacctgtggcagaaccactgatagctgtggagctattccaaggagtctgggaatcagggggattatcaagatcattgttagaataaattaatcttactgtatatatagcagaagttttcaagcatatgtaaatgctactaataaccaaataattacaccttgtttttctttaaactgtaactctcaagtatgtctctacataattttttgattggtagtgtctgcatgctcaaaaagcttgaaaacactactggagaagaaggtctcgggagtgtgatgaaatacgtttacatggcagcttcatcatttaattggtgaaagtgactatgtgtcttaaactctctgagcctcagtttgcacatccaaaagcaaggatataattccatgaacctttccacctcaagtccacaaggcagaatagcaagatgttaactgccactctgaggaccaccaaataaaaggacaatttattaggccacttgccagcatggacacaa

SEQ ID NO: 309366 - DNA, 2084 bp, Homo sapiens
cggactcagcggcggaagtggcgctgccggaagatcttcttccgctctgaggcgctactgaggccgcggagccggactgcggttggggcgggaagagccggggccgtggctgacatggagcagccctgctgctgaggccgcgccctccccgccctgaggtgggggcccaccaggatgagcaagctgcccagggagctgacccgagacttggagcgcagcctgcctgccgtggcctccctgggctcctcactgtcccacagccagagcctctcctcgcacctccttccgccgcctgagaagcgaagggccatctctgatgtccgccgcaccttctgtctcttcgtcaccttcgacctgctcttcatctccctgctctggatcatcgaactgaataccaacacaggcatccgtaagaacttggagcaggagatcatccagtacaactttaaaacttccttcttcgacatctttgtcctggccttcttccgcttctctggactgctcctaggctatgccgtgctgcagctccggcactggtgggtgattgcggtcacgacgctggtgtccagtgcattcctcattgtcaaggtcatcctctctgagctgctcagcaaaggggcatttggctacctgctccccatcgtctcttttgtcctcgcctggttggagacctggttccttgacttcaaagtcctaccccaggaagctgaagaggagcgatggtatcttgccgcccaggttgctgttgcccgtggacccctgctgttctccggtgctctgtccgagggacagttctattcacccccagaatcctttgcagggtctgacaatgaatcagatgaagaagttgctgggaagaaaagtttctctgctcaggagcgggagtacatccgccaggggaaggaggccacggcagtggtggaccagatcttggcccaggaagagaactggaagtttgagaagaataatgaatatggggacaccgtgtacaccattgaagttccctttcacggcaagacgtttatcctgaagaccttcctgccctgtcctgcggagctcgtgtaccaggaggtgatcctgcagcccgagaggatggtgctgtggaacaagacagtgactgcctgccagatcctgcagcgagtggaagacaacaccctcatctcctatgacgtgtctgcaggggctgcgggcggcgtggtctccccaagggacttcgtgaatgtccggcgcattgagcggcgcagggaccgatacttgtcatcagggatcgccacctcacacagtgccaagcccccgacgcacaaatatgtccggggagagaatggccctgggggcttcatcgtgctcaagtcggccagtaacccccgtgtttgcacctttgtctggattcttaatacagatctcaagggccgcctgccccggtacctcatccaccagagcctcgcggccaccatgtttgaatttgcctttcacctgcgacagcgcatcagcgagctgggggcccgggcgtgactgtgccccctcccaccctgcgggccagggtcctgtcgccaccacttccagagccagaaagggtgccagttgggctcgcactgcccacatgggacctggccccaggctgtcaccctccaccgagccacgcagtgcctggagttgactgactgagcaggctgtggggtggagcactggactccggggccccactggctggaggaagtggggtctggcctgttgatgtttacatggcgccctgcctcctggaggaccagattgctctgccccaccttgccagggcagggtctgggctgggcacctgacttggctggggaggaccagggccctgggcagggcagggcagcctgtcacccgtgtgaagatgaaggggctcttcatctgcctgcgctctcgtcggtttttttaggattattgaaagagtctgggacccttgttggggagtgggtggcaggtgggggtgggctgctggccatgaatctctgcctctcccaggctgtccccctcctcccagggcctcctgggggacctttgtattaagccaattaaaaacatgaatttaaaaaaaaaaa

SEQ ID NO: 309367 - DNA, 1062 bp, Homo sapiens
cggactcagcggcggaagtggcgctgccggaagatcttcttccgctctgaggcgctactgaggccgcggagccggactgcggttggggcgggaagagccggggccgtggctgacatggagcagccctgctgctgaggccgcgccctccccgccctgaggtgggggcccaccaggatgagcaagctgcccagggagctgacccgagacttggagcgcagcctgcctgccgtggcctccctgggctcctcactgtcccacagccagagcctctcctcgcacctccttccgccgcctgagaagcgaagggccatctctgatgtccgccgcaccttctgtctcttcgtcaccttcgacctgctcttcatctccctgctctggatcatcgaactgaataccaacacaggcatccgtaagaacttggagcaggagatcatccagtacaactttaaaacttccttcttcgacatctttgtcctggccttcttccgcttctctggactgctcctaggctatgccgtgctgcagctccggcactggtgggtgattgcggtcacgacgctggtgtccagtgcattcctcattgtcaaggtcatcctctctgagctgctcagcaaaggggcatttggctacctgctccccatcgtctcttttgtcctcgcctggttggagacctggttccttgacttcaaagtcctaccccaggaagctgaagaggagcgatggtatcttgccgcccaggttgctgttgcccgtggacccctgctgttctccggtgctctgtccgagggacagttctattcacccccagaatcctttgcaggtctgacatgactcgattagaagtgctggacgaacagtcccgcccagacgggataatcgccgggagaagtccgcgtgtgtgcattgtcccagaagcgtcgttcacactctttgtgcccggtccacatctcgggaattcttaactcgtgtactacctacgccgcgtggttcaaatcatgtgcaccttgtgtgttcctcggccccctcatccttctcgtctcacaccgaggcccccccgccctc

SEQ ID NO: 309368 - DNA, 807 bp, Homo sapiens
  misc_feature (756)..(756): n is a, c, g, or t
  misc_feature (786)..(786): n is a, c, g, or t
cggactcagcggcggaagtggcgctgccggaagatcttcttccgctctgaggcgctactgaggccgcggagccggactgcggttggggcgggaagagccggggccgtggctgacatggagcagccctgctgctgaggccgcgccctccccgccctgaggtgggggcccaccaggatgagcaagctgcccagggagctgacccgagacttggagcgcagcctgcctgccgtggcctccctgggctcctcactgtcccacagccagagcctctcctcgcacctccttccgccgcctgagaagcgaagggccatctctgatgtccgccgcaccttctgtctcttcgtcaccttcgacctgctcttcatctccctgctctggatcatcgaactgaataccaacacaggcatccgtaagaacttggagcaggagatcatccagtacaactttaaaacttccttcttcgacatctttgtcctggccttcttccgcttctctggactgctcctaggctatgccgtgctgcagctccggcactggtgggtgattgcggtcacgacgctggtgtccagtgcattcctcattgtcaaggtcatcctctctgagctgctcagcaaaggggcatttggctacctgctccccatcgtctcttttgtcctcgcctggttggagacctggttccttgacttcaaagtcctaccccaggaagctgaagaggagcgataacttgaaaaaagaaacgatgggtttctttgcccnccccaaagttttgctttttggccccgtggnaacccctggctgtttcttccc

SEQ ID NO: 309369 - DNA, 2543 bp, Homo sapiens
cggactcagcggcggaagtggcgctgccggaagatcttcttccgctctgaggcgctactgaggccgcggagccggactgcggttggggcgggaagagccggggccgtggctgacatggagcagccctgctgctgaggccgcgccctccccgccctgaggtgggggcccaccaggatgagcaagctgcccagggagctgacccgagacttggagcgcagcctgcctgccgtggcctccctgggctcctcactgtcccacagccagagcctctcctcgcacctccttccgccgcctgagaagcgaagggccatctctgatgtccgccgcaccttctgtctcttcgtcaccttcgacctgctcttcatctccctgctctggatcatcgaactgaataccaacacaggcatccgtaagaacttggagcaggagatcatccagtacaactttaaaacttccttcttcgacatctttgtcctggccttcttccgcttctctggactgctcctaggctatgccgtgctgcagctccggcactggtgggtgattgcggtcacgacgctggtgtccagtgcattcctcattgtcaaggtcatcctctctgagctgctcagcaaaggggcatttggctacctgctccccatcgtctcttttgtcctcgcctggttggagacctggttccttgacttcaaagtcctaccccaggaagctgaagaggagcgatggtatcttgccgcccaggttgctgttgcccgtggacccctgctgttctccggtgctctgtccgagggacagttctattcacccccagaatcctttgcagggtctgacaatgaatcagatgaagaagttgctgggaagaaaagtttctctgctcaggagcgggagtacatccgccaggggaaggaggccacggcagtggtggaccagatcttggcccaggaagagaactggaagtttgagaagaataatgaatatggggacaccgtgtacaccattgaagttccctttcacggcaagacgtttatcctgaagaccttcctgccctgtcctgcggagctcgtgtaccaggaggtgatcctgcagcccgagaggatggtgctgtggaacaagacagtgactgcctgccagatcctgcagcgagtggaagacaacaccctcatctcctatgacgtgtctgcaggggctgcgggcggcgtggtctccccaagggacttcgtgaatgtccggcgcattgagcggcgcagggaccgatacttgtcatcagggatcgccacctcacacagtgccaagcccccgacgcacaaatatgtccggggagagaatggccctgggggcttcatcgtgctcaagtcggccagtaacccccgtgtttgcacctttgtctggattcttaatacagatctcaaggtggggtgctggggggctgccaggtgggttctgtggagtggaggggaccctgctgctgacttggttgctgcatgactttgggggctctctgccatgcctgggcctcccctttgtcagccacctttcttacttgaaaatttgggtcagggtccagatggtctcttagccctgggttgctgtagggcatgtgcccccccttcttacctctgagtcctgaggccctgaggaagggtggctggtggccagcccggccccaccctggtctgtttgtgtggctggtgccaagagccaggcccagcatgttcttcctgccaggggtgagtgggagagggcggcccaggctggattccagagctgcacctgcattctggcccagagcccccctgctggtgccagctgcaaggggagaccctgctgagggcaggccatcaagtgtgacttctgcctgccttcccccagggccgcctgccccggtacctcatccaccagagcctcgcggccaccatgtttgaatttgcctttcacctgcgacagcgcatcagcgagctgggggcccgggcgtgactgtgccccctcccaccctgcgggccagggtcctgtcgccaccacttccagagccagaaagggtgccagttgggctcgcactgcccacatgggacctggccccaggctgtcaccctccaccgagccacgcagtgcctggagttgactgactgagcaggctgtggggtggagcactggactccggggccccactggctggaggaagtggggtctggcctgttgatgtttacatggcgccctgcctcctggaggaccagattgctctgccccaccttgccagggcagggtctgggctgggcacctgacttggctggggaggaccagggccctgggcagggcagggcagcctgtcacccgtgtgaagatgaaggggctcttcatctgcctgcgctctcgtcggtttttttaggattattgaaagagtctgggacccttgttggggagtgggtggcaggtgggggtgggctgctggccatgaatctctgcctctcccaggctgtccccctcctcccagggcctcctgggggacctttgtattaagccaattaaaaacatgaatttaaaaaaaaaaa

SEQ ID NO: 309370 - DNA, 2285 bp, Homo sapiens
cggactcagcggcggaagtggcgctgccggaagatcttcttccgctctgaggcgctactgaggccgcggagccggactgcggttggggcgggaagagccggggccgtggctgacatggagcagccctgctgctgaggccgcgccctccccgccctgaggtgggggcccaccaggatgagcaagctgcccagggagctgacccgagacttggagcgcagcctgcctgccgtggcctccctgggctcctcactgtcccacagccagagcctctcctcgcacctccttccgccgcctgagaagcgaagggccatctctgatgtccgccgcaccttctgtctcttcgtcaccttcgacctgctcttcatctccctgctctggatcatcgaactgaataccaacacaggcatccgtaagaacttggagcaggagatcatccagtacaactttaaaacttccttcttcgacatctttgtcctggccttcttccgcttctctggactgctcctaggctatgccgtgctgcagctccggcactggtgggtgattgcggtcacgacgctggtgtccagtgcattcctcattgtcaaggtcatcctctctgagctgctcagcaaaggggcatttggctacctgctccccatcgtctcttttgtcctcgcctggttggagacctggttccttgacttcaaagtcctaccccaggaagctgaagaggagcgatatgtgagtgcttgcgggtaggggggtgcagcgagggttacccacagccccaagagaggggagttgcgggcatgagagtcagtctgaagcatctcgccacctctgagcagcctccagtagcctgagggggagcttgggtgggggtaccccaggctgctagggtgtaactgtcctcggtccgggaccgagtctgctcctccagggtatcttgccgcccaggttgctgttgcccgtggacccctgctgttctccggtgctctgtccgagggacagttctattcacccccagaatcctttgcagggtctgacaatgaatcagatgaagaagttgctgggaagaaaagtttctctgctcaggagcgggagtacatccgccaggggaaggaggccacggcagtggtggaccagatcttggcccaggaagagaactggaagtttgagaagaataatgaatatggggacaccgtgtacaccattgaagttccctttcacggcaagacgtttatcctgaagaccttcctgccctgtcctgcggagctcgtgtaccaggaggtgatcctgcagcccgagaggatggtgctgtggaacaagacagtgactgcctgccagatcctgcagcgagtggaagacaacaccctcatctcctatgacgtgtctgcaggggctgcgggcggcgtggtctccccaagggacttcgtgaatgtccggcgcattgagcggcgcagggaccgatacttgtcatcagggatcgccacctcacacagtgccaagcccccgacgcacaaatatgtccggggagagaatggccctgggggcttcatcgtgctcaagtcggccagtaacccccgtgtttgcacctttgtctggattcttaatacagatctcaagggccgcctgccccggtacctcatccaccagagcctcgcggccaccatgtttgaatttgcctttcacctgcgacagcgcatcagcgagctgggggcccgggcgtgactgtgccccctcccaccctgcgggccagggtcctgtcgccaccacttccagagccagaaagggtgccagttgggctcgcactgcccacatgggacctggccccaggctgtcaccctccaccgagccacgcagtgcctggagttgactgactgagcaggctgtggggtggagcactggactccggggccccactggctggaggaagtggggtctggcctgttgatgtttacatggcgccctgcctcctggaggaccagattgctctgccccaccttgccagggcagggtctgggctgggcacctgacttggctggggaggaccagggccctgggcagggcagggcagcctgtcacccgtgtgaagatgaaggggctcttcatctgcctgcgctctcgtcggtttttttaggattattgaaagagtctgggacccttgttggggagtgggtggcaggtgggggtgggctgctggccatgaatctctgcctctcccaggctgtccccctcctcccagggcctcctgggggacctttgtattaagccaattaaaaacatgaatttaaaaaaaaaaa

SEQ ID NO: 309371 - DNA, 1985 bp, Homo sapiens
cggactcagcggcggaagtggcgctgccggaagatcttcttccgctctgaggcgctactgaggccgcggagccggactgcggttggggcgggaagagccggggccgtggctgacatggagcagccctgctgctgaggccgcgccctccccgccctgaggtgggggcccaccaggatgagcaagctgcccagggagctgacccgagacttggagcgcagcctgcctgccgtggcctccctgggctcctcactgtcccacagccagagcctctcctcgcacctccttccgccgcctgagaagcgaagggccatctctgatgtccgccgcaccttctgtctcttcgtcaccttcgacctgctcttcatctccctgctctggatcatcgaactgaataccaacacaggcatccgtaagaacttggagcaggagatcatccagtacaactttaaaacttccttcttcgacatctttgtcctggccttcttccgcttctctggactgctcctaggctatgccgtgctgcagctccggcactggtgggtgattgcggtcacgacgctggtgtccagtgcattcctcattgtcaaggtcatcctctctgagctgctcagcaaaggggcatttggctacctgctccccatcgtctcttttgtcctcgcctggttggagacctggttccttgacttcaaagtcctaccccaggaagctgaagaggagcgatggtctgacaatgaatcagatgaagaagttgctgggaagaaaagtttctctgctcaggagcgggagtacatccgccaggggaaggaggccacggcagtggtggaccagatcttggcccaggaagagaactggaagtttgagaagaataatgaatatggggacaccgtgtacaccattgaagttccctttcacggcaagacgtttatcctgaagaccttcctgccctgtcctgcggagctcgtgtaccaggaggtgatcctgcagcccgagaggatggtgctgtggaacaagacagtgactgcctgccagatcctgcagcgagtggaagacaacaccctcatctcctatgacgtgtctgcaggggctgcgggcggcgtggtctccccaagggacttcgtgaatgtccggcgcattgagcggcgcagggaccgatacttgtcatcagggatcgccacctcacacagtgccaagcccccgacgcacaaatatgtccggggagagaatggccctgggggcttcatcgtgctcaagtcggccagtaacccccgtgtttgcacctttgtctggattcttaatacagatctcaagggccgcctgccccggtacctcatccaccagagcctcgcggccaccatgtttgaatttgcctttcacctgcgacagcgcatcagcgagctgggggcccgggcgtgactgtgccccctcccaccctgcgggccagggtcctgtcgccaccacttccagagccagaaagggtgccagttgggctcgcactgcccacatgggacctggccccaggctgtcaccctccaccgagccacgcagtgcctggagttgactgactgagcaggctgtggggtggagcactggactccggggccccactggctggaggaagtggggtctggcctgttgatgtttacatggcgccctgcctcctggaggaccagattgctctgccccaccttgccagggcagggtctgggctgggcacctgacttggctggggaggaccagggccctgggcagggcagggcagcctgtcacccgtgtgaagatgaaggggctcttcatctgcctgcgctctcgtcggtttttttaggattattgaaagagtctgggacccttgttggggagtgggtggcaggtgggggtgggctgctggccatgaatctctgcctctcccaggctgtccccctcctcccagggcctcctgggggacctttgtattaagccaattaaaaacatgaatttaaaaaaaaaaa

SEQ ID NO: 309372 - DNA, 2178 bp, Homo sapiens
cggactcagcggcggaagtggcgctgccggaagatcttcttccgctctgaggcgctactgaggccgcggagccggactgcggttggggcgggaagagccggggccgtggctgacatggagcagtagagacgggtttcactgtgttagccagaatggtctcgatctcctgaccttgtgatccacccacctcccgcctcccagagtgctgggattacagccctgctgctgaggccgcgccctccccgccctgaggtgggggcccaccaggatgagcaagctgcccagggagctgacccgagacttggagcgcagcctgcctgccgtggcctccctgggctcctcactgtcccacagccagagcctctcctcgcacctccttccgccgcctgagaagcgaagggccatctctgatgtccgccgcaccttctgtctcttcgtcaccttcgacctgctcttcatctccctgctctggatcatcgaactgaataccaacacaggcatccgtaagaacttggagcaggagatcatccagtacaactttaaaacttccttcttcgacatctttgtcctggccttcttccgcttctctggactgctcctaggctatgccgtgctgcagctccggcactggtgggtgattgcggtcacgacgctggtgtccagtgcattcctcattgtcaaggtcatcctctctgagctgctcagcaaaggggcatttggctacctgctccccatcgtctcttttgtcctcgcctggttggagacctggttccttgacttcaaagtcctaccccaggaagctgaagaggagcgatggtatcttgccgcccaggttgctgttgcccgtggacccctgctgttctccggtgctctgtccgagggacagttctattcacccccagaatcctttgcagggtctgacaatgaatcagatgaagaagttgctgggaagaaaagtttctctgctcaggagcgggagtacatccgccaggggaaggaggccacggcagtggtggaccagatcttggcccaggaagagaactggaagtttgagaagaataatgaatatggggacaccgtgtacaccattgaagttccctttcacggcaagacgtttatcctgaagaccttcctgccctgtcctgcggagctcgtgtaccaggaggtgatcctgcagcccgagaggatggtgctgtggaacaagacagtgactgcctgccagatcctgcagcgagtggaagacaacaccctcatctcctatgacgtgtctgcaggggctgcgggcggcgtggtctccccaagggacttcgtgaatgtccggcgcattgagcggcgcagggaccgatacttgtcatcagggatcgccacctcacacagtgccaagcccccgacgcacaaatatgtccggggagagaatggccctgggggcttcatcgtgctcaagtcggccagtaacccccgtgtttgcacctttgtctggattcttaatacagatctcaagggccgcctgccccggtacctcatccaccagagcctcgcggccaccatgtttgaatttgcctttcacctgcgacagcgcatcagcgagctgggggcccgggcgtgactgtgccccctcccaccctgcgggccagggtcctgtcgccaccacttccagagccagaaagggtgccagttgggctcgcactgcccacatgggacctggccccaggctgtcaccctccaccgagccacgcagtgcctggagttgactgactgagcaggctgtggggtggagcactggactccggggccccactggctggaggaagtggggtctggcctgttgatgtttacatggcgccctgcctcctggaggaccagattgctctgccccaccttgccagggcagggtctgggctgggcacctgacttggctggggaggaccagggccctgggcagggcagggcagcctgtcacccgtgtgaagatgaaggggctcttcatctgcctgcgctctcgtcggtttttttaggattattgaaagagtctgggacccttgttggggagtgggtggcaggtgggggtgggctgctggccatgaatctctgcctctcccaggctgtccccctcctcccagggcctcctgggggacctttgtattaagccaattaaaaacatgaatttaaaaaaaaaaa

SEQ ID NO: 309373 - DNA, 2030 bp, Homo sapiens
  misc_feature (12)..(12): n is a, c, g, or t
  misc_feature (20)..(20): n is a, c, g, or t
  misc_feature (24)..(24): n is a, c, g, or t
  misc_feature (26)..(27): n is a, c, g, or t
  misc_feature (30)..(30): n is a, c, g, or t
  misc_feature (32)..(33): n is a, c, g, or t
tgaggccgcgcncccccccncccncnnccncnnccgcaacaccccccggccgtggctgacatggagcagccctgctgctgaggccgcgccctccccgccctgaggtgggggcccaccaggatgagcaagctgcccagggagctgacccgagacttggagcgcagcctgcctgccgtggcctccctgggctcctcactgtcccacagccagagcctctcctcgcacctccttccgccgcctgagaagcgaagggccatctctgatgtccgccgcaccttctgtctcttcgtcaccttcgacctgctcttcatctccctgctctggatcatcgaactgaataccaacacaggcatccgtaagaacttggagcaggagatcatccagtacaactttaaaacttccttcttcgacatctttgtcctggccttcttccgcttctctggactgctcctaggctatgccgtgctgcagctccggcactggtgggtgattgcggtcacgacgctggtgtccagtgcattcctcattgtcaaggtcatcctctctgagctgctcagcaaaggggcatttggctacctgctccccatcgtctcttttgtcctcgcctggttggagacctggttccttgacttcaaagtcctaccccaggaagctgaagaggagcgatggtatcttgccgcccaggttgctgttgcccgtggacccctgctgttctccggtgctctgtccgagggacagttctattcacccccagaatcctttgcagggtctgacaatgaatcagatgaagaagttgctgggaagaaaagtttctctgctcaggagcgggagtacatccgccaggggaaggaggccacggcagtggtggaccagatcttggcccaggaagagaactggaagtttgagaagaataatgaatatggggacaccgtgtacaccattgaagttccctttcacggcaagacgtttatcctgaagaccttcctgccctgtcctgcggagctcgtgtaccaggaggtgatcctgcagcccgagaggatggtgctgtggaacaagacagtgactgcctgccagatcctgcagcgagtggaagacaacaccctcatctcctatgacgtgtctgcaggggctgcgggcggcgtggtctccccaagggacttcgtgaatgtccggcgcattgagcggcgcagggaccgatacttgtcatcagggatcgccacctcacacagtgccaagcccccgacgcacaaatatgtccggggagagaatggccctgggggcttcatcgtgctcaagtcggccagtaacccccgtgtttgcacctttgtctggattcttaatacagatctcaagggccgcctgccccggtacctcatccaccagagcctcgcggccaccatgtttgaatttgcctttcacctgcgacagcgcatcagcgagctgggggcccgggcgtgactgtgccccctcccaccctgcgggccagggtcctgtcgccaccacttccagagccagaaagggtgccagttgggctcgcactgcccacatgggacctggccccaggctgtcaccctccaccgagccacgcagtgcctggagttgactgactgagcaggctgtggggtggagcactggactccggggccccactggctggaggaagtggggtctggcctgttgatgtttacatggcgccctgcctcctggaggaccagattgctctgccccaccttgccagggcagggtctgggctgggcacctgacttggctggggaggaccagggccctgggcagggcagggcagcctgtcacccgtgtgaagatgaaggggctcttcatctgcctgcgctctcgtcggtttttttaggattattgaaagagtctgggacccttgttggggagtgggtggcaggtgggggtgggctgctggccatgaatctctgcctctcccaggctgtccccctcctcccagggcctcctgggggacctttgtattaagccaattaaaaacatgaatttaaaaaaaaaaa

SEQ ID NO: 309374 - DNA, 2016 bp, Homo sapiens
ggcaggcccagaggctgttgacaggaccagaggctggagctcagggctaggcctgccctgctgctgaggccgcgccctccccgccctgaggtgggggcccaccaggatgagcaagctgcccagggagctgacccgagacttggagcgcagcctgcctgccgtggcctccctgggctcctcactgtcccacagccagagcctctcctcgcacctccttccgccgcctgagaagcgaagggccatctctgatgtccgccgcaccttctgtctcttcgtcaccttcgacctgctcttcatctccctgctctggatcatcgaactgaataccaacacaggcatccgtaagaacttggagcaggagatcatccagtacaactttaaaacttccttcttcgacatctttgtcctggccttcttccgcttctctggactgctcctaggctatgccgtgctgcagctccggcactggtgggtgattgcggtcacgacgctggtgtccagtgcattcctcattgtcaaggtcatcctctctgagctgctcagcaaaggggcatttggctacctgctccccatcgtctcttttgtcctcgcctggttggagacctggttccttgacttcaaagtcctaccccaggaagctgaagaggagcgatggtatcttgccgcccaggttgctgttgcccgtggacccctgctgttctccggtgctctgtccgagggacagttctattcacccccagaatcctttgcagggtctgacaatgaatcagatgaagaagttgctgggaagaaaagtttctctgctcaggagcgggagtacatccgccaggggaaggaggccacggcagtggtggaccagatcttggcccaggaagagaactggaagtttgagaagaataatgaatatggggacaccgtgtacaccattgaagttccctttcacggcaagacgtttatcctgaagaccttcctgccctgtcctgcggagctcgtgtaccaggaggtgatcctgcagcccgagaggatggtgctgtggaacaagacagtgactgcctgccagatcctgcagcgagtggaagacaacaccctcatctcctatgacgtgtctgcaggggctgcgggcggcgtggtctccccaagggacttcgtgaatgtccggcgcattgagcggcgcagggaccgatacttgtcatcagggatcgccacctcacacagtgccaagcccccgacgcacaaatatgtccggggagagaatggccctgggggcttcatcgtgctcaagtcggccagtaacccccgtgtttgcacctttgtctggattcttaatacagatctcaagggccgcctgccccggtacctcatccaccagagcctcgcggccaccatgtttgaatttgcctttcacctgcgacagcgcatcagcgagctgggggcccgggcgtgactgtgccccctcccaccctgcgggccagggtcctgtcgccaccacttccagagccagaaagggtgccagttgggctcgcactgcccacatgggacctggccccaggctgtcaccctccaccgagccacgcagtgcctggagttgactgactgagcaggctgtggggtggagcactggactccggggccccactggctggaggaagtggggtctggcctgttgatgtttacatggcgccctgcctcctggaggaccagattgctctgccccaccttgccagggcagggtctgggctgggcacctgacttggctggggaggaccagggccctgggcagggcagggcagcctgtcacccgtgtgaagatgaaggggctcttcatctgcctgcgctctcgtcggtttttttaggattattgaaagagtctgggacccttgttggggagtgggtggcaggtgggggtgggctgctggccatgaatctctgcctctcccaggctgtccccctcctcccagggcctcctgggggacctttgtattaagccaattaaaaacatgaatttaaaaaaaaaaa

SEQ ID NO: 309375 - DNA, 2254 bp, Homo sapiens
ggcaggcccagaggctgttgacaggaccagaggctggagctcagggctaggcctggtaggagcaggctacagccccagggatccaggaggggccctgctgctgaggccgcgccctccccgccctgaggtgggggcccaccaggatgagcaagctgcccagggagctgacccgagacttggagcgcagcctgcctgccgtggcctccctgggctcctcactgtcccacagccagagcctctcctcgcacctccttccgccgcctgagaagcgaagggccatctctgatgtccgccgcaccttctgtctcttcgtcaccttcgacctgctcttcatctccctgctctggatcatcgaactgaataccaacacaggcatccgtaagaacttggagcaggagatcatccagtacaactttaaaacttccttcttcgacatctttgtcctggccttcttccgcttctctggactgctcctaggctatgccgtgctgcagctccggcactggtgggtgattgcggtcacgacgctggtgtccagtgcattcctcattgtcaaggtcatcctctctgagctgctcagcaaaggggcatttggctacctgctccccatcgtctcttttgtcctcgcctggttggagacctggttccttgacttcaaagtcctaccccaggaagctgaagaggagcgatatgtgagtgcttgcgggtaggggggtgcagcgagggttacccacagccccaagagaggggagttgcgggcatgagagtcagtctgaagcatctcgccacctctgagcagcctccagtagcctgagggggagcttgggtgggggtaccccaggctgctagggtgtaactgtcctcggtccgggaccgagtctgctcctccagggtatcttgccgcccaggttgctgttgcccgtggacccctgctgttctccggtgctctgtccgagggacagttctattcacccccagaatcctttgcagggtctgacaatgaatcagatgaagaagttgctgggaagaaaagtttctctgctcaggagcgggagtacatccgccaggggaaggaggccacggcagtggtggaccagatcttggcccaggaagagaactggaagtttgagaagaataatgaatatggggacaccgtgtacaccattgaagttccctttcacggcaagacgtttatcctgaagaccttcctgccctgtcctgcggagctcgtgtaccaggaggtgatcctgcagcccgagaggatggtgctgtggaacaagacagtgactgcctgccagatcctgcagcgagtggaagacaacaccctcatctcctatgacgtgtctgcaggggctgcgggcggcgtggtctccccaagggacttcgtgaatgtccggcgcattgagcggcgcagggaccgatacttgtcatcagggatcgccacctcacacagtgccaagcccccgacgcacaaatatgtccggggagagaatggccctgggggcttcatcgtgctcaagtcggccagtaacccccgtgtttgcacctttgtctggattcttaatacagatctcaagggccgcctgccccggtacctcatccaccagagcctcgcggccaccatgtttgaatttgcctttcacctgcgacagcgcatcagcgagctgggggcccgggcgtgactgtgccccctcccaccctgcgggccagggtcctgtcgccaccacttccagagccagaaagggtgccagttgggctcgcactgcccacatgggacctggccccaggctgtcaccctccaccgagccacgcagtgcctggagttgactgactgagcaggctgtggggtggagcactggactccggggccccactggctggaggaagtggggtctggcctgttgatgtttacatggcgccctgcctcctggaggaccagattgctctgccccaccttgccagggcagggtctgggctgggcacctgacttggctggggaggaccagggccctgggcagggcagggcagcctgtcacccgtgtgaagatgaaggggctcttcatctgcctgcgctctcgtcggtttttttaggattattgaaagagtctgggacccttgttggggagtgggtggcaggtgggggtgggctgctggccatgaatctctgcctctcccaggctgtccccctcctcccagggcctcctgggggacctttgtattaagccaattaaaaacatgaatttaaaaaaaaaaa

SEQ ID NO: 309376 - DNA, 2030 bp, Homo sapiens
cggactcagcggcggaagtggcgctgccggaagatcttcttccgctctgaggcgctactgaggccgcggagccggactgcggttggggcgggaagagccggggccgtggctgacatggagcagccctgctgctgaggccgcgccctccccgccctgaggtgggggcccaccaggatgagcaagctgcccagggagctgacccgagacttggagcgcagcctgcctgccgtggcctccctgggctcctcactgtcccacagccagagcctctcctcgcacctccttccgccgcctgagaagcgaagggccatctctgatgtccgccgcaccttctgtctcttcgtcaccttcgacctgctcttcatctccctgctctggatcatcgaactgaataccaacacaggcatccgtaagaacttggagcaggagatcatccagtacaactttaaaacttccttcttcgacatctttgtcctggccttcttccgcttctctggactgctcctaggctatgccgtgctgcagctccggcactggtgggtgattgcgctgctcagcaaaggggcatttggctacctgctccccatcgtctcttttgtcctcgcctggttggagacctggttccttgacttcaaagtcctaccccaggaagctgaagaggagcgatggtatcttgccgcccaggttgctgttgcccgtggacccctgctgttctccggtgctctgtccgagggacagttctattcacccccagaatcctttgcagggtctgacaatgaatcagatgaagaagttgctgggaagaaaagtttctctgctcaggagcgggagtacatccgccaggggaaggaggccacggcagtggtggaccagatcttggcccaggaagagaactggaagtttgagaagaataatgaatatggggacaccgtgtacaccattgaagttccctttcacggcaagacgtttatcctgaagaccttcctgccctgtcctgcggagctcgtgtaccaggaggtgatcctgcagcccgagaggatggtgctgtggaacaagacagtgactgcctgccagatcctgcagcgagtggaagacaacaccctcatctcctatgacgtgtctgcaggggctgcgggcggcgtggtctccccaagggacttcgtgaatgtccggcgcattgagcggcgcagggaccgatacttgtcatcagggatcgccacctcacacagtgccaagcccccgacgcacaaatatgtccggggagagaatggccctgggggcttcatcgtgctcaagtcggccagtaacccccgtgtttgcacctttgtctggattcttaatacagatctcaagggccgcctgccccggtacctcatccaccagagcctcgcggccaccatgtttgaatttgcctttcacctgcgacagcgcatcagcgagctgggggcccgggcgtgactgtgccccctcccaccctgcgggccagggtcctgtcgccaccacttccagagccagaaagggtgccagttgggctcgcactgcccacatgggacctggccccaggctgtcaccctccaccgagccacgcagtgcctggagttgactgactgagcaggctgtggggtggagcactggactccggggccccactggctggaggaagtggggtctggcctgttgatgtttacatggcgccctgcctcctggaggaccagattgctctgccccaccttgccagggcagggtctgggctgggcacctgacttggctggggaggaccagggccctgggcagggcagggcagcctgtcacccgtgtgaagatgaaggggctcttcatctgcctgcgctctcgtcggtttttttaggattattgaaagagtctgggacccttgttggggagtgggtggcaggtgggggtgggctgctggccatgaatctctgcctctcccaggctgtccccctcctcccagggcctcctgggggacctttgtattaagccaattaaaaacatgaatttaaaaaaaaaaa

SEQ ID NO: 309377 - DNA, 1827 bp, Homo sapiens
cctgggtggtggcttagcatcaacagcctcccctccaggttcctccatcccctacctcttgccccttccgggaggtgaggggcagccccaggcccttgcttctacctgcagagctcttcctgtctccctctcacagaccaacacaggcatccgtaagaacttggagcaggagatcatccagtacaactttaaaacttccttcttcgacatctttgtcctggccttcttccgcttctctggactgctcctaggctatgccgtgctgcagctccggcactggtgggtgattgcggtcacgacgctggtgtccagtgcattcctcattgtcaaggtcatcctctctgagctgctcagcaaaggggcatttggctacctgctccccatcgtctcttttgtcctcgcctggttggagacctggttccttgacttcaaagtcctaccccaggaagctgaagaggagcgatggtatcttgccgcccaggttgctgttgcccgtggacccctgctgttctccggtgctctgtccgagggacagttctattcacccccagaatcctttgcagggtctgacaatgaatcagatgaagaagttgctgggaagaaaagtttctctgctcaggagcgggagtacatccgccaggggaaggaggccacggcagtggtggaccagatcttggcccaggaagagaactggaagtttgagaagaataatgaatatggggacaccgtgtacaccattgaagttccctttcacggcaagacgtttatcctgaagaccttcctgccctgtcctgcggagctcgtgtaccaggaggtgatcctgcagcccgagaggatggtgctgtggaacaagacagtgactgcctgccagatcctgcagcgagtggaagacaacaccctcatctcctatgacgtgtctgcaggggctgcgggcggcgtggtctccccaagggacttcgtgaatgtccggcgcattgagcggcgcagggaccgatacttgtcatcagggatcgccacctcacacagtgccaagcccccgacgcacaaatatgtccggggagagaatggccctgggggcttcatcgtgctcaagtcggccagtaacccccgtgtttgcacctttgtctggattcttaatacagatctcaagggccgcctgccccggtacctcatccaccagagcctcgcggccaccatgtttgaatttgcctttcacctgcgacagcgcatcagcgagctgggggcccgggcgtgactgtgccccctcccaccctgcgggccagggtcctgtcgccaccacttccagagccagaaagggtgccagttgggctcgcactgcccacatgggacctggccccaggctgtcaccctccaccgagccacgcagtgcctggagttgactgactgagcaggctgtggggtggagcactggactccggggccccactggctggaggaagtggggtctggcctgttgatgtttacatggcgccctgcctcctggaggaccagattgctctgccccaccttgccagggcagggtctgggctgggcacctgacttggctggggaggaccagggccctgggcagggcagggcagcctgtcacccgtgtgaagatgaaggggctcttcatctgcctgcgctctcgtcggtttttttaggattattgaaagagtctgggacccttgttggggagtgggtggcaggtgggggtgggctgctggccatgaatctctgcctctcccaggctgtccccctcctcccagggcctcctgggggacctttgtattaagccaattaaaaacatgaatttaaaaaaaaaaa

SEQ ID NO: 309378 - DNA, 2744 bp, Homo sapiens
cggactcagcggcggaagtggcgctgccggaagatcttcttccgctctgaggcgctactgaggccgcggagccggactgcggttggggcgggaagagccggggccgtggctgacatggagcagccctgctgctgaggccgcgccctccccgccctgaggtgggggcccaccaggatgagcaagctgcccagggagctgacccgagacttggagcgcagcctgcctgccgtggcctccctgggctcctcactgtcccacagccagagcctctcctcgcacctccttccgccgcctgagaagcgaagggccatctctgatgtccgccgcaccttctgtctcttcgtcaccttcgacctgctcttcatctccctgctctggatcatcgaactgaataccaacacaggcatccgtaagaacttggagcaggagatcatccagtacaactttaaaacttccttcttcgacatctttgtcctggccttcttccgcttctctggactgctcctaggctatgccgtgctgcagctccggcactggtgggtgattgcggtcacgacgctggtgtccagtgcattcctcattgtcaaggtcatcctctctgagctgctcagcaaaggggcatttggctacctgctccccatcgtctcttttgtcctcgcctggttggagacctggttccttgacttcaaagtcctaccccaggaagctgaagaggagcgatatgtgagtgcttgcgggtaggggggtgcagcgagggttacccacagccccaagagaggggagttgcgggcatgagagtcagtctgaagcatctcgccacctctgagcagcctccagtagcctgagggggagcttgggtgggggtaccccaggctgctagggtgtaactgtcctcggtccgggaccgagtctgctcctccagggtatcttgccgcccaggttgctgttgcccgtggacccctgctgttctccggtgctctgtccgagggacagttctattcacccccagaatcctttgcagggtctgacaatgaatcagatgaagaagttgctgggaagaaaagtttctctgctcaggagcgggagtacatccgccaggggaaggaggccacggcagtggtggaccagatcttggcccaggaagagaactggaagtttgagaagaataatgaatatggggacaccgtgtacaccattgaagttccctttcacggcaagacgtttatcctgaagaccttcctgccctgtcctgcggagctcgtgtaccaggaggtgatcctgcagcccgagaggatggtgctgtggaacaagacagtgactgcctgccagatcctgcagcgagtggaagacaacaccctcatctcctatgacgtgtctgcaggggctgcgggcggcgtggtctccccaagggacttcgtgaatgtccggcgcattgagcggcgcagggaccgatacttgtcatcagggatcgccacctcacacagtgccaagcccccgacgcacaaatatgtccggggagagaatggccctgggggcttcatcgtgctcaagtcggccagtaacccccgtgtttgcacctttgtctggattcttaatacagatctcaaggtggggtgctggggggctgccaggtgggttctgtggagtggaggggaccctgctgctgacttggttgctgcatgactttgggggctctctgccatgcctgggcctcccctttgtcagccacctttcttacttgaaaatttgggtcagggtccagatggtctcttagccctgggttgctgtagggcatgtgcccccccttcttacctctgagtcctgaggccctgaggaagggtggctggtggccagcccggccccaccctggtctgtttgtgtggctggtgccaagagccaggcccagcatgttcttcctgccaggggtgagtgggagagggcggcccaggctggattccagagctgcacctgcattctggcccagagcccccctgctggtgccagctgcaaggggagaccctgctgagggcaggccatcaagtgtgacttctgcctgccttcccccagggccgcctgccccggtacctcatccaccagagcctcgcggccaccatgtttgaatttgcctttcacctgcgacagcgcatcagcgagctgggggcccgggcgtgactgtgccccctcccaccctgcgggccagggtcctgtcgccaccacttccagagccagaaagggtgccagttgggctcgcactgcccacatgggacctggccccaggctgtcaccctccaccgagccacgcagtgcctggagttgactgactgagcaggctgtggggtggagcactggactccggggccccactggctggaggaagtggggtctggcctgttgatgtttacatggcgccctgcctcctggaggaccagattgctctgccccaccttgccagggcagggtctgggctgggcacctgacttggctggggaggaccagggccctgggcagggcagggcagcctgtcacccgtgtgaagatgaaggggctcttcatctgcctgcgctctcgtcggtttttttaggattattgaaagagtctgggacccttgttggggagtgggtggcaggtgggggtgggctgctggccatgaatctctgcctctcccaggctgtccccctcctcccagggcctcctgggggacctttgtattaagccaattaaaaacatgaatttaaaaaaaaaaa

SEQ ID NO: 309379 - DNA, 2066 bp, Homo sapiens
cctgggtggtggcttagcatcaacagcctcccctccaggttcctccatcccctacctcttgccccttccgggaggtgaggggcagccccaggcccttgcttctacctgcagagctcttcctgtctccctctcacagaccaacacaggcatccgtaagaacttggagcaggagatcatccagtacaactttaaaacttccttcttcgacatctttgtcctggccttcttccgcttctctggactgctcctaggctatgccgtgctgcagctccggcactggtgggtgattgcgcctctgccttccccttcctccctccctcccctgggcaggtcacgacgctggtgtccagtgcattcctcattgtcaaggtcatcctctctgagctgctcagcaaaggggcatttggctacctgctccccatcgtctcttttgtcctcgcctggttggagacctggttccttgacttcaaagtcctaccccaggaagctgaagaggagcgatatgtgagtgcttgcgggtaggggggtgcagcgagggttacccacagccccaagagaggggagttgcgggcatgagagtcagtctgaagcatctcgccacctctgagcagcctccagtagcctgagggggagcttgggtgggggtaccccaggctgctagggtgtaactgtcctcggtccgggaccgagtctgctcctccagggtatcttgccgcccaggttgctgttgcccgtggacccctgctgttctccggtgctctgtccgagggacagttctattcacccccagaatcctttgcagggtctgacaatgaatcagatgaagaagttgctgggaagaaaagtttctctgctcaggagcgggagtacatccgccaggggaaggaggccacggcagtggtggaccagatcttggcccaggaagagaactggaagtttgagaagaataatgaatatggggacaccgtgtacaccattgaagttccctttcacggcaagacgtttatcctgaagaccttcctgccctgtcctgcggagctcgtgtaccaggaggtgatcctgcagcccgagaggatggtgctgtggaacaagacagtgactgcctgccagatcctgcagcgagtggaagacaacaccctcatctcctatgacgtgtctgcaggggctgcgggcggcgtggtctccccaagggacttcgtgaatgtccggcgcattgagcggcgcagggaccgatacttgtcatcagggatcgccacctcacacagtgccaagcccccgacgcacaaatatgtccggggagagaatggccctgggggcttcatcgtgctcaagtcggccagtaacccccgtgtttgcacctttgtctggattcttaatacagatctcaagggccgcctgccccggtacctcatccaccagagcctcgcggccaccatgtttgaatttgcctttcacctgcgacagcgcatcagcgagctgggggcccgggcgtgactgtgccccctcccaccctgcgggccagggtcctgtcgccaccacttccagagccagaaagggtgccagttgggctcgcactgcccacatgggacctggccccaggctgtcaccctccaccgagccacgcagtgcctggagttgactgactgagcaggctgtggggtggagcactggactccggggccccactggctggaggaagtggggtctggcctgttgatgtttacatggcgccctgcctcctggaggaccagattgctctgccccaccttgccagggcagggtctgggctgggcacctgacttggctggggaggaccagggccctgggcagggcagggcagcctgtcacccgtgtgaagatgaaggggctcttcatctgcctgcgctctcgtcggtttttttaggattattgaaagagtctgggacccttgttggggagtgggtggcaggtgggggtgggctgctggccatgaatctctgcctctcccaggctgtccccctcctcccagggcctcctgggggacctttgtattaagccaattaaaaacatgaatttaaaaaaaaaaa

SEQ ID NO: 309380 - DNA, 1597 bp, Homo sapiens
gtgttcagaggatccccctacgtatatgtcgtgctgcagctcggcactggtgggtgatagcggtcacgacgctggtgtccagtgcattcctcattgtcaaggtcatcctctctgagctgctcagcaaaggggcatttggctacctgctccccatcgtctcttttgtcctcgcctggttggagacctggttccttgacttcaaagtcctaccccaggaagctgaagaggagcgatggtatcttgccgcccaggttgctgttgcccgtggacccctgctgttctccggtgctctgtccgagggacagttctattcacccccagaatcctttgcagggtctgacaatgaatcagatgaagaagttgctgggaagaaaagtttctctgctcaggagcgggagtacatccgccaggggaaggaggccacggcagtggtggaccagatcttggcccaggaagagaactggaagtttgagaagaataatgaatatggggacaccgtgtacaccattgaagttccctttcacggcaagacgtttatcctgaagaccttcctgccctgtcctgcggagctcgtgtaccaggaggtgatcctgcagcccgagaggatggtgctgtggaacaagacagtgactgcctgccagatcctgcagcgagtggaagacaacaccctcatctcctatgacgtgtctgcaggggctgcgggcggcgtggtctccccaagggacttcgtgaatgtccggcgcattgagcggcgcagggaccgatacttgtcatcagggatcgccacctcacacagtgccaagcccccgacgcacaaatatgtccggggagagaatggccctgggggcttcatcgtgctcaagtcggccagtaacccccgtgtttgcacctttgtctggattcttaatacagatctcaagggccgcctgccccggtacctcatccaccagagcctcgcggccaccatgtttgaatttgcctttcacctgcgacagcgcatcagcgagctgggggcccgggcgtgactgtgccccctcccaccctgcgggccagggtcctgtcgccaccacttccagagccagaaagggtgccagttgggctcgcactgcccacatgggacctggccccaggctgtcaccctccaccgagccacgcagtgcctggagttgactgactgagcaggctgtggggtggagcactggactccggggccccactggctggaggaagtggggtctggcctgttgatgtttacatggcgccctgcctcctggaggaccagattgctctgccccaccttgccagggcagggtctgggctgggcacctgacttggctggggaggaccagggccctgggcagggcagggcagcctgtcacccgtgtgaagatgaaggggctcttcatctgcctgcgctctcgtcggtttttttaggattattgaaagagtctgggacccttgttggggagtgggtggcaggtgggggtgggctgctggccatgaatctctgcctctcccaggctgtccccctcctcccagggcctcctgggggacctttgtattaagccaattaaaaacatgaatttaaaaaaaaaaa

SEQ ID NO: 309381 - DNA, 1142 bp, Homo sapiens
tgaatagaactgtccctcggacagagcaccggagaacagcaggggtccacgggcaacagcaacctgggcggcaagatgtttatcctgaagaccttcctgccctgtcctgcggagctcgtgtaccaggaggtgatcctgcagcccgagaggatggtgctgtggaacaagacagtgactgcctgccagatcctgcagcgagtggaagacaacaccctcatctcctatgacgtgtctgcaggggctgcgggcggcgtggtctccccaagggacttcgtgaatgtccggcgcattgagcggcgcagggaccgatacttgtcatcagggatcgccacctcacacagtgccaagcccccgacgcacaaatatgtccggggagagaatggccctgggggcttcatcgtgctcaagtcggccagtaacccccgtgtttgcacctttgtctggattcttaatacagatctcaagggccgcctgccccggtacctcatccaccagagcctcgcggccaccatgtttgaatttgcctttcacctgcgacagcgcatcagcgagctgggggcccgggcgtgactgtgccccctcccaccctgcgggccagggtcctgtcgccaccacttccagagccagaaagggtgccagttgggctcgcactgcccacatgggacctggccccaggctgtcaccctccaccgagccacgcagtgcctggagttgactgactgagcaggctgtggggtggagcactggactccggggccccactggctggaggaagtggggtctggcctgttgatgtttacatggcgccctgcctcctggaggaccagattgctctgccccaccttgccagggcagggtctgggctgggcacctgacttggctggggaggaccagggccctgggcagggcagggcagcctgtcacccgtgtgaagatgaaggggctcttcatctgcctgcgctctcgtcggtttttttaggattattgaaagagtctgggacccttgttggggagtgggtggcaggtgggggtgggctgctggccatgaatctctgcctctcccaggctgtccccctcctcccagggcctcctgggggacctttgtattaagccaattaaaaacatgaatttaaaaaaaaaaa

SEQ ID NO: 309382 - DNA, 1862 bp, Homo sapiens
cggactcagcggcggaagtggcgctgccggaagatcttcttccgctctgaggcgctactgaggccgcggagccggactgcggttggggcgggaagagccggggccgtggctgacatggagcagccctgctgctgaggccgcgccctccccgccctgaggtgggggcccaccaggatgagcaagctgcccagggagctgacccgagacttggagcgcagcctgcctgccgtggcctccctgggctcctcactgtcccacagccagagcctctcctcgcacctccttccgccgcctgagaagcgaagggccatctctgatgtccgccgcaccttctgtctcttcgtcaccttcgacctgctcttcatctccctgctctggatcatcgaactgaataccaacacaggcatccgtaagaacttggagcaggagatcatccagtacaactttaaaacttccttcttcgacatctttgtcctggccttcttccgcttctctggactgctcctaggctatgccgtgctgcagctccggcactggtgggtgattgcggtcacgacgctggtgtccagtgcattcctcattgtcaaggtcatcctctctgagctgctcagcaaaggggcatttggctacctgctccccatcgtctcttttgtcctcgcctggttggagacctggttccttgacttcaaagtcctaccccaggaagctgaagaggagcgatggtatcttgccgcccaggttgctgttgcccgtggacccctgctgttctccggtgctctgtccgagggacagttctattcacccccagaatcctttgcagggtctgacaatgaatcagatgaagaagttgctgggaagaaaagtttctctgctcaggagcgggagtacatccgccaggggaaggaggccacggcagtggtggaccagatcttggcccaggaagagaactggaagtttgagaagaataatgaatatggggacaccgtgtacaccattgaagttccctttcacggcaagacgtttatcctgaagaccttcctgccctgtcctgcggagctcgtgtaccaggaggtgatcctgcagcccgagaggatggtgctgtggaacaagacagtgactgcctgccagatcctgcagcgagtggaagacaacaccctcatctcctatgacgtgtctgcaggggctgcgggcggcgtggtctccccaagggacttcgtgaatgtccggcgcattgagcggcgcagggaccgatacttgtcatcagggatcgccacctcacacagtgccaagcccccgacgcacaaatatgtccggggagagaatggccctgggggcttcatcgtgctcaagtcggccagtaacccccgtgtttgcacctttgtctggattcttaatacagatctcaaggtggggtgctggggggctgccaggtgggttctgtggagtggaggggaccctgctgctgacttggttgctgcatgactttgggggctctctgccatgcctgggcctcccctttgtcagccacctttcttacttgaaaatttgggtcagggtccagatggtctcttagccctgggttgctgtagggcatgtgcccccccttcttacctctgagtcctgaggccctgaggaagggtggctggtggccagcccggccccaccctggtctgtttgtgtggctggtgccaagagccaggcccagcatgttcttcctgccaggggtgagtgggatgggtggcaggtgggggtgggctgctggccatgaatctctgcctctcccaggctgtccccctcctcccagggcctcctgggggacctttgtattaagccaattaaaaacatgaatttaaaaaaaaaaa

SEQ ID NO: 309383 - DNA, 1057 bp, Homo sapiens
cggactcagcggcggaagtggcgctgccggaagatcttcttccgctctgaggcgctactgaggccgcggagccggactgcggttggggcgggaagagccggggccgtggctgacatggagcagccctgctgctgaggccgcgccctccccgccctgaggtgggggcccaccaggatgagcaagctgcccagggagctgacccgagacttggagcgcagcctgcctgccgtggcctccctgggctcctcactgtcccacagccagagcctctcctcgcacctccttccgccgcctgagaagcgaagggccatctctgatgtccgccgcaccttctgtctcttcgtcaccttcgacctgctcttcatctccctgctctggatcatcgaactgaataccaacacaggcatccgtaagaacttggagcaggagatcatccagtacaactttaaaacttccttcttcgacatctttgtcctggccttcttccgcttctctggactgctcctaggctatgccgtgctgcagctccggcactggtgggtgattgcggtcacgacgctggtgtccagtgcattcctcattgtcaaggtcatcctctctgagctgctcagcaaaggggcatttggctacctgctccccatcgtctcttttgtcctcgcctggttggagacctggttccttgacttcaaagtcctaccccaggaagctgaagaggagcgatggtatcttgccgcccaggttgctgttgcccgtggacccctgctgttctccggtgctctgtccgagggacagttctattcacccccagaatcctttgcagggtctgacaatgaatcagatgaagaagttgctgggaagaaaagtttctctgctcaggagcgggagtacatccgccaggggaaggaggccacggcagtggtggaccagatcttggcccaggaagagaactggaagtttgagaagaataatgaatatggggacaccgtgtacaccattgaagttccctttcacggcaagacgtttatcctgaaggggggatcaactagagtcggcctgt

SEQ ID NO: 309384 - DNA, 270 bp, Homo sapiens
ccctccccgccctgaggtgggggcccaccaggatgagcaagctgcccagggagctgacccgagacttggagcgcagcctgcctgccgtggcctccctgggctcctcactgtcccacagccagagcctctcctcgcacctccttccgccgcctgagaagcgaagggccatctctgatgtccgccgcaccttctgtctcttcgtcaccttcgacctgctcttcatctccctgctctggatcatcgaactgaatgtgagtgggggcgaggtgg

SEQ ID NO: 309385 - DNA, 451 bp, Homo sapiens
ggccttcttccgcttctctggactgctcctaggctatgccgtgctgcagctccggcactggtgggtgattgcgcggtaagatgccactttcctggcagcttctgggccctggcagggctggtggaagggatgggatggaggaggactcacttcccagcctctgccttccccttcctccctccctcccctgggcaggtcacgacgctggtgtccagtgcattcctcattgtcaaggtcatcctctctgaggtcagtggctcagggtctggccagtctggtgggcatcagacctgagtggtatgcttctagagaggagcatttctctaatttggggtgtctgtccctgttgtccgggttagggggagagggaatcctgtcctttggtatctataaggaatcatccttcacccgcttccctgacttagccccttgcagctctaggaatcagaag

SEQ ID NO: 309386 - DNA, 610 bp, Homo sapiens
gatggaggaggactcacttcccagcctctgccttccccttcctccctccctcccctgggcaggtcacgacgctggtgtccagtgcattcctcattgtcaaggtcatcctctctgaggtcagtggctcagggtctggccagtctggtgggcatcagacctgagtggtatgcttctagagaggagcatttctctaatttggggtgtctgtccctgttgtccgggttagggggagagggaatcctgtcctttggtatctataaggaatcatccttcacccgcttccctgacttagccccttgcagctctaggaatcagaaggttctttctccagcctaaccccagtttatcctgctgcagacttgagagggttcccaagcagctgctaccaggaatggggtgtatgccagtttggctggctagagttggtagccacagaagggggctctgggtttggggtgacccctgccatggagctcagccccctcccttcacagctgctcagcaaaggggcatttggctacctgctccccatcgtctcttttgtcctcgcctggttggagacctggttccttgacttcaaagtcctaccccaggaagctgaagaggagcg

SEQ ID NO: 309387 - DNA, 234 bp, Homo sapiens
ctgggcagggcagggcagcctgtcacccgtgtgaagatgaaggggctcttcatctgcctgcgctctcgtcggtttttttaggattattgaaagagtctgggacccttgttggggagtgggtggcaggtgggggtgggctgctggccatgaatctctgcctctcccaggctgtccccctcctcccagggcctcctgggggacctttgtattaagccaattaaaaacatgaattta

SEQ ID NO: 309388 - DNA, 1874 bp, Homo sapiens
agcggcagccagaccccgcgccgcccgcgccccgctcgactccggaggctcccgcagccccggcgtccgccccgctgccccctcccccgggggccatgggggcgcccccgggctaccggccctcagcttgggtgcatctcctccaccagctgccccgcgccgacttccagctccgcccggtgcccagcgttttcgcgccccaagagcaggaataccagcaggccttgttgctggtggcggccttggcgggcctgggcttgggcctgagcctcattttcatcgctgtctacctcatccgcttctgctgctgccggccccccgagccccccgggtccaagatcccctcgcccgggggaggctgcgtcacctggagctgcattgtcgcccttctcgccggctgcactggcattggcatcggtttctatggcaacagtgagaccagtgatggggtgtcccagctcagctctgcgctgctgcacgccaaccacacactcagcaccattgaccacctggtgttggagacggtggagaggctgggcgaggcggtgaggacagagctgaccaccctggaggaggtgctcgagccgcgcacggagctggtggctgccgcccgaggggctcgacggcaggcggaggctgcggcccagcagctgcaggggctggccttctggcagggagtgcccctgagccccctgcaggtggctgaaaatgtgtcctttgtggaggagtacaggtggctggcctacgtcctcctgctgctcctggagctgctggtctgcctcttcaccctcctgggcctggcgaagcagagcaagtggctggtgatcgtgatgacagtcatgagtctcctggttctcgtcctgagctggggctccatgggcctggaggcagccacggccgtgggcctcagtgacttctgctccaatccagacccttatgttctgaacctgacccaggaggagacagggctcagctcagacatcctgagctattatctcctctgcaaccgggccgtctccaaccccttccaacagaggctgactctgtcccagcgagctctggccaacatccactcccagctgctgggcctggagcgagaagctgtgcctcagttcccttcagcgcagaagcctctgctgtccttggaggagactctgaatgtgacagaaggaaatttccaccagttggtggcactgctacactgccgcagcctgcacaaggactatggtgcagccctgcggggcctgtgcgaagacgccctggaaggcctgctcttcctgctactcttctccctgctgtctgcaggagcgctggccactgccctctgcagcctgccccgagcctgggccctcttcccacccagtgacgactacgatgacacagacgatgacgaccctttcaaccctcaggaatccaagcgctttgtgcagtggcagtcgtctatctgagcccctcctcccggctggactggagcctggctcccctcttcgttccttccctggctgccggaggagaccccactaacccagcctgcctgggctctgaccactaacactcttggccatggacagcctgcacaggaccgcctccctgctcttggccactgtgctcccatttctgtccttggccttgggagtagctgagggggcagactagggagtagggctggcaggggagggggcagacagcctcgcctcgcacccttcatccctggctgccggtcccatccttggagggactaagctgggggtgggggacatgagtccccctgctgcccctgccacatcccagtgggctctgaccccctgatctcaactcgtggcactaacttggaaaagggttgatttaaaataaaagggaagactattttacaa

SEQ ID NO: 309389 - DNA, 1828 bp, Homo sapiens
agcggcagccagaccccgcgccgcccgcgccccgctcgactccggaggctcccgcagccccggcgtccgccccgctgccccctcccccgggggccatgggggcgcccccgggctaccggccctcagcttgggtgcatctcctccaccagctgccccgcgccgacttccagctccgcccggtgcccagcgttttcgcgccccaagagcaggaataccagcaggccttgttgctggtggcggccttggcgggcctgggcttgggcctgagcctcattttcatcgctgtctacctcatccgcttctgctgctgccggccccccgagccccccgggtccaagatcccctcgcccgggggaggctgcgtcacctggagctgcattgtcgcccttctcgccggctgcactggcattggcatcggtttctatggcaacagtgagaccagtgatggggtgtcccagctcagctctgcgctgctgcacgccaaccacacactcagcaccattgaccacctggtgttggagacggtggagaggctgggcgaggcggtgaggacagagctgaccaccctggaggaggtgctcgagccgcgcacggagctggtggctgccgcccgaggggctcgacggcaggcggaggctgcggcccagcagctgcaggggctggccttctggcagggagtgcccctgagccccctgcaggtggctgaaaatgtgtcctttgtggaggagtacaggtggctggcctacgtcctcctgctgctcctggagctgctggtctgcctcttcaccctcctgggcctggcgaagcagagcaagtggctggtgatcgtgatgacagtcatgagtctcctggttctcgtcctgagctggggctccatgggcctggaggcagccacggccgtgggcctcagtgacttctgctccaatccagacccttatgttctgaacctgacccaggaggagacagggctcagctcagacatcctgagctattatctcctctgcaaccgggccgtctccaaccccttccaacagaggctgactctgtcccagcgagctctggccaacatccactcccagctgctgggcctggagcgagaagctgtgcctcagttcccttcagcgcagaagcctctgctgtccttggaggagactctgaatgtgacagaaggaaatttccaccagttggtggcactgctacactgccgcagcctgcacaaggactatggtgcagccctgcggggcctgtgcgaagacgccctggaaggcctgctcttcctgctactcttctccctgctgtctgcaggagcgctggccactgccctctgcagcctgccccgagcctgggccctcttcccacccaggaatccaagcgctttgtgcagtggcagtcgtctatctgagcccctcctcccggctggactggagcctggctcccctcttcgttccttccctggctgccggaggagaccccactaacccagcctgcctgggctctgaccactaacactcttggccatggacagcctgcacaggaccgcctccctgctcttggccactgtgctcccatttctgtccttggccttgggagtagctgagggggcagactagggagtagggctggcaggggagggggcagacagcctcgcctcgcacccttcatccctggctgccggtcccatccttggagggactaagctgggggtgggggacatgagtccccctgctgcccctgccacatcccagtgggctctgaccccctgatctcaactcgtggcactaacttggaaaagggttgatttaaaataaaagggaagactattttacaa

SEQ ID NO: 309390 - DNA, 388 bp, Homo sapiens
ctctgccatgccccgcatcaaacccctgacgactacgatgacacagacgatgacgaccctttcaaccctcaggaatccaagcgctttgtgcagtggcagtcgtctatctgagcccctcctcccggctggactggagcctggctcccctcttcgctgagggggcagactagggagtagggctggcaggggagggggcagacagcctcgcctcgcacccttcatccctggctgccggtcccatccttggagggactaagctgggggtgggggacatgagtccccctgctgcccctgccacatcccagtgggctctgaccccctgatctcaactcgtggcactaacttggaaaagggttgatttaaaataaaagggaagactattttacaa

SEQ ID NO: 309391 - DNA, 2033 bp, Homo sapiens
agcggcagccagaccccgcgccgcccgcgccccgctcgactccggaggctcccgcagccccggcgtccgccccgctgccccctcccccgggggccatgggggcgcccccgggctaccggccctcagcttgggtgcatctcctccaccagctgccccgcgccgacttccagctccgcccggtgcccagcgttttcgcgccccaagagcaggaataccagcaggccttgttgctggtggcggccttggcgggcctgggcttgggcctgagcctcattttcatcgctgtctacctcatccgcttctgctgctgccggccccccgagccccccgggtccaagatcccctcgcccgggggaggctgcgtcacctggagctgcattgtcgcccttctcgccggctgcactggcattggcatcggtttctatggcaacagtgagaccagtgatggggtgtcccagctcagctctgcgctgctgcacgccaaccacacactcagcaccattgaccacctggtgttggagacggtggagaggctgggcgaggcggtgaggacagagctgaccaccctggaggaggtgctcgagccgcgcacggagctggtggctgccgcccgaggggctcgacggcaggcggaggctgcggcccagcagctgcaggggctggccttctggcagggagtgcccctgagccccctgcaggtggctgaaaatgtgtcctttgtggaggagtacaggtggctggcctacgtcctcctgctgctcctggagctgctggtctgcctcttcaccctcctgggcctggcgaagcagagcaagtggctggtgatcgtgatgacagtcatgagtctcctggttctcgtcctgagctggggctccatgggcctggaggcagccacggccgtgggcctcagtgacttctgctccaatccagacccttatgttctgaacctgacccaggaggagacagggctcagctcagacatcctgagctattatctcctctgcaaccgggccgtctccaaccccttccaacagaggctgactctgtcccagcgagctctggccaacatccactcccagctgctgggcctggagcgagaagctgtgcctcagttcccttcagcgcagaagcctctgctgtccttggaggagactctgaatgtgacagaaggaaatttccaccagttggtggcactgctacactgccgcagcctgcacaaggactatggtgcagccctgcggggcctgtgcgaagacgccctggaaggcctgctcttcctgctactcttctccctgctgtctgcaggagcgctggccactgccctctgcagcctgccccgagcctgggccctcttcccacccagtgacgactacgatgacacagacgatgacgaccctttcaaccctcaggaatccaagcgctttgtgcagtggcagtcgtctatctgagcccctcctcccggctggactggagcctggctcccctcttcggagcttccaagggccaccccagctcctgcagccgggcctctgcccccctcccgccctccgagctgctccaggcatgggctgcgtgcctcctgctgggtggatcgcaccgggcaggccctccagcctgcatcactgccctgtctctccctctctccgcagttccttccctggctgccggaggagaccccactaacccagcctgcctgggctctgaccactaacactcttggccatggacagcctgcacaggaccgcctccctgctcttggccactgtgctcccatttctgtccttggccttgggagtagctgagggggcagactagggagtagggctggcaggggagggggcagacagcctcgcctcgcacccttcatccctggctgccggtcccatccttggagggactaagctgggggtgggggacatgagtccccctgctgcccctgccacatcccagtgggctctgaccccctgatctcaactcgtggcactaacttggaaaagggttgatttaaaataaaagggaagactattttacaa

SEQ ID NO: 309392 - DNA, 2031 bp, Homo sapiens
agcggcagccagaccccgcgccgcccgcgccccgctcgactccggaggctcccgcagccccggcgtccgccccgctgccccctcccccgggggccatgggggcgcccccgggctaccggccctcagcttgggtgcatctcctccaccagctgccccgcgccgacttccagctccgcccggtgcccagcgttttcgcgccccaagagcaggaataccagcaggccttgttgctggtggcggccttggcgggcctgggcttgggcctgagcctcattttcatcgctgtctacctcatccgcttctgctgctgccggccccccgagccccccgggtccaagatcccctcgcccgggggaggctgcgtcacctggagctgcattgtcgcccttctcgccggctgcactggcattggcatcggtttctatggcaacagtgagaccagtgatggggtgtcccagctcagctctgcgctgctgcacgccaaccacacactcagcaccattgaccacctggtgttggagacggtggagaggctgggcgaggcggtgaggacagagctgaccaccctggaggaggtgctcgagccgcgcacggagctggtggctgccgcccgaggggctcgacggcaggcggaggctgcggcccagcagctgcaggggctggccttctggcagggagtgcccctgagccccctgcaggtggctgaaaatgtgtcctttgtggaggagtacaggtggctggcctacgtcctcctgctgctcctggagctgctggtctgcctcttcaccctcctgggcctggcgaagcagagcaagtggctggtgatcgtgatgacagtcatgagtctcctggttctcgtcctgagctggggctccatgggcctggaggcagccacggccgtgggcctcagtgacttctgctccaatccagacccttatgttctgaacctgacccaggaggagacagggctcagctcagacatcctgagctattatctcctctgcaaccgggccgtctccaaccccttccaacagaggctgactctgtcccagcgagctctggccaacatccactcccagctgctgggcctggagcgagaagctgtgcctcagttcccttcagcgcagaagcctctgctgtccttggaggagactctgaatgtgacagaaggaaatttccaccagttggtggcactgctacactgccgcagcctgcacaaggactatggtgcagccctgcggggcctgtgcgaagacgccctggaaggcctgctcttcctgctactcttctccctgctgtctgcaggagcgctggccactgccctctgcagcctgccccgagcctgggccctcttcccacccagtgacgactacgatgacacagacgatgacgaccctttcaaccctcaggaatccaagcgctttgtgcagtggcagtcgtctatctgagcccctcctcccggctggactggagcctggctcccctcttcgttccttccctggctgccggaggagaccccactaacccagcctgcctgggctctgaccactaacactcttggccatggacagcctgcacaggaccgcctccctgctcttggccactgtgctcccatttctgtccttggccttgggagtagctgagggggcagactagggagtagggctggcaggggagggggcagacagcctcgcctcgcacccttcatccctggctgccggtcccatccttggagggactaagctgggggtgggggacatgagtccccctgctgcccctgccacatcccagtgggctctgaccccctgatctcaactcgtggcactaacttggaaaagggttgatttaaaataaaagggaagactattttacaagcagctgggtcctccttatttctcctctcccttgattcggcctcctggccagggctgggacatcctccctgctgtcctctctcccccggcctcccagctgccaggaatttctgcgcctgtccaggctcagcaaggggtccaaagacattgttcttta

SEQ ID NO: 309393 - DNA, 2008 bp, Homo sapiens
agcggcagccagaccccgcgccgcccgcgccccgctcgactccggaggctcccgcagccccggcgtccgccccgctgccccctcccccgggggccatgggggcgcccccgggctaccggccctcagcttgggtgcatctcctccaccagctgccccgcgccgacttccagctccgcccggtgcccagcgttttcgcgccccaagagcaggaataccagcaggccttgttgctggtggcggccttggcgggcctgggcttgggcctgagcctcattttcatcgctgtctacctcatccgcttctgctgctgccggccccccgagccccccgggtccaagatcccctcgcccgggggaggctgcgtcacctggagctgcattgtcgcccttctcgccggctgcactggcattggcatcggtttctatggcaacagtgagaccagtgatggggtgtcccagctcagctctgcgctgctgcacgccaaccacacactcagcaccattgaccacctggtgttggagacggtggagaggctgggcgaggcggtgaggacagagctgaccaccctggaggaggtgctcgagccgcgcacggagctggtggctgccgcccgaggggctcgacggcaggcggaggctgcggcccagcagctgcaggggctggccttctggcagggagtgcccctgagccccctgcaggtggctgaaaatgtgtcctttgtggaggagtacaggtggctggcctacgtcctcctgctgctcctggagctgctggtctgcctcttcaccctcctgggcctggcgaagcagagcaagtggctggtgatcgtgatgacagtcatgagtctcctggttctcgtcctgagctggggctccatgggcctggaggcagccacggccgtgggcctcagtgacttctgctccaatccagacccttatgttctgaacctgacccaggaggagacagggctcagctcagacatcctgagctattatctcctctgcaaccgggccgtctccaaccccttccaacagaggctgactctgtcccagcgagctctggccaacatccactcccagctgctgggcctggagcgagaagctgtgcctcagttcccttcagcgcagaagcctctgctgtccttggaggagactctgaatgtgacagaaggaaatttccaccagttggtggcactgctacactgccgcagcctgcacaaggactatggtgcagccctgcggggcctgtgcgaagacgccctggaaggcctgctcttcctgctactcttctccctgctgtctgcaggagcgctggccactgccctctgcagcctgccccgagcctgggccctcttcccacccagtgacgactacgatgacacagacgatgacgaccctttcaaccctcaggaatccaagcgctttgtgcagtggcagtcgtctatctgagcccctcctcccggctggactggagcctggctcccctcttcgttccttccctggctgccggaggagaccccactaacccagcctgcctgggctctgaccactaacactcttggccatggacagcctgcacaggaccgcctccctgctcttggccactgtgctcccatttctgtccttggccttgggagtagctgagggggcagactagggagtagggctggcaggggagggggcagacagccttgggggtggggaccaataatccccgtcttacccctcccataattcgaatctaatcttaaccctcttatcttaactttttaatattaacttatcaaaatactgttcttaatcttaacacaaacactatttttccatcatatataaccttcttattaaattttaatatcactccctaccccaattgctccctattattcaaatcttttacaattcactttccctccctttcaaaacttgtttcttgctaaacacctttgtttacccaacttaaactcactgttttgatattgcccttttttctatcttctttcattgtt

SEQ ID NO: 309394 - DNA, 1725 bp, Homo sapiens
agcggcagccagaccccgcgccgcccgcgccccgctcgactccggaggctcccgcagccccggcgtccgccccgctgccccctcccccgggggccatgggggcgcccccgggctaccggccctcagcttgggtgcatctcctccaccagctgccccgcgccgacttccagctccgcccggtgcccagcgttttcgcgccccaagagcaggaataccagcaggccttgttgctggtggcggccttggcgggcctgggcttgggcctgagcctcattttcatcgctgtctacctcatccgcttctgctgctgccggccccccgagccccccgggtccaagatcccctcgcccgggggaggctgcgtcacctggagctgcattgtcgcccttctcgccggctgcactggcattggcatcggtttctatggcaacagtgagaccagtgatggggtgtcccagctcagctctgcgctgctgcacgccaaccacacactcagcaccattgaccacctggtgttggagacggtggagaggctgggcgaggcggtgaggacagagctgaccaccctggaggaggtgctcgagccgcgcacggagctggtggctgccgcccgaggggctcgacggcaggcggaggctgcggcccagcagctgcaggggctggccttctggcagggagtgcccctgagccccctgcaggtggctgaaaatgtgtcctttgtggaggagtacaggtggctggcctacgtcctcctgctgctcctggagctgctggtctgcctcttcaccctcctgggcctggcgaagcagagcaagtggctggtgatcgtgatgacagtcatgagtctcctggttctcgtcctgagctggggctccatgggcctggaggcagccacggccgtgggcctcagtgacttctgctccaatccagacccttatgttctgaacctgacccaggaggagacagggctcagctcagacatcctgagctattatctcctctgcaaccgggccgtctccaaccccttccaacagaggctgactctgtcccagcgagctctggccaacatccactcccagctgctgggcctggagcgagaagctgtgcctcagttcccttcagcgcagaagcctctgctgtccttggaggagactctgaatgtgacagaaggaaatttccaccagttggtggcactgctacactgccgcagcctgcacaaggactatggtgcagccctgcggggcctgtgcgaagacgccctggaaggcctgctcttcctgctactcttctccctgctgtctgcaggagcgctggccactgccctctgcagcctgccccgagcctgggccctcttcccacccagtgacgactacgatgacacagacgatgacgaccctttcaaccctcaggaatccaagcgctttgtgcagtggcagtcgtctatctgagcccctcctcccggctggactggagcctggctcccctcttcgctgagggggcagactagggagtagggctggcaggggagggggcagacagcctcgcctcgcacccttcatccctggctgccggtcccatccttggagggactaagctgggggtgggggacatgagtccccctgctgcccctgccacatcccagtgggctctgaccccctgatctcaactcgtggcactaacttggaaaagggttgatttaaaataaaagggaagactattttacaa

SEQ ID NO: 309395 - DNA, 1651 bp, Homo sapiens
agcggcagccagaccccgcgccgcccgcgccccgctcgactccggaggctcccgcagccccggcgtccgccccgctgccccctcccccgggggccatgggggcgcccccgggctaccggccctcagcttgggtgcatctcctccaccagctgccccgcgccgacttccagctccgcccggtgcccagcgttttcgcgccccaagagcaggaataccagcaggccttgttgctggtggcggccttggcgggcctgggcttgggcctgagcctcattttcatcgctgtctacctcatccgcttctgctgctgccggccccccgagccccccgggtccaagatcccctcgcccgggggaggctgcgtcacctggagctgcattgtcgcccttctcgccggctgcactggcattggcatcggtttctatggcaacagtgagaccagtgatggggtgtcccagctcagctctgcgctgctgcacgccaaccacacactcagcaccattgaccacctggtgttggagacggtggagaggctgggcgaggcggtgaggacagagctgaccaccctggaggaggtgctcgagccgcgcacggagctggtggctgccgcccgaggggctcgacggcaggcggaggctgcggcccagcagctgcaggggctggccttctggcagggagtgcccctgagccccctgcaggtggctgaaaatgtgtcctttgtggaggagtacaggtggctggcctacgtcctcctgctgctcctggagctgctggtctgcctcttcaccctcctgggcctggcgaagcagagcaagtggctggtgatcgtgatgacagtcatgagtctcctggttctcgtcctgagctggggctccatgggcctggaggcagccacggccgtgggcctcagtgacttctgctccaatccagacccttatgttctgaacctgacccaggaggagacagggctcagctcagacatcctgagctattatctcctctgcaaccgggccgtctccaaccccttccaacagaggctgactctgtcccagcgagctctggccaacatccactcccagctgctgggcctggagcgagaagctgtgcctcagttcccttcagcgcagaagcctctgctgtccttggaggagactctgaatgtgacagaaggaaatttccaccagttggtggcactgctacactgccgcagcctgcacaaggactatggtgcagccctgcggggcctgtgcgaagacgccctggaaggcctgctcttcctgctactcttctccctgctgtctgcaggagcgctggccactgccctctgcagcctgccccgagcctgggccctcttcccacccagctccctgctcttggccactgtgctcccatttctgtccttggccttgggagtagctgagggggcagactagggagtagggctggcaggggagggggcagacagcctcgcctcgcacccttcatccctggctgccggtcccatccttggagggactaagctgggggtgggggacatgagtccccctgctgcccctgccacatcccagtgggctctgaccccctgatctcaactcgtggcactaacttggaaaagggttgatttaaaataaaagggaagactattttacaa

SEQ ID NO: 309396 - DNA, 2269 bp, Homo sapiens
agcggcagccagaccccgcgccgcccgcgccccgctcgactccggaggctcccgcagccccggcgtccgccccgctgccccctcccccgggggccatgggggcgcccccgggctaccggccctcagcttgggtgcatctcctccaccagctgccccgcgccgacttccagctccgcccggtgcccagcgttttcgcgccccaagagcaggaataccagcaggccttgttgctggtggcggccttggcgggcctgggcttgggcctgagcctcattttcatcgctgtctacctcatccgcttctgctgctgccggccccccgagccccccgggtccaagatcccctcgcccgggggaggctgcgtcacctggagctgcattgtcgcccttctcgccggctgcactggcattggcatcggtttctatggcaacagtgagaccagtgatggggtgtcccagctcagctctgcgctgctgcacgccaaccacacactcagcaccattgaccacctggtgttggagacggtggagaggctgggcgaggcggtgaggacagagctgaccaccctggaggaggtgctcgagccgcgcacggagctggtggctgccgcccgaggggctcgacggcaggcggaggctgcggcccagcagctgcaggggctggccttctggcagggagtgcccctgagccccctgcaggtggctgaaaatgtgtcctttgtggaggagtacaggtggctggcctacgtcctcctgctgctcctggagctgctggtctgcctcttcaccctcctgggcctggcgaagcagagcaagtggctggtgatcgtgatgacagtcatgagtctcctggttctcgtcctgagctggggctccatgggcctggaggcagccacggccgtgggcctcagtgacttctgctccaatccagacccttatgttctgaacctgacccaggaggagacagggctcagctcagacatcctgagctattatctcctctgcaaccgggccgtctccaaccccttccaacagaggctgactctgtcccagcgagctctggccaacatccactcccagctgctgggcctggagcgagaagctgtgcctcagttcccttcagcgcagaagcctctgctgtccttggaggagactctgaatgtgacagaaggaaatttccaccagttggtggcactgctacactgccgcagcctgcacaaggtggtaactcatcgatgcctcataacaatgctatgaagaaggaactatgattatcccacctaacaggttagaagatgaggagcagagttgagggaccttcccaaggtcacacggccagccagcccgtgcacactgaggagagagggaccttccggagggccccgccctctgccccccacagccaggcagttgcccagttttgtcctttctgcttctggaatgtcttcatccatctactctcaatgcccaatgcccctgccgcagctgaggcctcgttctctcccctgcagaaggaagcatggccccctccccatccatccccccatggaccctagaatagggctgccagattcagcaaacagcaaaccactctgctataagtacgcccggtgcaatgctggggagatacttatactagaaaattatgtattgggcatccgatactcaaatgtaactggaagtcctgaatttgatctggcaaccctacccaagagggatttgtctacgccatcgcatggatctgagctttccctggtctggctcagacagaccccttctgtggctcccactgcctcccacccttctggaactggcattccaaaaagggagtggggagtaagcactgaagccatgctcagaattgctgactattgagctgagaaaggctgggcccccacccagcccagggctgccctgatcttttgcataaggataaactggggttcaggcgcttttctgtggcctaggcagaaactgggctggaatacaggcccccagactcctttgtggagggagggaagggaaggaagaggacagatcactctacccttccctaccactgcaccatgagaccctgggtctccatctcccctgtcagtgtgccagggtcctcacagattaaaatcaagaataagcggcggggccgggcactgtggctcacgcctgtaatcccagcactttgggaaaccaaggtgggcggatcaccagaggtcaggagtttgagaccagcctggccagcatggcgaaatcccatctctactaaaaataca

SEQ ID NO: 309397 - DNA, 2012 bp, Homo sapiens
agcggcagccagaccccgcgccgcccgcgccccgctcgactccggaggctcccgcagccccggcgtccgccccgctgccccctcccccgggggccatgggggcgcccccgggctaccggccctcagcttgggtgcatctcctccaccagctgccccgcgccgacttccagctccgcccggtgcccagcgttttcgcgccccaagagcaggaataccagcagagcctcgcggttacacaacggccacctccaacaacgccgctccaccggctccggcctcggcccagactcacgcccgctctggcccggagacctcccgaagccgcacgcggggatccgcggccccagtcaccgccagaggccttgttgctggtggcggccttggcgggcctgggcttgggcctgagcctcattttcatcgctgtctacctcatccgcttctgctgctgccggccccccgagccccccgggtccaagatcccctcgcccgggggaggctgcgtcacctggagctgcattgtcgcccttctcgccggctgcactggcattggcatcggtttctatggcaacagtgagaccagtgatggggtgtcccagctcagctctgcgctgctgcacgccaaccacacactcagcaccattgaccacctggtgttggagacggtggagaggctgggcgaggcggtgaggacagagctgaccaccctggaggaggtgctcgagccgcgcacggagctggtggctgccgcccgaggggctcgacggcaggcggaggctgcggcccagcagctgcaggggctggccttctggcagggagtgcccctgagccccctgcaggtggctgaaaatgtgtcctttgtggaggagtacaggtggctggcctacgtcctcctgctgctcctggagctgctggtctgcctcttcaccctcctgggcctggcgaagcagagcaagtggctggtgatcgtgatgacagtcatgagtctcctggttctcgtcctgagctggggctccatgggcctggaggcagccacggccgtgggcctcagtgacttctgctccaatccagacccttatgttctgaacctgacccaggaggagacagggctcagctcagacatcctgagctattatctcctctgcaaccgggccgtctccaaccccttccaacagaggctgactctgtcccagcgagctctggccaacatccactcccagctgctgggcctggagcgagaagctgtgcctcagttcccttcagcgcagaagcctctgctgtccttggaggagactctgaatgtgacagaaggaaatttccaccagttggtggcactgctacactgccgcagcctgcacaaggactatggtgcagccctgcggggcctgtgcgaagacgccctggaaggcctgctcttcctgctactcttctccctgctgtctgcaggagcgctggccactgccctctgcagcctgccccgagcctgggccctcttcccacccagtgacgactacgatgacacagacgatgacgaccctttcaaccctcaggaatccaagcgctttgtgcagtggcagtcgtctatctgagcccctcctcccggctggactggagcctggctcccctcttcgttccttccctggctgccggaggagaccccactaacccagcctgcctgggctctgaccactaacactcttggccatggacagcctgcacaggaccgcctccctgctcttggccactgtgctcccatttctgtccttggccttgggagtagctgagggggcagactagggagtagggctggcaggggagggggcagacagcctcgcctcgcacccttcatccctggctgccggtcccatccttggagggactaagctgggggtgggggacatgagtccccctgctgcccctgccacatcccagtgggctctgaccccctgatctcaactcgtggcactaacttggaaaagggttgatttaaaataaaagggaagactattttacaa

SEQ ID NO: 309398 - DNA, 1762 bp, Homo sapiens
agcggcagccagaccccgcgccgcccgcgccccgctcgactccggaggctcccgcagccccggcgtccgccccgctgccccctcccccgggggccatgggggcgcccccgggctaccggccctcagcttgggtgcatctcctccaccagctgccccgcgccgacttccagctccgcccggtgcccagcgttttcgcgccccaagagcaggaataccagcaggccttgttgctggtggcggccttggcgggcctgggcttgggcctgagcctcattttcatcgctgtctacctcatccgcttctgctgctgccggccccccgagccccccgggtccaagatcccctcgcccgggggaggctgcgtcacctggagctgcattgtcgcccttctcgccggctggtgttggagacggtggagaggctgggcgaggcggtgaggacagagctgaccaccctggaggaggtgctcgagccgcgcacggagctggtggctgccgcccgaggggctcgacggcaggcggaggctgcggcccagcagctgcaggggctggccttctggcagggagtgcccctgagccccctgcaggtggctgaaaatgtgtcctttgtggaggagtacaggtggctggcctacgtcctcctgctgctcctggagctgctggtctgcctcttcaccctcctgggcctggcgaagcagagcaagtggctggtgatcgtgatgacagtcatgagtctcctggttctcgtcctgagctggggctccatgggcctggaggcagccacggccgtgggcctcagtgacttctgctccaatccagacccttatgttctgaacctgacccaggaggagacagggctcagctcagacatcctgagctattatctcctctgcaaccgggccgtctccaaccccttccaacagaggctgactctgtcccagcgagctctggccaacatccactcccagctgctgggcctggagcgagaagctgtgcctcagttcccttcagcgcagaagcctctgctgtccttggaggagactctgaatgtgacagaaggaaatttccaccagttggtggcactgctacactgccgcagcctgcacaaggactatggtgcagccctgcggggcctgtgcgaagacgccctggaaggcctgctcttcctgctactcttctccctgctgtctgcaggagcgctggccactgccctctgcagcctgccccgagcctgggccctcttcccacccagtgacgactacgatgacacagacgatgacgaccctttcaaccctcaggaatccaagcgctttgtgcagtggcagtcgtctatctgagcccctcctcccggctggactggagcctggctcccctcttcgttccttccctggctgccggaggagaccccactaacccagcctgcctgggctctgaccactaacactcttggccatggacagcctgcacaggaccgcctccctgctcttggccactgtgctcccatttctgtccttggccttgggagtagctgagggggcagactagggagtagggctggcaggggagggggcagacagcctcgcctcgcacccttcatccctggctgccggtcccatccttggagggactaagctgggggtgggggacatgagtccccctgctgcccctgccacatcccagtgggctctgaccccctgatctcaactcgtggcactaacttggaaaagggttgatttaaaataaaagggaagactattttacaa

SEQ ID NO: 309399 - DNA, 1220 bp, Homo sapiens
taacactatttcacagaggacctgggctgtggcccagacacagtaaacagcaggaggctgagcttggagggtggtgaatgtggctggcctacgtcctcctgctgctcctggagctgctggtctgcctcttcaccctcctgggcctggcgaagcagagcaagtggctggtgatcgtgatgacagtcatgagtctcctggttctcgtcctgagctggggctccatgggcctggaggcagccacggccgtgggcctcagtgacttctgctccaatccagacccttatgttctgaacctgacccaggaggagacagggctcagctcagacatcctgagctattatctcctctgcaaccgggccgtctccaaccccttccaacagaggctgactctgtcccagcgagctctggccaacatccactcccagctgctgggcctggagcgagaagctgtgcctcagttcccttcagcgcagaagcctctgctgtccttggaggagactctgaatgtgacagaaggaaatttccaccagttggtggcactgctacactgccgcagcctgcacaaggactatggtgcagccctgcggggcctgtgcgaagacgccctggaaggcctgctcttcctgctactcttctccctgctgtctgcaggagcgctggccactgccctctgcagcctgccccgagcctgggccctcttcccacccagtgacgactacgatgacacagacgatgacgaccctttcaaccctcaggaatccaagcgctttgtgcagtggcagtcgtctatctgagcccctcctcccggctggactggagcctggctcccctcttcgttccttccctggctgccggaggagaccccactaacccagcctgcctgggctctgaccactaacactcttggccatggacagcctgcacaggaccgcctccctgctcttggccactgtgctcccatttctgtccttggccttgggagtagctgagggggcagactagggagtagggctggcaggggagggggcagacagcctcgcctcgcacccttcatccctggctgccggtcccatccttggagggactaagctgggggtgggggacatgagtccccctgctgcccctgccacatcccagtgggctctgaccccctgatctcaactcgtggcactaacttggaaaagggttgatttaaaataaaagggaagactattttacaa

SEQ ID NO: 309400 - DNA, 1019 bp, Homo sapiens
tgtttgtccgactctgggctccatggcctggaggcagccacgccgtgggcctcagtgacttctgctccaatccagacccttatgttctgaacctgacccaggaggagacagggctcagctcagacatcctgagctattatctcctctgcaaccgggccgtctccaaccccttccaacagaggctgactctgtcccagcgagctctggccaacatccactcccagctgctgggcctggagcgagaagctgtgcctcagttcccttcagcgcagaagcctctgctgtccttggaggagactctgaatgtgacagaaggaaatttccaccagttggtggcactgctacactgccgcagcctgcacaaggactatggtgcagccctgcggggcctgtgcgaagacgccctggaaggcctgctcttcctgctactcttctccctgctgtctgcaggagcgctggccactgccctctgcagcctgccccgagcctgggccctcttcccacccagtgacgactacgatgacacagacgatgacgaccctttcaaccctcaggaatccaagcgctttgtgcagtggcagtcgtctatctgagcccctcctcccggctggactggagcctggctcccctcttcgttccttccctggctgccggaggagaccccactaacccagcctgcctgggctctgaccactaacactcttggccatggacagcctgcacaggaccgcctccctgctcttggccactgtgctcccatttctgtccttggccttgggagtagctgagggggcagactagggagtagggctggcaggggagggggcagacagcctcgcctcgcacccttcatccctggctgccggtcccatccttggagggactaagctgggggtgggggacatgagtccccctgctgcccctgccacatcccagtgggctctgaccccctgatctcaactcgtggcactaacttggaaaagggttgatttaaaataaaagggaagactattttacaa

SEQ ID NO: 309401 - DNA, 932 bp, Homo sapiens
  misc_feature (917)..(917): n is a, c, g, or t
aaaattttagtccttgaatgtgctcatatagcccataaggcaaatattttttaaactttattgtccctgatattaaccagaattggttgaatagtagaggaaaagggatttttaaaactgaaaatatgaacaaaatgagccttagaattgaatggattattttaaacaaattaatactcatataaaatgttttgctgcttctcaaagagtctgatacagggtaatttcatacaatatttgatgttgttaaagcattcctttttatagctgagcctttggagcttgttatgaacagtaaaatcatttagtcacatggttgtaaccttagtgcaaagtaaaaagggaaaagttgacctaatagaaacaatagtagtattgataagaacaaaagtcatcctccctgcctctcagaggccctgaagtcctgtgaggaagggaaatagtaatttaaccaaagttaaatctgtgtaactcatttattacaattttgaaaggcttgtcttagaagcattaaaggagtattagctaaaaacaaactaaattcctagagatgacaatcattgtagtcctctgtgaaactgaaaatgatcacatgaaaaaaatgtgagcataaaaaagagaagtaaaggtgtaccattagcctacatactgagctgacgatcagatcatagaatactttatttaatcaagacatttaaaaatacttatttcatctacatactttcaaagcaaaataatttctggggctagtttcctttgtataaggcttaagcaaggaatatatttccatgccctttgatccaagtaaaatctaaggaagagggaaagtaaaccttgaaattaagacctagaaatagatccacccttgcagactgataaaagtgggcaatctagtaggccagttcacattacagttnatctcagttttgctt

SEQ ID NO: 309402 - DNA, 404 bp, Homo sapiens
atgatcccgccaggtgaacgaatgccaggagcacagccgttgcaaatgttcgtggagttggggaaagccttggcggccatgctggtcagcatgcatggggcccagctggtcaccaccctcttcctgccccgtggggcaactgtggtagagctcttcccatatgctgtcaatcccgaccactacacgttaggtctacctggccaggtagacctaacccaggtagaccaacccaggtgcctctccacatctaaccttggccagagcttcagggtgggttggctagaaaaaccatctaccatgtatcagcgtgtgtgtgtgtgtgtgtgagtgtgcgtgctgtgctgtgtgtgtgcacagcgcagtgtcacatcagtatcagtgcctgcctgagttaggtcacctgg

SEQ ID NO: 309403 - DNA, 2512 bp, Homo sapiens
gcgcacggcgggcacctgcgagcctggaggtggcggtcgctgcgaacccggcggcgcggccaaacctgtgctggctgcctgggccttctgggcctcctgggccagaagctggcgctgggggcggcggcggggtgggaaagcggcgccgccgtggggcctcctggacgcgtcggcggaggtggcttcgtcccgcggagtccaggcttcaggctttcaccagttctcaggatgcccatagggatgggtgaagcctgcctggcctgtggtgctttccagtggccgtcatctcattagggccccacagtggcattaggatgcacctctcggcggtgttcaacgccctcctggtgtcggtgctggcagcggtcctgtggaagcatgtgcggctgcgtgagcatgcagccacactggaggaggagctggccctcagccgacaggccacagagccagccccagcactgaggatcgactacccgaaggcactgcagatcctgatggagggcggcacacacatggtgtgcacgggccgcacgcacacagaccgcatctgccgcttcaagtggctctgctactccaacgaggctgaggagttcatcttcttccatggcaacacctctgtcatgctgcccaacctgggctcccggcgcttccagccagccctgctcgacctatccaccgtggaggaccacaacactcagtacttcaacttcgtggagctgcctgctgctgccctgcgcttcatgcccaagccggtgttcgtgccagacgtggccctcatcgccaaccgcttcaaccccgacaacctcatgcacgtctttcatgacgacctgctgccactcttctacaccctgcggcagtttcccggcctggcccacgaggcacggctcttcttcatggagggctggggcgagggtgcacacttcgacctctacaagctgctcagccccaagcagcctctcctgcgggcacagctgaagaccctgggccggctgctgtgcttctcccatgcttttgtgggcctctccaagatcactacctggtaccagtatggctttgtgcagccccagggcccgaaggccaacatcctcgtctcaggcaatgagatccggcagtttgcacggttcatgacagaaaagctgaacgtgagccacacaggagtccccctaggcgaggagtacattctggtctttagccgaacccagaacagactcattctgaatgaggcagagctgctgctggcactggcccaggagttccagatgaagacagtgacagtgtccctggaggaccacacctttgctgatgtcgtgcggctggtcagcaatgcctccatgctggtcagcatgcatggggcccagctggtcaccaccctcttcctgccccgtggggcaactgtggtagagctcttcccatatgctgtcaatcccgaccactacactccctataagacgctggccatgctgcctggcatggacctccagtatgtagcctggcggaacatgatgccagagaacacagtcacacaccctgagcggccctgggatcaggggggcatcacccatctggaccgggctgagcaagcccgtatcctgcaaagccgtgaggtcccacggcatctctgttgccggaaccccgagtggctcttccgaatctaccaggacaccaaggtggacatcccatccctcattcaaaccatacggcgcgtggtgaagggccggccaggaccacggaagcagaagtggacagtcggcctatatccaggcaaggtgcgggaggcacggtgccaggcgtcagtgcatggcgcctccgaggcccgcctcactgtctcctggcagatcccatggaaccttaaatacctgaaggtgagggaggtgaagtacgaggtgtggctgcaggagcagggggagaacacctacgtgccttacatcctggctctgcagaaccacaccttcactgagaacatcaagcccttcaccacctacctggtgtgggtccgctgcatcttcaacaagatcctcctgggaccctttgcagatgtgctggtgtgcaacacgtagcgagcaggccacagcctggcctcgggaaggtggctcctgcagttcagcgtccctgggcccattaatcccactgtggagacttctgggaactatttattgagcaggcctgtgcctccacatcatcttgttgtctctggggtgtggtgtcacagcactcctctttgccctagagataagggacctgacttccccttctcccatcctgaacatttgtacccctggagaagttccttagcagggaggaggaagaggagaggaggaagcaaagaatcacaaggaacctctggctaggtgatcctgatgtttcctactgagtttttctggtatccagatttctggaaaccgagtaatcatgtactgtttgattgggtggttcatctgcttccatcccagtgaaatttacctgtagcccagtgaagggtgtgtttggaacattcattaaatgattctaagca

SEQ ID NO: 309404 - DNA, 1657 bp, Homo sapiens
gcgcacggcgggcacctgcgagcctggaggtggcggtcgctgcgaacccggcggcgcggccaaacctgtgctggctgcctgggccttctgggcctcctgggccagaagctggcgctgggggcggcggcggggtgggaaagcggcgccgccgtggggcctcctggacgcgtcggcggaggtggcttcgtcccgcggagtccaggcttcaggctttcaccagttctcaggatgcccatagggatgggtgaagcctgcctggcctgtggtgctttccagtggccgtcatctcattagggccccacagtggcattaggatgcacctctcggcggtgttcaacgccctcctggtgtcggtgctggcagcggtcctgtggaagcatgtgcggctgcgtgagcatgcagccacactggaggaggagctggccctcagccgacaggccacagagccagccccagcactgaggatcgactacccgaaggcactgcagatcctgatggagggcggcacacacatggtgtgcacgggccgcacgcacacagaccgcatctgccgcttcaagtggctctgctactccaacgaggctgaggagttcatcttcttccatggcaacacctctgtcatgctgcccaacctgggctcccggcgcttccagccagccctgctcgacctatccaccgtggaggaccacaacactcagtacttcaacttcgtggagctgcctgctgctgccctgcgcttcatgcccaagccggtgttcgtgccagacgtggccctcatcgccaaccgcttcaaccccgacaacctcatgcacgtctttcatgacgacctgctgccactcttctacaccctgcggcagtttcccggcctggcccacgaggcacggctcttcttcatggagggctggggcgagggtgcacacttcgacctctacaagctgctcagccccaagcagcctctcctgcgggcacagctgaagaccctgggccggctgctgtgcttctcccatgcttttgtgggcctctccaagatcactacctggtaccagtatggctttgtgcagccccagggcccgaaggccaacatcctcgtctcaggcaatgagatccggcagtttgcacggttcatgacagaaaagctgaacgtgagccacacaggagtccccctaggcgaggagtacattctggtctttagccgaacccagaacagactcattctgaatgaggcagagctgctgctggcactggcccaggagttccagatgaagacagtgacagtgtccctggaggaccacacctttgctgatgtcgtgcggctggtcagcaatgcctccatgctggtcagcatgcatggggcccagctggtcaccaccctcttcctgccccgtggggcaactgtggtagagctcttcccatatgctgtcaatcccgaccactacacgttaggtctacctggccaggtagacctaacccaggtagaccaacccaggtgcctctccacatctaaccttggccagagcttcagggtgggttggctagaaaaaccatctaccatgtatcagcgtgtgtgtgtgtgtgtgtgagtgtgcgtgctgtgctgtgtgtgtgcacagcgcagtgtcacatcagtatcagtgcctgcctgagttaggtcacctgg

SEQ ID NO: 309405 - DNA, 459 bp, Homo sapiens
ggtggagccgtgagtgagggcgtttgaagagcacttgtctttctcctgcctcagcagcacggacgggttccttggcggttggggatttgggtggatcctttctctgtagaagtattagtaacattggcatattggggttgaaaaaattaatctattgattcagcagattgaggtcttactttgtgctagacacggcggtaggtgttcggaaaatcagcagaaaacgtgaagacttggcttctagcccccgaacggttctctctggtgcataaggcaataaatgaacatataaagtagatgtagactggcaagtgctgtgaagaaggataatgtgtgtctgtgtgtgtgtctttttttagattggacggtgaaggaaggcttctgaggagataacatttaaaacctaaagaatgacaggcggggcgtgatggctcacgcctgtagtcccaacactttggg

SEQ ID NO: 309406 - DNA, 886 bp, Homo sapiens
ggctgcatccgggtgtctggaggctgtggccgtttgttttcttggctaaaatcggggtgagtgatcgaaagcatggcgtcggtggtgttggcgctgaggacccggacagccgttacatccttgctaagccccactccggctacagctcttgctgtcagatacgcatccaagaagtcgggtggtagctccaaaaacctcggtggaaagtcatcaggcagacgccaaggcattaagaaaatggaaggtcactatgttcatgctgggaacatcattgcaacacagcgccatttccgctggcacccaggtgcccatgtgggtgttgggaagaataaatgtctgtatgccctggaagaggggatagtccgctacactaaggaggtctacgtgcctcatcccagaaacacggaggctgtggatctgatcaccaggctgcccaagggtgctgtgctctacaagacttttgtccacgtggttcctgccaagcctgagggcaccttcaaactggtagctatgctttgatgtcctgttgaggccatcggacagagactggagcccaggtgacaggagatggtgataccagaagtcaagggttggggtggcgacacggcctcccgaggaagaggtctgcttgatggtgactctgcaggagactctgaagtgactgctgggaaaccctttgggagacctgacctggggccaaaaataaagtgagccagcgtcatgaacgcatgctatttagggacacaaaaaaaaaaaaaatataatttacaaataaaaaaaccggggtttttttgggggggggaaaaaaggtataaagggcgggttatggttttggccctttttgaaggggaaggggccctaatggaggttaataaaagaggtctta

SEQ ID NO: 309407 - DNA, 777 bp, Homo sapiens
aggtggaggttgcggtgagccaagatcacaccactgcactccaggctcggcaaaaaacagagttttttgaaactctgtctcaaaaaaaatatatatataaatatactgtgagtgatcgaaagcatggcgtcggtggtgttggcgctgaggacccggacagccgttacatccttgctaagccccactccggctacagctcttgctgtcagatacgcatccaagaagtcgggtggtagctccaaaaacctcggtggaaagtcatcaggcagacgccaaggcattaagaaaatggaaggtcactatgttcatgctgggaacatcattgcaacacagcgccatttccgctggcacccaggtgcccatgtgggtgttgggaagaataaatgtctgtatgccctggaagaggggatagtccgctacactaaggaggtctacgtgcctcatcccagaaacacggaggctgtggatctgatcaccaggctgcccaagggtgctgtgctctacaagacttttgtccacgtggttcctgccaagcctgagggcaccttcaaactggtagctatgctttgatgtcctgttgaggccatcggacagagactggagcccaggtgacaggagatggtgataccagaagtcaagggttggggtggcgacacggcctcccgaggaagaggtctgcttgatggtgactctgcaggagactctgaagtgactgctgggaaaccctttgggagacctgacctggggccaaaaataaagtgagccagcgtcatgaac

SEQ ID NO: 309408 - DNA, 2583 bp, Homo sapiens
agtagaaacttttcgagaccggaagtgagtgatcgaaagcatggcgtcggtggtgttggcgctgaggacccggacagccgttacatccttgctaagccccactccggctacagctcttgctgtcagatacgcatccaagaagtcgggtggtagctccaaaaacctcggtggaaagtcatcaggcagacgccaaggcattaagaaaatggaaggtcactatgttcatgctgggaacatcattgcaacacagcgccatttccgctggcacccaggtgcccattgagttgctccgttgctgcccccctttttccttttctaggttgacctctccttgcccctaagcatggtaataacagttgcatgtattgagtgcttaccaaatggcaagcattgtgctgattcccatgcctacacgatctcatttcttccttaccacatccctgtaagtaaggtgaaatgccagagacctagacggggtggaaggagcaagtgactgctgggatttgcaccaggtctgcctaactcccagatcactatgatttgccctggtgttgcattggcctggtattcttggttctcctttctaaccctcagttcttggaggacaagatacctggtgatttaaaatattattttagtcttgggaaactaatttcaatttattagtttttcattattctaagacttcttcctttgtataaacttacttgcagatggttgaaagatagcttgaatttaatgaaatagaattcagtgtgccaggagttaggttcataccaggtggggatttcagtttcagcaagttggcatcatttttatagggtaggacagttctttgttacagagacataacgatactgtactctccacattattttaaatattagttgcctttgtaaacagtttcccctcccccacccctttttcgataattttagtaggtacaaaaaggttgatagtaacctgtatttatttcaaagatgctaatttgtatgtgaattgattatgtatgtagtagctttttaccttttagaacttaagacattagatgtgtggctatgtcaacaataataatcaaagctaacacattttgagctagacagtattctaggccctttatgattgttgagcattaatcctcaaaatgaccctgtaaaatagttaatattatccccatttgacagacgaaaaaatagaggcacagtgaagtaacttgcctaagaccacacaggagtaagtagcagtgctggtatttgaaccaggcatcctggctccagagcccattcttttaatcagagagacagagaataatgctggactacctgggtaaaatttgccacacacccagcctgaagttctaaaagaaaaagctaaaaaatatggttaaaaactgtatatacaacacagtttaatctctctgcttcatatttcacatctgaaaagtggcgttggaaataatacctctttcactaggtgagaattaaatgacttaatgtgtattaaagggcttacatgggtattagctaatgcagtagtatgattgttttattagcatatgcattatccatatagctttggtttatattttccatagagcctaaactttatagatcactatctaaatgaaaatttacatcaaactagtgttttaatatgacagttctagtgttgtttaagtctaagtgaagatttagggcatcttcctgggttttgggatttgtgcagtgtggcttctgaccagctgcatagacatggctccaggtaacagtccctgggactgagcagtggcccatgttggctgttggagctttcttttccctcatttgttatgagtcaataaagaagcagaaggtttggacgtgctagccagtgggaaagggaacctgagatggagctctctgatcaccctttcagccccagggcccggctctgtgtgagaagtctgtcccaaaattctgggacggaccacctcactgaccagctgaccagctgaccaggtctgtgtgttggtgggtgttgggaagaataaatgtctgtatgccctggaagaggggatagtccgctacactaaggaggtctacgtgcctcatcccagaaacacggaggctgtggatctgatcaccaggctgcccaagggtgctgtgctctacaagacttttgtccacgtggttcctgccaagcctgagggcaccttcaaactggtagctatgctttgatgtcctgttgaggccatcggacagagactggagcccaggtgacaggagatggtgataccagaagtcaagggttggggtggcgacacggcctcccgaggaagaggtctgcttgatggtgactctgcaggagactctgaagtgactgctgggaaaccctttgggagacctgacctggggccaaaaataaagtgagccagcgtcatgaacgcatgctatttagggacacaaaaaaaaaaaaaatataatttacaaataaaaaaaccggggtttttttgggggggggaaaaaaggtataaagggcgggttatggttttggccctttttgaaggggaaggggccctaatggaggttaataaaagaggtctta

SEQ ID NO: 309409 - DNA, 864 bp, Homo sapiens
ggtggagccgtgagtgagggcgtttgaagagcacttgtctttctcctgcctcagcagcacggacgggttccttggcggttggggatttggttacatccttgctaagccccactccggctacagctcttgctgtcagatacgcatccaagaagtcgggtggtagctccaaaaacctcggtggaaagtcatcaggcagacgccaaggcattaagaaaatggaaggtcactatgttcatgctgggaacatcattgcaacacagcgccatttccgctggcacccaggtgcccatgtgggtgttgggaagaataaatgtctgtatgccctggaagaggggatagtccgctacactaaggaggtctacgtgcctcatcccagaaacacggaggctgtggatctgatcaccaggctgcccaagggtgctgtgctctacaagacttttgtccacgtggttcctgccaagcctgagggcaccttcaaactggtagctatgctttgatgtcctgttgaggccatcggacagagactggagcccaggtgacaggagatggtgataccagaagtcaagggttggggtggcgacacggcctcccgaggaagaggtctgcttgatggtgactctgcaggagactctgaagtgactgctgggaaaccctttgggagacctgacctggggccaaaaataaagtgagccagcgtcatgaacgcatgctatttagggacacaaaaaaaaaaaaaatataatttacaaataaaaaaaccggggtttttttgggggggggaaaaaaggtataaagggcgggttatggttttggccctttttgaaggggaaggggccctaatggaggttaataaaagaggtctta

SEQ ID NO: 309410 - DNA, 868 bp, Homo sapiens
tagagtgtgtgtgtgtgtgtgtgtgtgtgtgtgtgtgtgtgtgttgatgattgtgggaagggttctgagtcctatgaaattatgcttctcttttttacatccttgctaagccccactccggctacagctcttgctgtcagatacgcatccaagaagtcgggtggtagctccaaaaacctcggtggaaagtcatcaggcagacgccaaggcattaagaaaatggaaggtcactatgttcatgctgggaacatcattgcaacacagcgccatttccgctggcacccaggtgcccatgtgggtgttgggaagaataaatgtctgtatgccctggaagaggggatagtccgctacactaaggaggtctacgtgcctcatcccagaaacacggaggctgtggatctgatcaccaggctgcccaagggtgctgtgctctacaagacttttgtccacgtggttcctgccaagcctgagggcaccttcaaactggtagctatgctttgatgtcctgttgaggccatcggacagagactggagcccaggtgacaggagatggtgataccagaagtcaagggttggggtggcgacacggcctcccgaggaagaggtctgcttgatggtgactctgcaggagactctgaagtgactgctgggaaaccctttgggagacctgacctggggccaaaaataaagtgagccagcgtcatgaacgcatgctatttagggacacaaaaaaaaaaaaaatataatttacaaataaaaaaaccggggtttttttgggggggggaaaaaaggtataaagggcgggttatggttttggccctttttgaaggggaaggggccctaatggaggttaataaaagaggtctta

SEQ ID NO: 309411 - DNA, 829 bp, Homo sapiens
  misc_feature (791)..(791): n is a, c, g, or t
  misc_feature (793)..(793): n is a, c, g, or t
aggtggaggttgcggtgagccaagatcacaccactgcactccaggctcggcaaaaaacagagttttttgaaactctgtctcaaaaaaaatatatatataaatatactgtgagtgatcgaaagcatggcgtcggtggtgttggcgctgaggacccggacagccgttacatccttgctaagccccactccggctacagctcttgctgtcagatacgcatccaagaagtcgggtggtagctccaaaaacctcggtggaaagtcatcaggcagacgccaaggcattaagaaaatggaaggtcactatgttcatgctgggaacatcattgcaacacagcgccatttccgctggcacccaggtgcccatgtgggtgttgggaagaataaatgtctgtatgccctggaagaggggatagtccgctacactaaggaggtctacgtgcctcatcccagaaacacggaggctgtggatctgatcaccaggctgcccaagggtgctgtgctctacaagacttttgtccacgtggttcctgccaagcctgagggcaccttcaaactggtagctatgctttgatgtcctgttgaggccatcggacagagactggagcccaggtgacaggagatggtgataccagaagtcaagggttggggtggcgacacggcctcccgaggaagaggtctgcttgatggtgactctgcaggagactctgaagtgactgctgggaaaccctttgggagacctgacctggggccaaaaataaagtgagccagcgtcatgaacaaaaaaacacaccnanaccagaaaaaacgacaccctcaccagccacacgccc

SEQ ID NO: 309412 - DNA, 2423 bp, Homo sapiens
agtagaaacttttcgagaccggaagtgagtgatcgaaagcatggcgtcggtggtgttggcgctgaggacccggacagccgttacatccttgctaagccccactccggctacagctcttgctgtcagatacgcatccaagaagtcgggtggtagctccaaaaacctcggtggaaagtcatcaggcagacgccaaggcattaagaaaatggaaggtcactatgttcatgctgggaacatcattgcaacacagcgccatttccgctggcacccaggtgcccattgagttgctccgttgctgcccccctttttccttttctaggttgacctctccttgcccctaagcatggtaataacagttgcatgtattgagtgcttaccaaatggcaagcattgtgctgattcccatgcctacacgatctcatttcttccttaccacatccctgtaagtaaggtgaaatgccagagacctagacggggtggaaggagcaagtgactgctgggatttgcaccaggtctgcctaactcccagatcactatgatttgccctggtgttgcattggcctggtattcttggttctcctttctaaccctcagttcttggaggacaagatacctggtgatttaaaatattattttagtcttgggaaactaatttcaatttattagtttttcattattctaagacttcttcctttgtataaacttacttgcagatggttgaaagatagcttgaatttaatgaaatagaattcagtgtgccaggagttaggttcataccaggtggggatttcagtttcagcaagttggcatcatttttatagggtaggacagttctttgttacagagacataacgatactgtactctccacattattttaaatattagttgcctttgtaaacagtttcccctcccccacccctttttcgataattttagtaggtacaaaaaggttgatagtaacctgtatttatttcaaagatgctaatttgtatgtgaattgattatgtatgtagtagctttttaccttttagaacttaagacattagatgtgtggctatgtcaacaataataatcaaagctaacacattttgagctagacagtattctaggccctttatgattgttgagcattaatcctcaaaatgaccctgtaaaatagttaatattatccccatttgacagacgaaaaaatagaggcacagtgaagtaacttgcctaagaccacacaggagtaagtagcagtgctggtatttgaaccaggcatcctggctccagagcccattcttttaatcagagagacagagaataatgctggactacctgggtaaaatttgccacacacccagcctgaagttctaaaagaaaaagctaaaaaatatggttaaaaactgtatatacaacacagtttaatctctctgcttcatatttcacatctgaaaagtggcgttggaaataatacctctttcactaggtgagaattaaatgacttaatgtgtattaaagggcttacatgggtattagctaatgcagtagtatgattgttttattagcatatgcattatccatatagctttggtttatattttccatagagcctaaactttatagatcactatctaaatgaaaatttacatcaaactagtgttttaatatgacagttctagtgttgtttaagtctaagtgaagatttagggcatcttcctgggttttgggatttgtgcagtgtggcttctgaccagctgcatagacatggctccaggtaacagtccctgggactgagcagtggcccatgttggctgttggagctttcttttccctcatttgttatgagtcaataaagaagcagaaggtttggacgtgctagccagtgggaaagggaacctgagatggagctctctgatcaccctttcagccccagggcccggctctgtgtgagaagtctgtcccaaaattctgggacggaccacctcactgaccagctgaccagctgaccaggtctgtgtgttggtgggtgttgggaagaataaatgtctgtatgccctggaagaggggatagtccgctacactaaggaggtctacgtgcctcatcccagaaacacggaggctgtggatctgatcaccaggctgcccaagggtgctgtgctctacaagacttttgtccacgtggttcctgccaagcctgagggcaccttcaaactggtagctatgctttgatgtcctgttgaggccatcggacagagactggagcccaggtgacaggagatggtgataccagaagtcaagggttggggtggcgacacggcctcccgaggaagaggtctgcttgatggtgactctgcaggagactctgaagtgactgctgggaaaccctttgggagacctgacctggggccaaaaataaagtgagccagcgtcatgaac

SEQ ID NO: 309413 - DNA, 561 bp, Homo sapiens
taaaattatgcatatccagtgaaccaggggatagtccaaaatcttactgacgtcctgctggctctgcactgataatccggtatgatgtggtcctgactggcaggctgcccaagggtgctgtgctctacaagacttttgtccacgtggttcctgccaagcctgagggcaccttcaaactggtagctatgctttgatgtcctgttgaggccatcggacagagactggagcccaggtgacaggagatggtgataccagaagtcaagggttggggtggcgacacggcctcccgaggaagaggtctgcttgatggtgactctgcaggagactctgaagtgactgctgggaaaccctttgggagacctgacctggggccaaaaataaagtgagccagcgtcatgaacgcatgctatttagggacacaaaaaaaaaaaaaatataatttacaaataaaaaaaccggggtttttttgggggggggaaaaaaggtataaagggcgggttatggttttggccctttttgaaggggaaggggccctaatggaggttaataaaagaggtctta

SEQ ID NO: 309414 - DNA, 857 bp, Homo sapiens
gcggccgcctactactactactactactaaattcccggccgctcgaccgtcggtggtgttggcgctgaggacccggacagccgttacatccttgctaagccccactccggctacagctcttgctgtcagatacgcatccaagaagtcgggtggtagctccaaaaacctcggtggaaagtcatcaggcagacgccaaggcattaagaaaatggaaggtcactatgttcatgctgggaacatcattgcaacacagcgccatttccgctggcacccaggtgcccatgtgggtgttgggaagaataaatgtctgtatgccctggaagaggggatagtccgctacactaaggaggtctacgtgcctcatcccagaaacacggaggctgtggatctgatcaccaggctgcccaagggtgctgtgctctacaagacttttgtccacgtggttcctgccaagcctgagggcaccttcaaactggtagctatgctttgatgtcctgttgaggccatcggacagagactggagcccaggtgacaggagatggtgataccagaagtcaagggttggggtggcgacacggcctcccgaggaagaggtctgcttgatggtgactctgcaggagactctgaagtgactgctgggaaaccctttgggagacctgacctggggccaaaaataaagtgagccagcgtcatgaacgcatgctatttagggacacaaaaaaaaaaaaaatataatttacaaataaaaaaaccggggtttttttgggggggggaaaaaaggtataaagggcgggttatggttttggccctttttgaaggggaaggggccctaatggaggttaataaaagaggtctta

SEQ ID NO: 309415 - DNA, 937 bp, Homo sapiens
aggtggaggttgcggtgagccaagatcacaccactgcactccaggctcggcaaaaaacagagttttttgaaactctgtctcaaaaaaaatatatatataaatatactgtgagtgatcgaaagcatggcgtcggtggtgttggcgctgaggacccggacagccgttacatccttgctaagccccactccggctacagctcttgctgtcagatacgcatccaagaagtcgggtggtagctccaaaaacctcggtggaaagtcatcaggcagacgccaaggcattaagaaaatggaaggtcactatgttcatgctgggaacatcattgcaacacagcgccatttccgctggcacccaggtgcccatgtgggtgttgggaagaataaatgtctgtatgccctggaagaggggatagtccgctacactaaggaggtctacgtgcctcatcccagaaacacggaggctgtggatctgatcaccaggctgcccaagggtgctgtgctctacaagacttttgtccacgtggttcctgccaagcctgagggcaccttcaaactggtagctatgctttgatgtcctgttgaggccatcggacagagactggagcccaggtgacaggagatggtgataccagaagtcaagggttggggtggcgacacggcctcccgaggaagaggtctgcttgatggtgactctgcaggagactctgaagtgactgctgggaaaccctttgggagacctgacctggggccaaaaataaagtgagccagcgtcatgaacgcatgctatttagggacacaaaaaaaaaaaaaatataatttacaaataaaaaaaccggggtttttttgggggggggaaaaaaggtataaagggcgggttatggttttggccctttttgaaggggaaggggccctaatggaggttaataaaagaggtctta

SEQ ID NO: 309416 - DNA, 1107 bp, Homo sapiens
aggtggaggttgcggtgagccaagatcacaccactgcactccaggctcggcaaaaaacagagttttttgaaactctgtctcaaaaaaaatatatatataaatatactgtgagtgatcgaaagcatggcgtcggtggtgttggcgctgaggacccggacagccgttacatccttgctaagccccactccggctacagctcttgctgtcagatacgcatccaagaagtcgggtggtagctccaaaaacctcggtggaaagtcatcaggcagacgccaaggcattaagaaaatggaaggtcactatgttcatgctgggaacatcattgcaacacagcgccatttccgctggcacccaggtgcccatgtgggtgttgggaagaataaatgtctgtatgccctggaagaggggatagtccgctacactaaggaggtctacgtgcctcatcccagaaacacggaggctgtggatctgatcaccaggctgcccaagggtgctgtgctctacaagacttttgtccacgtggttcctgccaagcctgagggcaccttcaaactggtagctatgctttgatgtcctgttgaggccatcggacagagactggagcccaggtgacaggagatggtgataccagaagtcaagggttggggtggcgacacggcctcccgaggaagaggtctgcttgatggtgactctgcaggagactctgaagtgactgctgggaaaccctttgggagacctgacctggggccaaaaataaagtgagccagcgtcatgaacgcatgctatttagggacacaaaaaaaaaaaaaaaaaaaaccaagggtatctgccgcgggggagcacacggctagtaaacggacaaggttcataacgtgtcctgggaccgtttctcgtcccaaggcgcgaatcgggcggcccctaaaggagccaataatccgaaacccggtacggtacaatcgcgcaacgagacaaacaaggggacaaaagacaaagaacccagcacgaaacaagaaccaaagaagacaacaacgtaaaaggtaaagacaaaacagaaagaaagagagcacagcaacaaagaaaaagaaaaaacagaaaacaaaaaaagaa

SEQ ID NO: 309417 - DNA, 893 bp, Homo sapiens
aggtggaggttgcggtgagccaagatcacaccactgcactccaggctcggcaaaaaacagagttttttgaaactctgtctcaaaaaaaatatatatataaatatactgtgagtgatcgaaagcatggcgtcggtggtgttggcgctgaggacccggacagccgttacatccttgctaagccccactccggctacagctcttgctgtcagatacgcatccaagaagtcgggtggtagctccaaaaacctcggtggaaagtcatcaggcagacgccaaggcattaagaaaatggaagttccgctggcacccaggtgcccatgtgggtgttgggaagaataaatgtctgtatgccctggaagaggggatagtccgctacactaaggaggtctacgtgcctcatcccagaaacacggaggctgtggatctgatcaccaggctgcccaagggtgctgtgctctacaagacttttgtccacgtggttcctgccaagcctgagggcaccttcaaactggtagctatgctttgatgtcctgttgaggccatcggacagagactggagcccaggtgacaggagatggtgataccagaagtcaagggttggggtggcgacacggcctcccgaggaagaggtctgcttgatggtgactctgcaggagactctgaagtgactgctgggaaaccctttgggagacctgacctggggccaaaaataaagtgagccagcgtcatgaacgcatgctatttagggacacaaaaaaaaaaaaaatataatttacaaataaaaaaaccggggtttttttgggggggggaaaaaaggtataaagggcgggttatggttttggccctttttgaaggggaaggggccctaatggaggttaataaaagaggtctta

SEQ ID NO: 309418 - DNA, 534 bp, Homo sapiens
tctagctcggtacccttttttcagacagagtctcactctggttacctaggctggagtgcagtggtgtgatctgggctcactgcagcctcaacctgggtgacagaacaagagccgggctttaaatgatttttattttaaaaaaaaaaaaaaaaaaaaaattcagatcccagcacatgtcattttttctattagcattatactagttcaaacctacattatcttttgcctagattttcctcttaagagtctgttgagtctatttctagtagtcacttaactagttacttgtaactagatatctaactgcctcctaactagttcttacccataaaagtctatagtgcctatagcaaacagtcagattatgttacttttatggtcagatgcctccaaaggcttctaaactgattaagaataaaagatgaaggccttataatgggctgagagactctacatgatatcctgctttccagtcattccacatcgacattatcttctattaccctcttacttggcctttttgctgttccttga

SEQ ID NO: 309419 - DNA, 705 bp, Homo sapiens
gaggatcccccctgagtccatcacttctttctggtaagtatgttcaaatgttaacatgcttgctcattttggtcttctttgaagactaccttatctaaaattgacctcttccctcctctgtcaacattttctatcatctatcaccaaatatcactctacttgctttgtctcttatttcttttttaaaataaaaatcatttaaagactggctcttgttctgtcacccaggttgaggctgcagtgagcccagatcacaccactgcactccagcctaggtaaccagagtgagactctgtctggaaaaaaaaaaaaaaaaaaaaaaaaaaaaattcagatcccagcacatgtcattttttctattagcattatactagttcaaacctacattatcttttgcctagattttcctcttaagagtctgttgagtctatttctagtagtcacttaactagttacttgtaactagatatctaactgcctcctaactagttcttacccataaaagtctatagtgcctatagcaaacagtcagattatgttacttttatggtcagatgcctccaaaggcttctaaactgattaagaataaaagatgaaggccttataatgggctgagagactctacatgatatcctgctttccagtcattccacatcgacattatcttctattaccctcttacttggcctttttgctgttccttga

SEQ ID NO: 309420 - DNA, 2089 bp, Homo sapiens
atgttagagtacccagcagatgtgaaggaaaatatataagcttagtgaaattttgactggtcacttaattgttcattgggaaatgaaagaggtctagaatatgttgaagtttattacagacaaaaataaaaatgaaggggaatctaaatgcattaacattttgtaccttttaatattatagtttttttcttcctctgttccaaagttttccagatactgtagcctgctttttactatgttgataaagaggaggtgtctgagaagctttgtagaaataatgtgggaacatggagaagaactgaattgaggtcagggaagctataaacctttgagtgcttttgtgatgtgatgtgctctatgggaggctgtgtatgagttcaagcttgagaaacttgcttgataaaaatgtgactattaacacttactgttccttcctcttgttaagagtctcttgagaagatgaatttttatttaaatactgttttgtcttttttttttttcctggttataaaatgcttacagatattttgtccttagagttatacctatccctcacaaataacctgaaacataaatataataacagagtatgtcacaaagataggaaattcctggtgattccagagaaactggaatctctagtttgtaaggaaaatagtctctatctttggcttctttggcttgtaaagtgcttggtattatacagattgtccccagtttgttgactcctattatgacttgaacctgctctagaaaggcttttgcccccattactccaaggaaactgcagtgatcaaggttgcaaattacctcgtctttttaaaatcaagcatcattttccagtcttcattttactgggcttatcagcagcatttaatatggttaatcaccttcttttccttcaagtactttgtttattttgcatcctaggacattatgctcacttggtttttctcgtatctgtctttcttgcctctccttggaaggttttcctcatatctacaatcctttaagggctaatttcttggacgtcttttctagctacgctcttgttcttggtcacatctattcctataacctttaataccatctatatgctggagacttctatatctatgtccttgtttggatctctcccctaaatctcagactcttgttgaaacagcttattcattgtctctatttggatgtctaataggcatctcagacttaatatgtccgcagctgagttcctgatactaacctgttctgccttgagtcttcattatccagtaaatagcaactccatccttctagtttaggtcccttgcagtcatcctggactcctttctctcacatcccatatccaaactgtcaagaaagtcttgttggttctatctataaaacatattcagatcccaggcggggcgtggtggctcaacgcctgtaatctcagcactcggggaggccaaggcgggtacattgcttgagtctaggagttcaagaccagcctgggcaacatggcaaaactctgtctactaaaaatacaaaaaattagctaggcgtggtggcacgcacctgtagacccagctacttgggaggctgaggtgggagaatcgcctgagcctgggaggttgaggctgcagtgagcccagatcacaccactgcactccagcctaggtaaccagagtgagactctgtctggaaaaaaaaaaaaaaaaaaaaaaaaaaaaattcagatcccagcacatgtcattttttctattagcattatactagttcaaacctacattatcttttgcctagattttcctcttaagagtctgttgagtctatttctagtagtcacttaactagttacttgtaactagatatctaactgcctcctaactagttcttacccataaaagtctatagtgcctatagcaaacagtcagattatgttacttttatggtcagatgcctccaaaggcttctaaactgattaagaataaaagatgaaggccttataatgggctgagagactctacatgatatcctgctttccagtcattccacatcgacattatcttctattaccctcttacttggcctttttgctgttccttga

SEQ ID NO: 309421 - DNA, 1510 bp, Homo sapiens
atgttagagtacccagcagatgtgaaggaaaatatataagcttagtgaaattttgactggtcacttaattgttcattgggaaatgaaagaggtctagaatatgttgaagtttattacagacaaaaataaaaatgaaggggaatctaaatgcattaacattttgtaccttttaatattatagtttttttcttcctctgttccaaagttttccagatactgtagcctgctttttactatgttgataaagaggaggtgtctgagaagctttgtagaaataatgtgggaacatggagaagaactgaattgaggtcagggaagctataaacctttgagtgcttttgtgatgtgatgtgctctatgggaggctgtgtatgagttcaagcttgagaaacttgcttgataaaaatgtgactattaacacttactgttccttcctcttgttaagagtctcttgagaagatgaatttttatttaaatactgttttgtcttttttttttttcctggttataaaatgcttacagatattttgtccttagagttatacctatccctcacaaataacctgaaacataaatataataacagagtatgtcacaaagataggaaattcctggtgattccagagaaactggaatctctagtttgtaaggaaaatagtctctatctttggcttctttggcttgtaaagtgcttggtattatacagattgtccccagtttgttgactcctattatgacttgaacctgctctagaaaggcttttgcccccattactccaaggaaactgcagtgatcaaggttgcaaattacctcgtctttttaaaatcaagcatcattttccagtcttcattttactgggcttatcagcagcatttaatatggttaatcaccttcttttccttcaagtactttgtttattttgcatcctaggacattatgctcacttggtttttctcgtatctgtctttcttgcctctccttggaaggttttcctcatatctacaatcctttaagggctaatttcttggacgtcttttctagctacgctcttgttcttggtcacatctattcctataacctttaataccatctatatgctggagacttctatatctatgtccttgtttggatctctcccctaaatctcagactcttgttgaaacagcttattcattgtctctatttggatgtctaataggcatctcagacttaatatgtccgcagctgagttcctgatactaacctgttctgccttgagtcttcattatccagtaaatagcaactccatccttctagtttaggtcccttgcagtcatcctggactcctttctctcacatcccatatgtacaaaaaataattaactgcatgtggtggtacacgtgtgtagtatcagctacttgggaggctgaggtgggaggatcacttgagtgccagaggtcgaaactgcagtgagccatgatctcacccttgcactccagcctcagcatcaaagcgagaccctgtctcaaa

SEQ ID NO: 309422 - DNA, 2159 bp, Homo sapiens
ctttccgtccccttgcttcgtcttcgcttttctttctacttattcttatctgtgtctttcgctttgtttgcctctccgtctgttttccctcagggcccccttctttcctcgaccttttcaaatcgcaaatatggcgccggagcggctgcggagccgggcgctctccgccttcaagttgcggggcttgctgctccgtggtgaagctattaagtacctcacagaagctcttcagtctatcagtgaattagagcttgaagataaactggaaaagataattaatgcagttgagaagcaacccttgtcatcaaacatgattgaacgatctgtggtggaagcagcagtccaggaatgcagtcagtctgttgatgaaactatagagcacgttttcaatatcataggagcatttgatattccacgctttgtgtacaattcagaaagaaaaaaatttcttcctctgttaatgaccaaccaccctgcaccaaatttatttggaacaccaagagataaagcagagatgtttcgtgagcgatataccattttgcaccagaggacccacaggcatgaattatttactcctccggtgataggttctcaccctgatgaaagcggaagcaaattccagcttaaaacaatagaaaccttattgggtagtacaaccaaaatcggagatgcgattgttcttggaatgataacgcagttaaaagagggaaaattttttctggaagatcctactggaacagtccaactagaccttagtaaagctcagttccatagtggtttatacacagaggcatgctttgtcttagcagaaggttggtttgaagatcaagtgtttcatgtcaatgcctttggatttccacccactgagccctctagtactactagggcatactatggaaatattaatttttttggaggtccttctaatacatctgtgaagacttctgcaaaactaaaacagctagaagaggagaataaagatgctatgtttgtgtttttatctgatgtttggttggaccaggtggaagtattggaaaaacttcgcataatgtttgctgggttattcaccagcacctccaacctgctttattctgtgtggtaatttttcatctgcaccatatggaaaaaatcaagttcaagctttgaaagattccctaaaaactttggcagatataatatgtgaatacccagatattcaccaaagtagtcgttttgtgtttgtacctggtccagaggatcctggatttggttccatcttaccaaggccaccacttgctgaaagcatcactaatgaattcagacaaagggtaccattttcagtttttactactaatccttgcagaattcagtactgtacacaggaaattactgtcttccgtgaagacttagtaaataaaatgtgcagaaactgcgtccgttttcctagcagcaatttggctattcctaatcactttgtaaagactatcttatcccaaggacatctgactcccctacctctttatgtctgcccagtgtattgggcatatgactatgctttgagagtgtatcctgtgcccgatctacttgtcattgcagacaaatatgatcctttcactacgacaaataccgaatgcctctgcataaaccctggctcttttccaagaagtggattttcattcaaagttttttatccttctaataagacagtagaagatagcaaacttcaaggcttttgagattcttaaagatcatctgaagaaaattcatcagttttctgcttaactctatatcttatgtgattctgatattacaataaaattatggggtaaactttaaaaattctgcttaaatttgtattttgtgaaattttgatactaagtgataaatatgatggtatacttgagaaagttttctaggaaaaatattttctgcatagtcttttaagaaaaatatatgggggccaggcgcagtggctcacgcctgtaatcctagtgctttgggaggccaaggcgggtggatcacctgaggtcaggagttcgagaccagcctagccaaggtagcaaaaccctatctctgctaaaaaaaaaaatacaaaaattagctgggcatggtggcgggcgcctgtaatcccagcttctcgggaggctgaggcagggagaatcacttgaacctgggaggcg

SEQ ID NO: 309423 - DNA, 452 bp, Homo sapiens
aaaattcagtccatcagctatgctagccacaattcaagtgttcaattgggcagtgcagatatagaacttttctatcatgacattactagacagtgttggtctggagacttaatagttcatttattataatgcatgaaatttaaatgttttttaattttaaagagaaaacaaagggaataacttgcttttaagctattggatagtgttacaataatatttttaaatgaattgtgttgaattttgctacagtagtcgttttgtgtttgtacctggtccagaggatcctggatttggttccatcttaccaaggccaccacttgctgaaagcatcactaatgaattcagacaaagggtaccattttcagtttttactactaatccttgcaggtaagaattagtattttgtgttatacatttttcctttcatttaaaaattagccaggtgtggtggc

SEQ ID NO: 309424 - DNA, 1866 bp, Homo sapiens
ctttccgtccccttgcttcgtcttcgcttttctttctacttattcttatctgtgtctttcgctttgtttgcctctccgtctgttttccctcagggcccccttctttcctcgaccttttcaaatcgcaaatatggcgccggagcggctgcggagccgggcgctctccgccttcaagttgcggggcttgctgctccgtggtgaagctattaagtacctcacagaagctcttcagtctatcagtgaattagagcttgaagataaactggaaaagataattaatgcagttgagaagcaacccttgtcatcaaacatgattgaacgatctgtggtggaagcagcagtccaggaatgcagtcagtctgttgatgaaactatagagcacgttttcaatatcataggagcatttgatattccacgctttgtgtacaattcagaaagaaaaaaatttcttcctctgttaatgaccaaccaccctgcaccaaatttatttggaacaccaagagataaagcagagatgtttcgtgagcgatataccattttgcaccagaggacccacaggcatgaattatttactcctccggtgataggttctcaccctgatgaaagcggaagcaaattccagcttaaaacaatagaaaccttattgggtagtacaaccaaaatcggagatgcgattgttcttggaatgataacgcagttaaaagagggaaaattttttctggaagatcctactggaacagtccaactagaccttagtaaagctcagttccatagtggtttatacacagaggcatgctttgtcttagcagaaggttggtttgaagatcaagtgtttcatgtcaatgcctttggatttccacccactgagccctctagtactactagggcatactatggaaatattaatttttttggaggtccttctaatacatctgtgaagacttctgcaaaactaaaacagctagaagaggagaataaagatgctatgtttgtgtttttatctgatgtttggttggaccaggtggaagtattggaaaaacttcgcataatgtttgctgggttattcaccagcacctccaacctgctttattctgtgtggtaatttttcatctgcaccatatggaaaaaatcaagttcaagctttgaaagattccctaaaaactttggcagatataatatgtgaatacccagatattcaccaaagtagtcgttttgtgtttgtacctggtccagaggatcctggatttggttccatcttaccaaggccaccacttgctgaaagcatcactaatgaattcagacaaagggtaccattttcagtttttactactaatccttgcagaattcagtactgtacacaggaaattactgtcttccgtgaagacttagtaaataaaatgtgcagaaactgcgtccgttttcctagcagcaatttggctattcctaatcactttgtaaagactatcttatcccaaggacatctgactcccctacctctttatgtctgcccagtgtattgggcatatgactatgctttgagagtgtatcctgtgcccgatctacttgtcattgcagacaaatatgatcctttcactacgacaaataccgaatgcctctgcataaaccctggctcttttccaagaagtggattttcattcaaagttttttatccttctaataagacagtagaagatagcaaacttcaaggcttttgagattcttaaagatcatctgaagaaaattcatcagttttctgcttaactctatatcttatgtgattctgatattacaataaaattatggcctcgttggcctcagcggtggagctctgcggccgacattttttttataacaccccccaacatg

SEQ ID NO: 309425 - DNA, 1267 bp, Homo sapiens
cccgcctcggcctcccaaagtactgggattacaggcgtgagccaccgtgcccggccgtttagtcagttttaagacacagatatagcctattattttatttactgcttccatattgcttatcttgttttagaatatttagataacctttgtacttttaaagtgttacaaagagtacctttttacactggaaaataacttcattagatacaaagaagctaaatgtatacaactattagaaaaatatctctagtggtatatagaagataattatgttataattatctagggcatactatggaaatattaatttttttggaggtccttctaatacatctgtgaagacttctgcaaaactaaaacagctagaagaggagaataaagatgctatgtttgtgtttttatctgatgtttggttggaccaggtggaagtattggaaaaacttcgcataatgtttgctgggttattcaccagcacctccaacctgctttattctgtgtggtaatttttcatctgcaccatatggaaaaaatcaagttcaagctttgaaagattccctaaaaactttggcagatataatatgtgaatacccagatattcaccaaagtagtcgttttgtgtttgtacctggtccagaggatcctggatttggttccatcttaccaaggccaccacttgctgaaagcatcactaatgaattcagacaaagggtaccattttcagtttttactactaatccttgcagaattcagtactgtacacaggaaattactgtcttccgtgaagacttagtaaataaaatgtgcagaaactgcgtccgttttcctagcagcaatttggctattcctaatcactttgtaaagactatcttatcccaaggacatctgactcccctacctctttatgtctgcccagtgtattgggcatatgactatgctttgagagtgtatcctgtgcccgatctacttgtcattgcagacaaatatgatcctttcactacgacaaataccgaatgcctctgcataaaccctggctcttttccaagaagtggattttcattcaaagttttttatccttctaataagacagtagaagatagcaaacttcaaggcttttgagattcttaaagatcatctgaagaaaattcatcagttttctgcttaactctatatcttatgtgattctgatattacaataaaattatggcctcgttggcctcagcggtggagctctgcggccgacattttttttataacaccccccaacatg

SEQ ID NO: 309426 - DNA, 1823 bp, Homo sapiens
  misc_feature (1804)..(1804): n is a, c, g, or t
  misc_feature (1806)..(1806): n is a, c, g, or t
ctttccgtccccttgcttcgtcttcgcttttctttctacttattcttatctgtgtctttcgctttgtttgcctctccgtctgttttccctcagggcccccttctttcctcgaccttttcaaatcgcaaatatggcgccggagcggctgcggagccgggcgctctccgccttcaagttgcggggcttgctgctccgtggtgaagctattaagtacctcacagaagctcttcagtctatcagtgaattagagcttgaagataaactggaaaagataattaatgcagttgagaagcaacccttgtcatcaaacatgattgaacgatctgtggtggaagcagcagtccaggaatgcagtcagtctgttgatgaaactatagagcacgttttcaatatcataggagcatttgatattccacgctttgtgtacaattcagaaagaaaaaaatttcttcctctgttaatgaccaaccaccctgcaccaaatttatttggaacaccaagagataaagcagagatgtttcgtgagcgatataccattttgcaccagaggacccacaggcatgaattatttactcctccggtgataggttctcaccctgatgaaagcggaagcaaattccagcttaaaacaatagaaaccttattgggtagtacaaccaaaatcggagatgcgattgttcttggaatgataacgcagttaaaagagggaaaattttttctggaagatcctactggaacagtccaactagaccttagtaaagctcagttccatagtggtttatacacagaggcatgctttgtcttagcagaaggttggtttgaagatcaagtgtttcatgtcaatgcctttggatttccacccactgagccctctagtactactagggcatactatggaaatattaatttttttggaggtccttctaatacatctgtgaagacttctgcaaaactaaaacagctagaagaggagaataaagatgctatgtttgtgtttttatctgatgtttggttggaccaggtggaagtattggaaaaacttcgcataatgtttgctgggttattcaccagcacctccaacctgctttattctgtgtggtaatttttcatctgcaccatatggaaaaaatcaagttcaagctttgaaagattccctaaaaactttggcagatataatatgtgaatacccagatattcaccaaagtagtcgttttgtgtttgtacctggtccagaggatcctggatttggttccatcttaccaaggccaccacttgctgaaagcatcactaatgaattcagacaaagggtaccattttcagtttttactactaatccttgcagaattcagtactgtacacaggaaattactgtcttccgtgaagacttagtaaataaaatgtgcagaaactgcgtccgttttcctagcagcaatttggctattcctaatcactttgtaaagactatcttatcccaaggacatctgactcccctacctctttatgtctgcccagtgtattgggcatatgactatgctttgagagtgtatcctgtgcccgatctacttgtcattgcagacaaatatgatcctttcactacgacaaataccgaatgcctctgcataaaccctggctcttttccaagaagtggattttcattcaaagttttttatccttctaataagacagtagaagatagcaaacttcaaggcttttgagattcttaaagatcatctgaagaaaattcatcagttttctgcttaactctatatcttatgtgattctgatattacaataaaattatggncntggcctcgttggcctca

SEQ ID NO: 309427 - DNA, 1875 bp, Homo sapiens
ctttccgtccccttgcttcgtcttcgcttttctttctacttattcttatctgtgtctttcgctttgtttgcctctccgtctgttttccctcagggcccccttctttcctcgaccttttcaaatcgcaaatatggcgccggagcggctgcggagccgggcgctctccgccttcaagttgcggggcttgctgctccgtggtgaagctattaagtacctcacagaagctcttcagtctatcagtgaattagagcttgaagataaactggaaaagataattaatgcagttgagaagcaacccttgtcatcaaacatgattgaacgatctgtggtggaagcagcagtccaggaatgcagtcagtctgttgatgaaactatagagcacgttttcaatatcataggagcatttgatattccacgctttgtgtacaattcagaaagaaaaaaatttcttcctctgttaatgaccaaccaccctgcaccaaatttatttggaacaccaagagataaagcagagatgtttcgtgagcgatataccattttgcaccagaggacccacaggcatgaattatttactcctccggtgataggttctcaccctgatgaaagcggaagcaaattccagcttaaaacaatagaaaccttattgggtagtacaaccaaaatcggagatgcgattgttcttggaatgataacgcagttaaaagagggaaaattttttctggaagatcctactggaacagtccaactagaccttagtaaagctcagttccatagtggtttatacacagaggcatgctttgtcttagcagaaggttggtttgaagatcaagtgtttcatgtcaatgcctttggatttccacccactgagccctctagtactactagggcatactatggaaatattaatttttttggaggtccttctaatacatctgtgaagacttctgcaaaactaaaacagctagaagaggagaataaagatgctatgtttgtgtttttatctgatgtttggttggaccaggtggaagtattggaaaaacttcgcataatgtttgctgggttattcaccagcacctccaacctgctttattctgtgtggtaatttttcatctgcaccatatggaaaaaatcaagttcaagctttgaaagattccctaaaaactttggcagatataatatgtgaatacccagatattcaccaaagtagtcgttttgtgtttgtacctggtccagaggatcctggatttggttccatcttaccaaggccaccacttgctgaaagcatcactaatgaattcagacaaagggtaccattttcagtttttactactaatccttgcagaattcagtactgtacacaggaaattactgtcttccgtgaagacttagtaaataaaatgtgcagaaactgcgtccgttttcctagcagcaatttggctattcctaatcactttgtaaagactatcttatcccaaggacatctgactcccctacctctttatgtctgcccagtgtattgggcatatgactatgctttgagagtgtatcctgtgcccgatctacttgtcattgcagacaaatatgatcctttcactacgacaaataccgaatgcctctgcataaaccctggctcttttccaagaagtggattttcattcaaagttttttatccttctaataagacagtagaagatagcaaacttcaaggcttttgagattcttaaagatcatctgaagaaaattcatcagttttctgcttaactctatatcttatgtgattctgatattacaataaaattatggaattcatcagttttctgcttaactctatatcttatgtgattctgatattacaataaaattatggtaaacttt

SEQ ID NO: 309428 - DNA, 2882 bp, Homo sapiens
ctttccgtccccttgcttcgtcttcgcttttctttctacttattcttatctgtgtctttcgctttgtttgcctctccgtctgttttccctcagggcccccttctttcctcgaccttttcaaatcgcaaatatggcgccggagcggctgcggagccgggcgctctccgccttcaagttgcggggcttgctgctccgtggtgaagctattaagtacctcacagaagctcttcagtctatcagtgaattagagcttgaagataaactggaaaagataattaatgcagttgagaagcaacccttgtcatcaaacatgattgaacgatctgtggtggaagcagcagtccaggaatgcagtcagtctgttgatgaaactatagagcacgttttcaatatcataggagcatttgatattccacgctttgtgtacaattcagaaagaaaaaaatttcttcctctgttaatgaccaaccaccctgcaccaaatttatttggaacaccaagagataaagcagagatgtttcgtgagcgatataccattttgcaccagaggacccacaggcatgaattatttactcctccggtgataggttctcaccctgatgaaagcggaagcaaattccagcttaaaacaatagaaaccttattgggtagtacaaccaaaatcggagatgcgattgttcttggaatgataacgcagttaaaagagggaaaattttttctggaagatcctactggaacagtccaactagaccttagtaaagctcagttccatagtggtttatacacagaggcatgctttgtcttagcagaaggttggtttgaagatcaagtgtttcatgtcaatgcctttggatttccacccactgagccctctagtactactagggcatactatggaaatattaatttttttggaggtccttctaatacatctgtgaagacttctgcaaaactaaaacagctagaagaggagaataaagatgctatgtttgtgtttttatctgatgtttggttggaccaggtggaagtattggaaaaacttcgcataatgtttgctgggttattcaccagcacctccaacctgctttattctgtgtggtaatttttcatctgcaccatatggaaaaaatcaagttcaagctttgaaagattccctaaaaactttggcagatataatatgtgaatacccagatattcaccaaagtagtcgttttgtgtttgtacctggtccagaggatcctggatttggttccatcttaccaaggccaccacttgctgaaagcatcactaatgaattcagacaaagggtaccattttcagtttttactactaatccttgcagaattcagtactgtacacaggaaattactgtcttccgtgaagacttagtaaataaaatgtgcagaaactgcgtccgttttcctagcagcaatttggctattcctaatcactttgtaaagactatcttatcccaaggacatctgactcccctacctctttatgtctgcccagtgtattgggcatatgactatgctttgagagtgtatcctgtgcccgatctacttgtcattgcagacaaatatgatcctttcactacgacaaataccgaatgcctctgcataaaccctggctcttttccaagaagtggattttcattcaaagttttttatccttctaataagacagtagaagataggtaagtgtgtgcacagacacagcaagaaagatctttctctaggtgttaaattactgaaaatgagatgttctatcagtgtgttgggatttttgaaaatgtctacagtggcccataaagaaatattattggctgagcttatcacggttatgctgtgtgacacagaattgtgggtacatgacggtacgtttgtgttgaaatagatcaagaactgttttctgggggaaatctcaggccagctgtggaggtgagctagttctcttacaggccaactcctgacgatggtctcactcttctgagaggtcagtcctgccctccgtacggttgcttcttaggtactttcccttaaattgacagtgagggagctgtgtgtgagtttggtgatggtatggggttggagttacggaaaggtcttgagaaagaagaaaataatcacctagtgggtagtagttttcacagggtgatctacatagatcacccacatcagaatcctctggggtccttgttaaaaatgttaagttaggattttgccccagactcatcaaatgactttctaattgtaaagaataggcattttaaatattatttcctgtaatttcaggcatcctaacatgtgatttctcagataactgtattttgaaaaagttcccaccactggttaagaacaagtgcccaggcagggcacggtggctcatgcctgtaatcccaggactttgggaggccgagcaaacttcaaggcttttgagattcttaaagatcatctgaagaaaattcatcagttttctgcttaactctatatcttatgtgattctgatattacaataaaattatggggtaaactttaaaaattctgcttaaatttgtattttgtgaaattttgatactaagtgataaatatgatggtatacttgagaaagttttctaggaaaaatattttctgcatagtcttttaagaaaaatatatgggggccaggcgcagtggctcacgcctgtaatcctagtgctttgggaggccaaggcgggtggatcacctgaggtcaggagttcgagaccagcctagccaaggtagcaaaaccctatctctgctaaaaaaaaaaatacaaaaattagctgggcatggtggcgggcgcctgtaatcccagcttctcgggaggctgaggcagggagaatcacttgaacctgggaggcg

SEQ ID NO: 309429 - DNA, 2284 bp, Homo sapiens
ctttccgtccccttgcttcgtcttcgcttttctttctacttattcttatctgtgtctttcgctttgtttgcctctccgtctgttttccctcagggcccccttctttcctcgaccttttcaaatcgcaaatatggcgccggagcggctgcggagccgggcgctctccgccttcaagttgcggggcttgctgctccgtggtgaagctattaagtacctcacagaagctcttcagtctatcagtgaattagagcttgaagataaactggaaaagataattaatgcagttgagaagcaacccttgtcatcaaacatgattgaacgatctgtggtggaagcagcagtccaggaatgcagtcagtctgttgatgaaactatagagcacgttttcaatatcataggagcatttgatattccacgctttgtgtacaattcagaaagaaaaaaatttcttcctctgttaatgaccaaccaccctgcaccaaatttatttggaacaccaagagataaagcagagatgtttcgtgagcgatataccattttgcaccagaggacccacaggcatgaattatttactcctccggtgataggttctcaccctgatgaaagcggaagcaaattccagcttaaaacaatagaaaccttattgggtagtacaaccaaaatcggagatgcgattgttcttggaatgataacgcagttaaaagagggaaaattttttctggaagatcctactggaacagtccaactagaccttagtaaagctcagttccatagtggtttatacacagaggcatgctttgtcttagcagaaggttggtttgaagatcaagtgtttcatgtcaatgcctttggatttccacccactgagccctctagtactactagggcatactatggaaatattaatttttttggaggtccttctaatacatctgtgaagacttctgcaaaactaaaacagctagaagaggagaataaagatgctatgtttgtgtttttatctgatgtttggttggaccaggtggaagtattggaaaaacttcgcataatgtttgctgggttattcaccagcacctccaacctgctttattctgtgtggtaatttttcatctgcaccatatggaaaaaatcaagttcaagctttgaaagattccctaaaaactttggcagatataatatgtgaatacccagatattcaccaaagtagtcgttttgtgtttgtacctggtccagaggatcctggatttggttccatcttaccaaggccaccacttgctgaaagcatcactaatgaattcagacaaagggtaccattttcagtttttactactaatccttgcagaattcagtactgtacacaggaaattactgtcttccgtgaagacttagtaaataaaatgtgcagaaactgcgtccgttttcctagcagcaatttggctattcctaatcactttgtaaagactatcttatcccaaggacatctgactcccctacctctttatgtctgcccagtgtattgggcatatgactatgctttgagagtgtatcctgtgcccgatctacttgtcattgcagacaaatatgatcctttcactacgacaaataccgaatgcctctgcataaaccctggctcttttccaagaagtggattttcattcaaagttttttatccttctaataagacagtagaagataggcatcctaacatgtgatttctcagataactgtattttgaaaaagttcccaccactggttaagaacaagtgcccaggcagggcacggtggctcatgcctgtaatcccaggactttgggaggccgagcaaacttcaaggcttttgagattcttaaagatcatctgaagaaaattcatcagttttctgcttaactctatatcttatgtgattctgatattacaataaaattatggggtaaactttaaaaattctgcttaaatttgtattttgtgaaattttgatactaagtgataaatatgatggtatacttgagaaagttttctaggaaaaatattttctgcatagtcttttaagaaaaatatatgggggccaggcgcagtggctcacgcctgtaatcctagtgctttgggaggccaaggcgggtggatcacctgaggtcaggagttcgagaccagcctagccaaggtagcaaaaccctatctctgctaaaaaaaaaaatacaaaaattagctgggcatggtggcgggcgcctgtaatcccagcttctcgggaggctgaggcagggagaatcacttgaacctgggaggcg

SEQ ID NO: 309430 - DNA, 1965 bp, Homo sapiens
ctttccgtccccttgcttcgtcttcgcttttctttctacttattcttatctgtgtctttcgctttgtttgcctctccgtctgttttccctcagggcccccttctttcctcgaccttttcaaatcgcaaatatggcgccggagcggctgcggagccgggcgctctccgccttcaagttgcggggcttgctgctccgtggtgaagctattaagtacctcacagaagctcttcagtctatcagtgaattagagcttgaagataaactggaaaagataattaatgcagttgagaagcaacccttgtcatcaaacatgattgaacgatctgtggtggaagcagcagtccaggaatgcagtcagtctgttgatgaaactatagagcacgttttcaatatcataggagcatttgatattccacgctttgtgtacaattcagaaagaaaaaaatttcttcctctgttaatgaccaaccaccctgcaccaaatttatttggaacaccaagagataaagcagagatgtttcgtgagcgatataccattttgcaccagaggacccacaggcatgaattatttactcctccggtgataggttctcaccctgatgaaagcggaagcaaattccagcttaaaacaatagaaaccttattgggtagtacaaccaaaatcggagatgcgattgttcttggaatgataacgcagttaaaagagggaaaattttttctggaagatcctactggaacagtccaactagaccttagtaaagctcagttccatagtggtttatacacagaggcatgctttgtcttagcagaaggttggtttgaagatcaagtgtttcatgtcaatgcctttggatttccacccactgagccctctagtactactagggcatactatggaaatattaatttttttggaggtccttctaatacatctgtgaagacttctgcaaaactaaaacagctagaagaggagaataaagatgctatgtttgtgtttttatctgatgtttggttggaccaggtggaagtattggaaaaacttcgcataatgtttgctgggttattcaccagcacctccaacctgctttattctgtgtggtaatttttcatctgcaccatatggaaaaaatcaagttcaagctttgaaagattccctaaaaactttggcagatataatatgtgaatacccagatattcaccaaagtagtcgttttgtgtttgtacctggtccagaggatcctggatttggttccatcttaccaaggccaccacttgctgaaagcatcactaatgaattcagacaaagggtaccattttcagtttttactactaatccttgcagaattcagtactgtacacaggaaattactgtcttccgtgaagacttagtaaataaaatgtgcagaaactgcgtccgttttcctagcagcaatttggctattcctaatcactttgtaaagactatcttatcccaaggacatctgactcccctacctctttatgtctgcccagtgtattgggcatatgactatgctttgagagtgtatcctgtgcccgatctacttgtcattgcagacaaatatgatcctttcactacgacaaataccgaatgcctctgcataaaccctggctcttttccaagaagtggattttcattcaaagttttttatccttctaataagacagtagaagatagatcaagaactgttttctgggggaaatctcaggccagctgtggaggtgagctagttctcttacaggccaactcctgacgatggtctcactcttctgagagcaaacttcaaggcttttgagattcttaaagatcatctgaagaaaattcatcagttttctgcttaactctatatcttatgtgattctgatattacaataaaattatggcctcgttggcctcagcggtggagctctgcggccgacattttttttataacaccccccaacatg

SEQ ID NO: 309431 - DNA, 1839 bp, Homo sapiens
ctttccgtccccttgcttcgtcttcgcttttctttctacttattcttatctgtgtctttcgctttgtttgcctctccgtctgttttccctcagggcccccttctttcctcgaccttttcaaatcgcaaatatggcgccggagcggctgcggagccgggcgctctccgccttcaagttgcggggcttgctgctccgtggtgaagctattaagtacctcacagaagctcttcagtctatcagtgaattagagcttgaagataaactggaaaagataattaatgcagttgagaagcaacccttgtcatcaaacatgattgaacgatctgtggtggaagcagcagtccaggaatgcagtcagtctgttgatgaaactatagagcacgttttcaatatcataggagcatttgatattccacgctttgtgtacaattcagaaagaaaaaaatttcttcctctgttaatgaccaaccaccctgcaccaaatttatttggaacaccaagagataaagcagagatgtttcgtgagcgatataccattttgcaccagaggacccacaggcatgaattatttactcctccggtgataggttctcaccctgatgaaagcggaagcaaattccagcttaaaacaatagaaaccttattgggtagtacaaccaaaatcggagatgcgattgttcttggaatgataacgcagttaaaagagggaaaattttttctggaagatcctactggaacagtccaactagaccttagtaaagctcagttccatagtggtttatacacagaggcatgctttgtcttagcagaaggttggtttgaagatcaagtgtttcatgtcaatgcctttggatttccacccactgagccctctagtactactagggcatactatggaaatattaatttttttggaggtccttctaatacatctgtgaagacttctgcaaaactaaaacagctagaagaggagaataaagatgctatgtttgtgtttttatctgatgtttggttggaccaggtggaagtattggaaaaacttcgcataatgtttgctgggttattcaccagcacctccaacctgctttattctgtgtggtaatttttcatctgcaccatatggaaaaaatcaagttcaagctttgaaagattccctaaaaactttggcagatataatatgtgaatacccagatattcaccaaagtagtcgttttgtgtttgtacctggtccagaggatcctggatttggttccatcttaccaaggccaccacttgctgaaagcatcactaatgaattcagacaaagggtaccattttcagtttttactactaatccttgcagaattcagtactgtacacaggaaattactgtcttccgtgaagacttagtaaataaaatgtgcagaaactgcgtccgttttcctagcagcaatttggctattcctaatcactttgtaaagactatcttatcccaaggacatctgactcccctacctctttatgtctgcccagtgtattgggcatatgactatgctttgagagtgtatcctgtgcccgatctacttgtcattgcagacaaatatgatcctttcactacgacaaataccgaatgcctctgcataaaccctggctcttttccaagaagtggattttcattcaaagttttttatccttctaataagacagtagaagatagcaaacttcaaggcttttgagattcttaaagatcatctgaagaaaattcatcacccttacgcaaaaataataaataatataaaggaataaaaataaaacaataaaattctgccctcgttgccctcagcggtgagctctcggctg

SEQ ID NO: 309432 - DNA, 1385 bp, Homo sapiens
agtgagaccatgtctcaaaaaaaaaataaataaataaaataaaaaataaaaaatatacatattgtgtttaaaaaaatttattttaaaaaaaagtctgagcattcacttacaggcatttttctcccccaaagggctcttttccaagaagtggattttcattcaaagttttttatccttctaataagacagtagaagataggtaagtgtgtgcacagacacagcaagaaagatctttctctaggtgttaaattactgaaaatgagatgttctatcagtgtgttgggatttttgaaaatgtctacagtggcccataaagaaatattattggctgagcttatcacggttatgctgtgtgacacagaattgtgggtacatgacggtacgtttgtgttgaaatagatcaagaactgttttctgggggaaatctcaggccagctgtggaggtgagctagttctcttacaggccaactcctgacgatggtctcactcttctgagaggtcagtcctgccctccgtacggttgcttcttaggtactttcccttaaattgacagtgagggagctgtgtgtgagtttggtgatggtatggggttggagttacggaaaggtcttgagaaagaagaaaataatcacctagtgggtagtagttttcacagggtgatctacatagatcacccacatcagaatcctctggggtccttgttaaaaatgttaagttaggattttgccccagactcatcaaatgactttctaattgtaaagaataggcattttaaatattatttcctgtaatttcaggcatcctaacatgtgatttctcagataactgtattttgaaaaagttcccaccactggttaagaacaagtgcccaggcagggcacggtggctcatgcctgtaatcccaggactttgggaggccgagcaaacttcaaggcttttgagattcttaaagatcatctgaagaaaattcatcagttttctgcttaactctatatcttatgtgattctgatattacaataaaattatggggtaaactttaaaaattctgcttaaatttgtattttgtgaaattttgatactaagtgataaatatgatggtatacttgagaaagttttctaggaaaaatattttctgcatagtcttttaagaaaaatatatgggggccaggcgcagtggctcacgcctgtaatcctagtgctttgggaggccaaggcgggtggatcacctgaggtcaggagttcgagaccagcctagccaaggtagcaaaaccctatctctgctaaaaaaaaaaatacaaaaattagctgggcatggtggcgggcgcctgtaatcccagcttctcgggaggctgaggcagggagaatcacttgaacctgggaggcg

SEQ ID NO: 309433 - DNA, 555 bp, Homo sapiens
ctttccgtccccttgcttcgtcttcgcttttctttctacttattcttatctgtgtctttcgctttgtttgcctctccgtctgttttccctcagggcccccttctttcctcgaccttttcaaatcgcaaatatggcgccggagcggctgcggagccgggcgctctccgccttcaagttgcggggcttgctgctccgtggtgaagctattaagtacctcacagaagctcttcagtctatcagtgaattagagcttgaagataaactggaaaagataattaatgcagttgagaagcaacccttgtcatcaaacatgattgaacgatctgtggtggaagcagcagtccaggaatgcagtcagtctgttgatgaaactatgtatgtgggtacagttaacttttttcctccttggaggtgttattgagcacttatttttaattattgtcttggaaaattattagtgatcaacgtttctacagtgattactgttgttatttctgtgtgtctttttaaataatggctttctttgcaaacctcattattaaatgactcatcttt

SEQ ID NO: 309434 - DNA, 226 bp, Homo sapiens
  misc_feature (38)..(38): n is a, c, g, or t
atggcaaatcgtctcgactcctattcctacaaccccgnacccccttacggctaccgcaaacttcaaggcttttgagattcttaaagatcatctgaagaaaattcatcagttttctgcttaactctatatcttatgtgattctgatattacaataaaattatggcctcgttggcctcagcggtggagctctgcggccgacattttttttataacaccccccaacatg

SEQ ID NO: 309435 - DNA, 293 bp, Homo sapiens
attactagatatttgtatgttaaattatgtgggttttcaaatttgtggagaataagtaatagtgacattagtttaaggacagtgtttcatcagggcactattttaatgaatcttatatttaaatgtctgtttcaggaattcatgtgaatctttcttttttatagaggacccacaggcatgaattatttactcctccggtgataggttctcaccctgatgaaagcggaagcaaattccaggttagaacattatcctagttatgtagggggtataagtgtgtaagtttaatattt

SEQ ID NO: 309436 - DNA, 489 bp, Homo sapiens
tagaggattagacaaatgaaagtgacgttactttttttcaggttggtttgaagatcaagtgtttcatgtcaatgcctttggatttccacccactgagccctctagtactactaggtattaaaatgtttggtttatactctatgggaatttggtaatactggcaggagtgaatgtaagatagtacgtcatatctcagttactaaaaggtgtcaggctttgtgtcaaaatggaaaaagcaatggaaaatgagaattagaagactgggttttgtatgtaatgtgaaaactagcagattggccaacaattagttgcaataccgtctttgtacttcggctttaactgggaaagatttccagtctgttttatctctggggttgatgagaagttgaagtgagataagacaactaggataacacttagaagaatataattccatgttaatataaaattctcatttttatattccaatgaatgaaagttatgtgaggt

SEQ ID NO: 309437 - DNA, 338 bp, Homo sapiens
cctctcgaaaaaaaaaaaaaaaaaaaaagacatacatttgctttttgggagcagaaaagggggcatgagaatgacttattttttagagtctccttttgaatttgaaacagtatgtatgtattgacctgtttttaaaaatcaattaactatacctatttaaaaaaattaactacaactattagtaagtatacaacttaggtttccaaatatttaatttttttttctattttcagcaaacttcaaggcttttgagattcttaaagatcatctgaagaaaattcatcagttttctgcttaactctatatcttatgtgattctgatattacaataaaattat

SEQ ID NO: 309438 - DNA, 5343 bp, Homo sapiens
gccagcgatcagagcagcgctgggtgttcaggggccaagatggcggcgcgccggggacggagagacggagtcgcgccgcccccgagtgggggccccggtccggaccctggcgggggagcccgcggcagtggttggggaagtcgaagccaagcgccgtatgggactttgggcgctgtgagcggcggcgagcaggtgctgctgcatgaggaggcgggtgattctggctttgtcagtctctctcggctgggcccatctctgagggacaaggacctggaaatggaggagctaatgctgcaggatgagacactgctggggaccatgcagagctacatggatgcctcccttatctccctcattgaggattttgggagccttggagagagcaggttatctctggaggaccagaatgaagtgtcgctgctcacggctctgacggagatcttggacaatgcagattctgagaacctttctccatttgacagcattcctgattcggagctgcttgtgtcaccccgggagggctcctctctgcacaagctgcttactctctctcggacacccccagaacgtgacctcatcaccccagttgacccactggggcccagtacaggcagcagtagagggagtggggttgaaatgtctcttccagatccctcttgggacttctccccaccctctttcttagagacctcttcccccaagcttcctagctggagacccccaagatcaagaccacgctggggccaatccccacctccccagcagcgcagtgatggagaagaagaggaggaggtggccagcttcagtggccagattcttgccggggagcttgacaactgtgtgagcagtatcccggacttccccatgcatttggcctgccctgaggaggaagataaagcaacagcagcagagatggcagtgccagcagctggtgatgagagcatctcctccctgagtgagctggtgcgggccatgcacccatactgcctgcccaacctcacccacctggcatcacttgaggatgagcttcaggagcagccagatgatttgacactgcctgagggctgcgtagtgctggagattgtggggcaggcagccacagctggcgatgacctggagatcccagttgtggtgcgacaggtctctcctggaccccggcctgtgctcctggatgactcgctagagactagttctgccttgcagctgcttatgcctacactggagtcagagacagaggctgctgtgcccaaggtaaccctctgctctgagaaagaggggttgtcattgaactcagaggagaagctggactcagcctgcttattgaagcccagggaggtcgtggagccggtggtgcccaaggagcctcagaacccacctgccaatgcagcaccaggttcccagagagctcgaaagggcaggaagaagaagagcaaggagcagccagcagcctgtgtggaaggctatgccaggaggctgaggtcatcttctcgcgggcagtctactgtaggtacagaagtgacctctcaggtagacaacttgcagaaacagcctcaggaagaacttcaaaaagagtctgggcctctccagggtaaggggaagccccgggcttgggctcgggcctgggcagctgccttggagaattctagccctaagaacttggagagaagtgctggacaaagtagtcctgctaaagaaggccctctagacctctacccaaagctggctgacactatccaaaccaatcctataccaacccatctctcattggtcgactctgcccaagccagccccatgccagttgactctgttgaagctgatcccactgcagttggccctgttctagctggccctgtacctgttgaccctgggttggttgaccttgcttcaaccagctcagaactggttgagcctctcccggctgagccagtgctgatcaacccagtcctggctgactcagcagcagttgaccctgcagtggttcccatctcagataacttgccaccagttgatgctgtcccgtctggcccagcaccagttgatctagcactggttgaccctgttcctaatgacctgactccagttgacccagtgctagttaagtccagaccaactgatcccagacgtggtgcagtgtcatcagccctggggggttcagcaccccagctcctcgtggagtcagagtccttggacccaccaaagaccatcatccctgaagtcaaagaggttgtggattctctgaaaattgaaagtggtaccagtgctacaacccatgaagccagacctcggcctctcagcttatctgagtaccggcgacgaaggcagcaacgccaagcagaaacagaagagagaagtccacagcccccaactgggaagtggcctagccttccagagactcccacagggctggcagacatcccttgtcttgtcatcccaccagccccagccaagaagacagctctgcagagaagccctgaaacaccccttgagatttgccttgtgcctgtaggtcccagccctgcttctcctagtcctgagccacctgtaagcaaacctgtggcctcatctcccactgagcaggtgccatcccaggagatgccactgttggcgagaccttcccctcctgtgcagtctgtgtcccctgctgtgcccacacctccctcgatgtctgctgccctgcctttccctgcaggtgggcttggcatgccccccagtctgcccccacctcccttgcagcctcctagtcttccattgtctatggggccagtactacctgatccgtttactcactatgcccccttgccatcctggccttgttatcctcatgtgtccccttctggctatccttgcctgccccccccaccaacggtgcccctagtgtctggtactcctggtgcctatgccgtgcctcccacttgcagtgtgccttgggcaccccctcctgccccagtctcaccttacagttccacatgtacctatgggcccttgggatggggcccagggcctcaacatgctccattctggtctactgttcccccacctcctttgcctccagcctccattgggagagctgttccccaacctaaaatggagtctaggggcactccagctggccctcctgaaaatgtacttcccttgtcgatggctcctcccctcagtcttgggctacctggccatggagctcctcagacagagcctaccaaggtggaggtcaagccagtgcctgcatctccccatccgaaacacaaggtgtctgccctggtgcaaagtccccagatgaaggctctagcatgtgtgtctgctgaaggtgtgactgttgaggagcctgcatcagagaggctaaagcctgagacccaagagaccaggcccagggagaagccccccttgcctgctaccaaggctgttcccacaccaaggcagagcactgtccccaagctgcctgctgtccacccagcccgtctaaggaagctgtccttcctgcctaccccacgtactcagggttctgaagatgtggtacaggctttcatcagtgagattggaattgaggcatcggacctgtccagtctgctggagcagtttgagaaatcagaagccaaaaaggagtgtcctcctccggctcctgctgacagcttggctgtaggaaactcaggcggcgttgacattccccaggagaagaggcccctagaccggttacaagccccagaactggccaacgtggcagggctcacccctccagctacccctccccaccagttatggaagcccctggctgctgtctcactgctggccaaagccaaatctcctaagtccaccgcccaggagggaaccctgaagcctgaaggagttacggaggccaaacatccagctgcagttcgcctccaagaaggggtccatggccctagtcgagtccatgtgggctctggggaccatgactattgtgtccggagcaggacccccccaaaaaagatgcctgccctagtcattccagaggtgggctcccgatggaatgtcaagcgccatcaggacatcaccatcaaacctgtcttgtccttgggcccagctgcccctccgcccccatgcatagctgcctcccgggagccgcttgatcacaggactagcagtgagcaggcagatccctcagcaccctgccttgccccatccagcttgctgtcccctgaggcctcaccctgccggaatgacatgaacactaggactccccctgaaccctcagccaagcagcggtcaatgcgctgttaccgaaaagcctgcaggtcagccagcccctcaagccagggctggcagggccgccgaggccgcaacagccgttctgtcagctctgggtccaaccggactagcgaagcatcttcctcatcctcatcatcgtcttcctcatcccgatctcggtccaggtccctctcccccccacacaagaggtggcgaaggtccagctgtagttcctctggacgttctcgaagatgctcttcctcttcttcgtcatcatcttcctcttcgtcttcctcatcctcatcatccagttctcgaagccgctcacgatccccatccccccgccggagaagtgacaggaggcggcggtacagctcttatcgttcacatgaccattaccaaaggcaaagagtgctacaaaaggagcgtgcaatagaagaaagaagggtggtcttcattggaaagatacctggccgcatgactcgatcagagctgaaacagaggttctccgtttttggagagattgaggagtgcaccatccacttccgtgtccaaggggacaactacggcttcgtcacttatcgctatgctgaggaggcatttgcagccattgagagtggccacaagctgcggcaggcagatgagcagccctttgatctctgctttgggggccgaaggcagttctgcaagaggagctattctgatcttgactccaaccgggaagactttgacccagcacctgtaaagagcaaatttgattctcttgactttgacacattgttgaaacaggcccagaagaacctcaggaggtaaccttgggcccttccctgctatcctttttctcctttggaggtgcccaacctcctccacccccttcccctactctaggggagagagctgctagtgagatgactgttttataaagaaatggaaaaaagtgaaataaaaaatatgttgaatcagattttttaaaaggggtatttgtttttttataacaggtattgaaacaagttaacttgcattcctatgtaagataggaggggctgaggggatccccagtgtttggaacataagtcactatgcagactaataaacatcaactagagagaaaaaaaaaatgct

SEQ ID NO: 309439 - DNA, 896 bp, Homo sapiens
ccacctcagccttccaagtagctgggatttataggcacaggtgtgtgccaccgtgcctggctgtggagggttcttcagaggcagagccctgggttggtttgaatccttcatgctttgtgctgctaccttggttcacttagtacagagggcagggggagtggaaagggagaagtgagatgatttgggggcttcctgggacctgtgtactaagttgataggggctcgttttcaatcctgtgttgtgtgcctccacaggaattgaggcatcggacctgtccagtctgctggagcagtttgagaaatcagaagccaaaaaggagtgtcctcctccggctcctgctgacagcttggctgtaggaaactcagggtaagtatggagacatgagcgagttaccctacagctgttagtcagcagccggctgacactccaggactgtcaactggatgcctctgttgcagggacgctgtagtcagctctagagtctttccctgtttccccaccccttactctgcctatcactaccgggcagtgtcttgggtggtgaggtgagaacggggcatgttcactgccctccagctgattccagtcgggctccaaatgtcctagaggtgccttttatctcctggcaagtcatacctttggggatttctttctttcatttaataacacttcaagtttgctcagtgctggtaatggtgtaacttaaagtggaggaagatgttaatggctaggagtcatttttcatgttcatgatcctccatcctgttctgccaagcatgttcccctccacattgatttcaggttggtgtgagctgggcaggtgagactcgatgtgaaggaggtggggggtattcaaggtcatggccagcctgcctcttggaattgggcagggctc

SEQ ID NO: 309440 - DNA, 1134 bp, Homo sapiens
atctttttttctcagtaaccaagttttcccacttaatgaagaattcttgggttttggagatgatatatgtcttcagaactggcccatactacaagtctagcagttaacctctctcatggtcacagtatttcagtgagacctggtaggggagcaatagtaacccaaaagacccaggcttggccccagcaccacagatagctgggtgtgagacctagggctcacccctctccctgagtctccatttattgttcttcctctttctgatttgttaaatatttttcaatttttaagtgcacaattgaaaatgtgatctcttccaaaacacttcacaacattccaggtacacctaaagttccatgaagggcctcagtttgttcatctctgaatgaaaattgttcttctagacctcttctactctgctttgtctttggtcctgagcttcctaaaagaaaggcaggactggggcctgggtgagataagcagagtatacctgaaccactcccagcattcctgcatgccctcttatccttcaggtccagctgtagttcctctggacgttctcgaagatgctcttcctcttcttcgtcatcatcttcctcttcgtcttcctcatcctcatcatccagttctcgaagccgctcacgatccccatccccccgccggagaagtgacaggaggcggcggtacagctcttatcgttcacatgaccattaccaaaggcaaagagtgctacaaaaggagcgtgcaatagaagaaatgaagtgagaagctaccatctccggggcaaagacaaagggccaaaaattcattcccaccctcacccccagcagacaaaaaaacaccatgggacattaaataaaacagaaatcactgaaaccacagagaaaaaatttattatcaattcgtcagaaatccactctcaaggttaaaagaagagatggggttttcccaaggcactctggtgtgaagtgaaaaaaatgacagaccagggaagatttagtctccttgatgaggttcaccatggaagacgtaaaagctgtatcccgaagaagggaatacaaggcaagagcaaaaccagaaaacgcaatcatcaggcaaaagcgaggccttgagtgaccactatgaggcagaaga

SEQ ID NO: 309441 - DNA, 407 bp, Homo sapiens
gaaatggggactggggactctcctatctctttgacttaaaattagagcagttttcactccatccgtttttgggatgggagatagctagccatttgcagaccctgtggttgggaagtgtggtcagagaccttgaagtttgtctttacctttatagactccaaccgggaagactttgacccagcacctgtaaagagcaaatttgattctcttgactttgacacattgttgaaacaggcccagaagaacctcaggaggtaaccttgggcccttccctgctatcctttttctcctttggaggtgcccaacctcctccacccccttcccctactctaggggagagagctgctagtgagatgactgttttataaagaaatggaaaaaagtgaaataaaaaatatgttgaatca

SEQ ID NO: 309442 - DNA, 809 bp, Homo sapiens
ccacctcagccttccaagtagctgggatttataggcacaggtgtgtgccaccgtgcctggctgtggagggttcttcagaggcagagccctgggttggtttgaatccttcatgctttgtgctgctaccttggttcacttagtacagagggcagggggagtggaaagggagaagtgagatgatttgggggcttcctgggacctgtgtactaagttgataggggctcgttttcaatcctgtgttgtgtgcctccacaggaattgaggcatcggacctgtccagtctgctggagcagtttgagaaatcagaaggtgagggaacatgggtagttttgctccaactctttttttggtgatacttttttgggcccagccctgtagttgcttaaactagggtgagaggggacacccttagccactggagcagacccctaattggaagagagagacaagattgaactgtgacggtaatccaagccagggacggcagtgatacagtaaggaaggtattaaagagtagactgggaatccaggccaggcgtggtggctcatgcctgtaatcccagcactctgggaagctgaggcgggtggatcatgaggtcaggagtttgagaccagcctggccaacatggtgaaaccccgtatctactaaaaatacaaaaattagctgggcgaggtggcgggcacctgtaatcccagttactcgggaggctgaggcaggagaattgtttgaacccagcaggcagagattgcagtgagccgagatcgtgccattgcactctagcctgggccacagggtgagactctgtctc

SEQ ID NO: 309443 - DNA, 5496 bp, Homo sapiens
tttggtgtgcccctcagactgttatcttcactgctgccagtagatgattctgaacaatcttgattttcctgatgtttgtactcccgggttttaatctgtgactctagctgtttctggttggagcccaaacatttttctgccccagaaggtccctgaaaactgccatccttattggggtttttgctcataggttgtgcttctctctgctctgctagcccagaagtttggcgacagtgttgctgctgctgagtttggccccagcagtggagggtacctgatttatggagcatattatcagctgctgccagagagctcatacccttctcaccttcttctctgctccaggtgctgctgcatgaggaggcgggtgattctggctttgtcagtctctctcggctgggcccatctctgagggacaaggacctggaaatggaggagctaatgctgcaggatgagacactgctggggaccatgcagagctacatggatgcctcccttatctccctcattgaggattttgggagccttggagagagcaggttatctctggaggaccagaatgaagtgtcgctgctcacggctctgacggagatcttggacaatgcagattctgagaacctttctccatttgacagcattcctgattcggagctgcttgtgtcaccccgggagggctcctctctgcacaagctgcttactctctctcggacacccccagaacgtgacctcatcaccccagttgacccactggggcccagtacaggcagcagtagagggagtggggttgaaatgtctcttccagatccctcttgggacttctccccaccctctttcttagagacctcttcccccaagcttcctagctggagacccccaagatcaagaccacgctggggccaatccccacctccccagcagcgcagtgatggagaagaagaggaggaggtggccagcttcagtggccagattcttgccggggagcttgacaactgtgtgagcagtatcccggacttccccatgcatttggcctgccctgaggaggaagataaagcaacagcagcagagatggcagtgccagcagctggtgatgagagcatctcctccctgagtgagctggtgcgggccatgcacccatactgcctgcccaacctcacccacctggcatcacttgaggatgagcttcaggagcagccagatgatttgacactgcctgagggctgcgtagtgctggagattgtggggcaggcagccacagctggcgatgacctggagatcccagttgtggtgcgacaggtctctcctggaccccggcctgtgctcctggatgactcgctagagactagttctgccttgcagctgcttatgcctacactggagtcagagacagaggctgctgtgcccaaggtaaccctctgctctgagaaagaggggttgtcattgaactcagaggagaagctggactcagcctgcttattgaagcccagggaggtcgtggagccggtggtgcccaaggagcctcagaacccacctgccaatgcagcaccaggttcccagagagctcgaaagggcaggaagaagaagagcaaggagcagccagcagcctgtgtggaaggctatgccaggaggctgaggtcatcttctcgcgggcagtctactgtaggtacagaagtgacctctcaggtagacaacttgcagaaacagcctcaggaagaacttcaaaaagagtctgggcctctccagggtaaggggaagccccgggcttgggctcgggcctgggcagctgccttggagaattctagccctaagaacttggagagaagtgctggacaaagtagtcctgctaaagaaggccctctagacctctacccaaagctggctgacactatccaaaccaatcctataccaacccatctctcattggtcgactctgcccaagccagccccatgccagttgactctgttgaagctgatcccactgcagttggccctgttctagctggccctgtacctgttgaccctgggttggttgaccttgcttcaaccagctcagaactggttgagcctctcccggctgagccagtgctgatcaacccagtcctggctgactcagcagcagttgaccctgcagtggttcccatctcagataacttgccaccagttgatgctgtcccgtctggcccagcaccagttgatctagcactggttgaccctgttcctaatgacctgactccagttgacccagtgctagttaagtccagaccaactgatcccagacgtggtgcagtgtcatcagccctggggggttcagcaccccagctcctcgtggagtcagagtccttggacccaccaaagaccatcatccctgaagtcaaagaggttgtggattctctgaaaattgaaagtggtaccagtgctacaacccatgaagccagacctcggcctctcagcttatctgagtaccggcgacgaaggcagcaacgccaagcagaaacagaagagagaagtccacagcccccaactgggaagtggcctagccttccagagactcccacagggctggcagacatcccttgtcttgtcatcccaccagccccagccaagaagacagctctgcagagaagccctgaaacaccccttgagatttgccttgtgcctgtaggtcccagccctgcttctcctagtcctgagccacctgtaagcaaacctgtggcctcatctcccactgagcaggtgccatcccaggagatgccactgttggcgagaccttcccctcctgtgcagtctgtgtcccctgctgtgcccacacctccctcgatgtctgctgccctgcctttccctgcaggtgggcttggcatgccccccagtctgcccccacctcccttgcagcctcctagtcttccattgtctatggggccagtactacctgatccgtttactcactatgcccccttgccatcctggccttgttatcctcatgtgtccccttctggctatccttgcctgccccccccaccaacggtgcccctagtgtctggtactcctggtgcctatgccgtgcctcccacttgcagtgtgccttgggcaccccctcctgccccagtctcaccttacagttccacatgtacctatgggcccttgggatggggcccagggcctcaacatgctccattctggtctactgttcccccacctcctttgcctccagcctccattgggagagctgttccccaacctaaaatggagtctaggggcactccagctggccctcctgaaaatgtacttcccttgtcgatggctcctcccctcagtcttgggctacctggccatggagctcctcagacagagcctaccaaggtggaggtcaagccagtgcctgcatctccccatccgaaacacaaggtgtctgccctggtgcaaagtccccagatgaaggctctagcatgtgtgtctgctgaaggtgtgactgttgaggagcctgcatcagagaggctaaagcctgagacccaagagaccaggcccagggagaagccccccttgcctgctaccaaggctgttcccacaccaaggcagagcactgtccccaagctgcctgctgtccacccagcccgtctaaggaagctgtccttcctgcctaccccacgtactcagggttctgaagatgtggtacaggctttcatcagtgagattggaattgaggcatcggacctgtccagtctgctggagcagtttgagaaatcagaagccaaaaaggagtgtcctcctccggctcctgctgacagcttggctgtaggaaactcaggcggcgttgacattccccaggagaagaggcccctagaccggttacaagccccagaactggccaacgtggcagggctcacccctccagctacccctccccaccagttatggaagcccctggctgctgtctcactgctggccaaagccaaatctcctaagtccaccgcccaggagggaaccctgaagcctgaaggagttacggaggccaaacatccagctgcagttcgcctccaagaaggggtccatggccctagtcgagtccatgtgggctctggggaccatgactattgtgtccggagcaggacccccccaaaaaagatgcctgccctagtcattccagaggtgggctcccgatggaatgtcaagcgccatcaggacatcaccatcaaacctgtcttgtccttgggcccagctgcccctccgcccccatgcatagctgcctcccgggagccgcttgatcacaggactagcagtgagcaggcagatccctcagcaccctgccttgccccatccagcttgctgtcccctgaggcctcaccctgccggaatgacatgaacactaggactccccctgaaccctcagccaagcagcggtcaatgcgctgttaccgaaaagcctgcaggtcagccagcccctcaagccagggctggcagggccgccgaggccgcaacagccgttctgtcagctctgggtccaaccggactagcgaagcatcttcctcatcctcatcatcgtcttcctcatcccgatctcggtccaggtccctctcccccccacacaagaggtggcgaaggtccagctgtagttcctctggacgttctcgaagatgctcttcctcttcttcgtcatcatcttcctcttcgtcttcctcatcctcatcatccagttctcgaagccgctcacgatccccatccccccgccggagaagtgacaggaggcggcggtacagctcttatcgttcacatgaccattaccaaaggcaaagagtgctacaaaaggagcgtgcaatagaagaaagaagggtggtcttcattggaaagatacctggccgcatgactcgatcagagctgaaacagaggttctccgtttttggagagattgaggagtgcaccatccacttccgtgtccaaggggacaactacggcttcgtcacttatcgctatgctgaggaggcatttgcagccattgagagtggccacaagctgcggcaggcagatgagcagccctttgatctctgctttgggggccgaaggcagttctgcaagaggagctattctgatcttgactccaaccgggaagactttgacccagcacctgtaaagagcaaatttgattctcttgactttgacacattgttgaaacaggcccagaagaacctcaggaggtaaccttgggcccttccctgctatcctttttctcctttggaggtgcccaacctcctccacccccttcccctactctaggggagagagctgctagtgagatgactgttttataaagaaatggaaaaaagtgaaataaaaaatatgttgaatcagattttttaaaaggggtatttgtttttttataacaggtattgaaacaagttaacttgcattcctatgtaagataggaggggctgaggggatccccagtgtttggaacataagtcactatgcagactaataaacatcaactagagagaaaaaaaaaatgct

SEQ ID NO: 309444 - DNA, 3476 bp, Homo sapiens
ggggtgacacaagcagctccgaatcaggaatgctgtcaaatggagaaaggttctcagaatctgcattgtccaagatctccgtcagagccgtgagcagcgacacttcattctggtcctccagagataacttgccaccagttgatgctgtcccgtctggcccagcaccagttgatctagcactggttgaccctgttcctaatgacctgactccagttgacccagtgctagttaagtccagaccaactgatcccagacgtggtgcagtgtcatcagccctggggggttcagcaccccagctcctcgtggagtcagagtccttggacccaccaaagaccatcatccctgaagtcaaagaggttgtggattctctgaaaattgaaagtggtaccagtgctacaacccatgaagccagacctcggcctctcagcttatctgagtaccggcgacgaaggcagcaacgccaagcagaaacagaagagagaagtccacagcccccaactgggaagtggcctagccttccagagactcccacagggctggcagacatcccttgtcttgtcatcccaccagccccagccaagaagacagctctgcagagaagccctgaaacaccccttgagatttgccttgtgcctgtaggtcccagccctgcttctcctagtcctgagccacctgtaagcaaacctgtggcctcatctcccactgagcaggtgccatcccaggagatgccactgttggcgagaccttcccctcctgtgcagtctgtgtcccctgctgtgcccacacctccctcgatgtctgctgccctgcctttccctgcaggtgggcttggcatgccccccagtctgcccccacctcccttgcagcctcctagtcttccattgtctatggggccagtactacctgatccgtttactcactatgcccccttgccatcctggccttgttatcctcatgtgtccccttctggctatccttgcctgccccccccaccaacggtgcccctagtgtctggtactcctggtgcctatgccgtgcctcccacttgcagtgtgccttgggcaccccctcctgccccagtctcaccttacagttccacatgtacctatgggcccttgggatggggcccagggcctcaacatgctccattctggtctactgttcccccacctcctttgcctccagcctccattgggagagctgttccccaacctaaaatggagtctaggggcactccagctggccctcctgaaaatgtacttcccttgtcgatggctcctcccctcagtcttgggctacctggccatggagctcctcagacagagcctaccaaggtggaggtcaagccagtgcctgcatctccccatccgaaacacaaggtgtctgccctggtgcaaagtccccagatgaaggctctagcatgtgtgtctgctgaaggtgtgactgttgaggagcctgcatcagagaggctaaagcctgagacccaagagaccaggcccagggagaagccccccttgcctgctaccaaggctgttcccacaccaaggcagagcactgtccccaagctgcctgctgtccacccagcccgtctaaggaagctgtccttcctgcctaccccacgtactcagggttctgaagatgtggtacaggctttcatcagtgagattggaattgaggcatcggacctgtccagtctgctggagcagtttgagaaatcagaagccaaaaaggagtgtcctcctccggctcctgctgacagcttggctgtaggaaactcaggcggcgttgacattccccaggagaagaggcccctagaccggttacaagccccagaactggccaacgtggcagggctcacccctccagctacccctccccaccagttatggaagcccctggctgctgtctcactgctggccaaagccaaatctcctaagtccaccgcccaggagggaaccctgaagcctgaaggagttacggaggccaaacatccagctgcagttcgcctccaagaaggggtccatggccctagtcgagtccatgtgggctctggggaccatgactattgtgtccggagcaggacccccccaaaaaagatgcctgccctagtcattccagaggtgggctcccgatggaatgtcaagcgccatcaggacatcaccatcaaacctgtcttgtccttgggcccagctgcccctccgcccccatgcatagctgcctcccgggagccgcttgatcacaggactagcagtgagcaggcagatccctcagcaccctgccttgccccatccagcttgctgtcccctgaggcctcaccctgccggaatgacatgaacactaggactccccctgaaccctcagccaagcagcggtcaatgcgctgttaccgaaaagcctgcaggtcagccagcccctcaagccagggctggcagggccgccgaggccgcaacagccgttctgtcagctctgggtccaaccggactagcgaagcatcttcctcatcctcatcatcgtcttcctcatcccgatctcggtccaggtccctctcccccccacacaagaggtggcgaaggtccagctgtagttcctctggacgttctcgaagatgctcttcctcttcttcgtcatcatcttcctcttcgtcttcctcatcctcatcatccagttctcgaagccgctcacgatccccatccccccgccggagaagtgacaggaggcggcggtacagctcttatcgttcacatgaccattaccaaaggcaaagagtgctacaaaaggagcgtgcaatagaagaaagaagggtggtcttcattggaaagatacctggccgcatgactcgatcagagctgaaacagaggttctccgtttttggagagattgaggagtgcaccatccacttccgtgtccaaggggacaactacggcttcgtcacttatcgctatgctgaggaggcatttgcagccattgagagtggccacaagctgcggcaggcagatgagcagccctttgatctctgctttgggggccgaaggcagttctgcaagaggagctattctgatcttgactccaaccgggaagactttgacccagcacctgtaaagagcaaatttgattctcttgactttgacacattgttgaaacaggcccagaagaacctcaggaggtaaccttgggcccttccctgctatcctttttctcctttggaggtgcccaacctcctccacccccttcccctactctaggggagagagctgctagtgagatgactgttttataaagaaatggaaaaaagtgaaataaaaaatatgttgaatcagattttttaaaaggggtatttgtttttttataacaggtattgaaacaagttaacttgcattcctatgtaagataggaggggctgaggggatccccagtgtttggaacataagtcactatgcagactaataaacatcaactagagagaaaaaaaaaatgct

SEQ ID NO: 309445 - DNA, 5183 bp, Homo sapiens
gccagcgatcagagcagcgctgggtgttcaggggccaagatggcggcgcgccggggacggagagacggagtcgcgccgcccccgagtgggggccccggtccggaccctggcgggggagcccgcggcagtggttggggaagtcgaagccaagcgccgtatgggactttgggcgctgtgagcggcggcgagcaggtgctgctgcatgaggaggcgggtgattctggctttgtcagtctctctcggctgggcccatctctgagggacaaggacctggaaatggaggagctaatgctgcaggatgagacactgctggggaccatgcagagctacatggatgcctcccttatctccctcattgaggattttgggagccttggagagagcaggttatctctggaggaccagaatgaagtgtcgctgctcacggctctgacggagatcttggacaatgcagattctgagaacctttctccatttgacagcattcctgattcggagctgcttgtgtcaccccgggagggctcctctctgcacaagctgcttactctctctcggacacccccagaacgtgacctcatcaccccagttgacccactggggcccagtacaggcagcagtagagggagtggggttgaaatgtctcttccagatccctcttgggacttctccccaccctctttcttagagacctcttcccccaagcttcctagctggagacccccaagatcaagaccacgctggggccaatccccacctccccagcagcgcagtgatggagaagaagaggaggaggtggccagcttcagtggccagattcttgccggggagcttgacaactgtgtgagcagtatcccggacttccccatgcatttggcctgccctgaggaggaagataaagcaacagcagcagagatggcagtgccagcagctggtgatgagagcatctcctccctgagtgagctggtgcgggccatgcacccatactgcctgcccaacctcacccacctggcatcacttgaggatgagcttcaggagcagccagatgatttgacactgcctgagggctgcgtagtgctggagattgtggggcaggcagccacagctggcgatgacctggagatcccagttgtggtgcgacaggtctctcctggaccccggcctgtgctcctggatgactcgctagagactagttctgccttgcagctgcttatgcctacactggagtcagagacagaggctgctgtgcccaaggtaaccctctgctctgagaaagaggggttgtcattgaactcagaggagaagctggactcagcctgcttattgaagcccagggaggtcgtggagccggtggtgcccaaggagcctcagaacccacctgccaatgcagcaccaggttcccagagagctcgaaagggcaggaagaagaagagcaaggagcagccagcagcctgtgtggaaggctatgccaggaggctgaggtcatcttctcgcgggcagtctactgtaggtacagaagtgacctctcaggtagacaacttgcagaaacagcctcaggaagaacttcaaaaagagtctgggcctctccagggtaaggggaagccccgggcttgggctcgggcctgggcagctgccttggagaattctagccctaagaacttggagagaagtgctggacaaagtagtcctgctaaagaaggccctctagacctctacccaaagctggctgacactatccaaaccaatcctataccaacccatctctcattggtcgactctgcccaagccagccccatgccagttgactctgttgaagctgatcccactgcagttggccctgttctagctggccctgtacctgttgaccctgggttggttgaccttgcttcaaccagctcagaactggttgagcctctcccggctgagccagtgctgatcaacccagtcctggctgactcagcagcagttgaccctgcagtggttcccatctcagataacttgccaccagttgatgctgtcccgtctggcccagcaccagttgatctagcactggttgaccctgttcctaatgacctgactccagttgacccagtgctagttaagtccagaccaactgatcccagacgtggtgcagtgtcatcagccctggggggttcagcaccccagctcctcgtggagtcagagtccttggacccaccaaagaccatcatccctgaagtcaaagaggttgtggattctctgaaaattgaaagtggtaccagtgctacaacccatgaagccagacctcggcctctcagcttatctgagtaccggcgacgaaggcagcaacgccaagcagaaacagaagagagaagtccacagcccccaactgggaagtggcctagccttccagagactcccacagggctggcagacatcccttgtcttgtcatcccaccagccccagccaagaagacagctctgcagagaagccctgaaacaccccttgagatttgccttgtgcctgtaggtcccagccctgcttctcctagtcctgagccacctgtaagcaaacctgtggcctcatctcccactgagcaggtgccatcccaggagatgccactgttggcgagaccttcccctcctgtgcagtctgtgtcccctgctgtgcccacacctccctcgatgtctgctgccctgcctttccctgcaggtgggcttggcatgccccccagtctgcccccacctcccttgcagcctcctagtcttccattgtctatggggccagtactacctgatccgtttactcactatgcccccttgccatcctggccttgttatcctcatgtgtccccttctggctatccttgcctgccccccccaccaacggtgcccctagtgtctggtactcctggtgcctatgccgtgcctcccacttgcagtgtgccttgggcaccccctcctgccccagtctcaccttacagttccacatgtacctatgggcccttgggatggggcccagggcctcaacatgctccattctggtctactgttcccccacctcctttgcctccagcctccattgggagagctgttccccaacctaaaatggagtctaggggcactccagctggccctcctgaaaatgtacttcccttgtcgatggctcctcccctcagtcttgggctacctggccatggagctcctcagacagagcctaccaaggtggaggtcaagccagtgcctgcatctccccatccgaaacacaaggtgtctgccctggtgcaaagtccccagatgaaggctctagcatgtgtgtctgctgaaggtgtgactgttgaggagcctgcatcagagaggctaaagcctgagacccaagagaccaggcccagggagaagccccccttgcctgctaccaaggctgttcccacaccaaggcagagcactgtccccaagctgcctgctgtccacccagcccgtctaaggaagctgtccttcctgcctaccccacgtactcagggttctgaagatgtggtacaggctttcatcagtgagattggaattgaggcatcggacctgtccagtctgctggagcagtttgagaaatcagaagccaaaaaggagtgtcctcctccggctcctgctgacagcttggctgtaggaaactcaggcggcgttgacattccccaggagaagaggcccctagaccggttacaagccccagaactggccaacgtggcagggctcacccctccagctacccctccccaccagttatggaagcccctggctgctgtctcactgctggccaaagccaaatctcctaagtccaccgcccaggagggaaccctgaagcctgaaggagttacggaggccaaacatccagctgcagttcgcctccaagaaggggtccatggccctagtcgagtccatgtgggctctggggaccatgactattgtgtccggagcaggacccccccaaaaaagatgcctgccctagtcattccagaggtgggctcccgatggaatgtcaagcgccatcaggacatcaccatcaaacctgtcttgtccttgggcccagctgcccctccgcccccatgcatagctgcctcccgggagccgcttgatcacaggactagcagtgagcaggcagatccctcagcaccctgccttgccccatccagcttgctgtcccctgaggcctcaccctgccggaatgacatgaacactaggactccccctgaaccctcagccaagcagcggtcaatgcgctgttaccgaaaagcctgcaggtcagccagcccctcaagccagggctggcagggccgccgaggccgcaacagccgttctgtcagctctgggtccaaccggactagcgaagcatcttcctcatcctcatcatcgtcttcctcatcccgatctcggtccaggtccctctcccccccacacaagaggtggcgaaggtccagctgtagttcctctggacgttctcgaagatgctcttcctcttcttcgtcatcatcttcctcttcgtcttcctcatcctcatcatccagttctcgaagccgctcacgatccccatccccccgccggagaagtgacaggaggcggcggtacagctcttatcgttcacatgaccattaccaaaggcaaagagtgctacaaaaggagcgtgcaatagaagaaagaagggtggtcttcattggaaagatacctggccgcatgactcgatcagagctgaaacagaggttctccgtttttggagagattgaggagtgcaccatccacttccgtgtccaaggggacaactacggcttcgtcacttatcgctatgctgaggaggcatttgcagccattgagagtggccacaagctgcggcaggcagatgagcagccctttgatctctgctttgggggccgaaggcagttctgcaagaggagctattctgatcttgactccaaccgggaagactttgacccagcacctgtaaagagcaaatttgattctcttgactttgacacattgttgaaacaggcccagaagaacctcaggaggtaaccttgggcccttccctgctatcctttttctcctttggaggtgcccaacctcctccacccccttcccctactctaggggagagagctgctagtgagatgactgttttataaagaaatggaaaaaagtgaaataaaaaatatgttgaatca

SEQ ID NO: 309446 - DNA, 5211 bp, Homo sapiens
  misc_feature (5186)..(5186): n is a, c, g, or t
  misc_feature (5190)..(5190): n is a, c, g, or t
  misc_feature (5193)..(5193): n is a, c, g, or t
  misc_feature (5196)..(5196): n is a, c, g, or t
  misc_feature (5201)..(5201): n is a, c, g, or t
gccagcgatcagagcagcgctgggtgttcaggggccaagatggcggcgcgccggggacggagagacggagtcgcgccgcccccgagtgggggccccggtccggaccctggcgggggagcccgcggcagtggttggggaagtcgaagccaagcgccgtatgggactttgggcgctgtgagcggcggcgagcaggtgctgctgcatgaggaggcgggtgattctggctttgtcagtctctctcggctgggcccatctctgagggacaaggacctggaaatggaggagctaatgctgcaggatgagacactgctggggaccatgcagagctacatggatgcctcccttatctccctcattgaggattttgggagccttggagagagcaggttatctctggaggaccagaatgaagtgtcgctgctcacggctctgacggagatcttggacaatgcagattctgagaacctttctccatttgacagcattcctgattcggagctgcttgtgtcaccccgggagggctcctctctgcacaagctgcttactctctctcggacacccccagaacgtgacctcatcaccccagttgacccactggggcccagtacaggcagcagtagagggagtggggttgaaatgtctcttccagatccctcttgggacttctccccaccctctttcttagagacctcttcccccaagcttcctagctggagacccccaagatcaagaccacgctggggccaatccccacctccccagcagcgcagtgatggagaagaagaggaggaggtggccagcttcagtggccagattcttgccggggagcttgacaactgtgtgagcagtatcccggacttccccatgcatttggcctgccctgaggaggaagataaagcaacagcagcagagatggcagtgccagcagctggtgatgagagcatctcctccctgagtgagctggtgcgggccatgcacccatactgcctgcccaacctcacccacctggcatcacttgaggatgagcttcaggagcagccagatgatttgacactgcctgagggctgcgtagtgctggagattgtggggcaggcagccacagctggcgatgacctggagatcccagttgtggtgcgacaggtctctcctggaccccggcctgtgctcctggatgactcgctagagactagttctgccttgcagctgcttatgcctacactggagtcagagacagaggctgctgtgcccaaggtaaccctctgctctgagaaagaggggttgtcattgaactcagaggagaagctggactcagcctgcttattgaagcccagggaggtcgtggagccggtggtgcccaaggagcctcagaacccacctgccaatgcagcaccaggttcccagagagctcgaaagggcaggaagaagaagagcaaggagcagccagcagcctgtgtggaaggctatgccaggaggctgaggtcatcttctcgcgggcagtctactgtaggtacagaagtgacctctcaggtagacaacttgcagaaacagcctcaggaagaacttcaaaaagagtctgggcctctccagggtaaggggaagccccgggcttgggctcgggcctgggcagctgccttggagaattctagccctaagaacttggagagaagtgctggacaaagtagtcctgctaaagaaggccctctagacctctacccaaagctggctgacactatccaaaccaatcctataccaacccatctctcattggtcgactctgcccaagccagccccatgccagttgactctgttgaagctgatcccactgcagttggccctgttctagctggccctgtacctgttgaccctgggttggttgaccttgcttcaaccagctcagaactggttgagcctctcccggctgagccagtgctgatcaacccagtcctggctgactcagcagcagttgaccctgcagtggttcccatctcagataacttgccaccagttgatgctgtcccgtctggcccagcaccagttgatctagcactggttgaccctgttcctaatgacctgactccagttgacccagtgctagttaagtccagaccaactgatcccagacgtggtgcagtgtcatcagccctggggggttcagcaccccagctcctcgtggagtcagagtccttggacccaccaaagaccatcatccctgaagtcaaagaggttgtggattctctgaaaattgaaagtggtaccagtgctacaacccatgaagccagacctcggcctctcagcttatctgagtaccggcgacgaaggcagcaacgccaagcagaaacagaagagagaagtccacagcccccaactgggaagtggcctagccttccagagactcccacagggctggcagacatcccttgtcttgtcatcccaccagccccagccaagaagacagctctgcagagaagccctgaaacaccccttgagatttgccttgtgcctgtaggtcccagccctgcttctcctagtcctgagccacctgtaagcaaacctgtggcctcatctcccactgagcaggtgccatcccaggagatgccactgttggcgagaccttcccctcctgtgcagtctgtgtcccctgctgtgcccacacctccctcgatgtctgctgccctgcctttccctgcaggtgggcttggcatgccccccagtctgcccccacctcccttgcagcctcctagtcttccattgtctatggggccagtactacctgatccgtttactcactatgcccccttgccatcctggccttgttatcctcatgtgtccccttctggctatccttgcctgccccccccaccaacggtgcccctagtgtctggtactcctggtgcctatgccgtgcctcccacttgcagtgtgccttgggcaccccctcctgccccagtctcaccttacagttccacatgtacctatgggcccttgggatggggcccagggcctcaacatgctccattctggtctactgttcccccacctcctttgcctccagcctccattgggagagctgttccccaacctaaaatggagtctaggggcactccagctggccctcctgaaaatgtacttcccttgtcgatggctcctcccctcagtcttgggctacctggccatggagctcctcagacagagcctaccaaggtggaggtcaagccagtgcctgcatctccccatccgaaacacaaggtgtctgccctggtgcaaagtccccagatgaaggctctagcatgtgtgtctgctgaaggtgtgactgttgaggagcctgcatcagagaggctaaagcctgagacccaagagaccaggcccagggagaagccccccttgcctgctaccaaggctgttcccacaccaaggcagagcactgtccccaagctgcctgctgtccacccagcccgtctaaggaagctgtccttcctgcctaccccacgtactcagggttctgaagatgtggtacaggctttcatcagtgagattggaattgaggcatcggacctgtccagtctgctggagcagtttgagaaatcagaagccaaaaaggagtgtcctcctccggctcctgctgacagcttggctgtaggaaactcaggcggcgttgacattccccaggagaagaggcccctagaccggttacaagccccagaactggccaacgtggcagggctcacccctccagctacccctccccaccagttatggaagcccctggctgctgtctcactgctggccaaagccaaatctcctaagtccaccgcccaggagggaaccctgaagcctgaaggagttacggaggccaaacatccagctgcagttcgcctccaagaaggggtccatggccctagtcgagtccatgtgggctctggggaccatgactattgtgtccggagcaggacccccccaaaaaagatgcctgccctagtcattccagaggtgggctcccgatggaatgtcaagcgccatcaggacatcaccatcaaacctgtcttgtccttgggcccagctgcccctccgcccccatgcatagctgcctcccgggagccgcttgatcacaggactagcagtgagcaggcagatccctcagcaccctgccttgccccatccagcttgctgtcccctgaggcctcaccctgccggaatgacatgaacactaggactccccctgaaccctcagccaagcagcggtcaatgcgctgttaccgaaaagcctgcaggtcagccagcccctcaagccagggctggcagggccgccgaggccgcaacagccgttctgtcagctctgggtccaaccggactagcgaagcatcttcctcatcctcatcatcgtcttcctcatcccgatctcggtccaggtccctctcccccccacacaagaggtggcgaaggtccagctgtagttcctctggacgttctcgaagatgctcttcctcttcttcgtcatcatcttcctcttcgtcttcctcatcctcatcatccagttctcgaagccgctcacgatccccatccccccgccggagaagtgacaggaggcggcggtacagctcttatcgttcacatgaccattaccaaaggcaaagagtgctacaaaaggagcgtgcaatagaagaaagaagggtggtcttcattggaaagatacctggccgcatgactcgatcagagctgaaacagaggttctccgtttttggagagattgaggagtgcaccatccacttccgtgtccaaggggacaactacggcttcgtcacttatcgctatgctgaggaggcatttgcagccattgagagtggccacaagctgcggcaggcagatgagcagccctttgatctctgctttgggggccgaaggcagttctgcaagaggagctattctgatcttgactccaaccgggaagactttgacccagcacctgtaaagagcaaatttgattctcttgactttgacacattgttgaaacaggcccagaagaacctcaggaggtaaccttgggcccttccctgctatcctttttctcctttggaggtgcccaacctcctccacccccttcccctactctaggggagagagctgctagtgagatgactgttttataaagaaatggaaaaaagtgaaataaaaaatatgttgaatcaaanaaanaanaanacaanacacaagggg

SEQ ID NO: 309447 - DNA, 4333 bp, Homo sapiens
gccagcgatcagagcagcgctgggtgttcaggggccaagatggcggcgcgccggggacggagagacggagtcgcgccgcccccgagtgggggccccggtccggaccctggcgggggagcccgcggcagtggttggggaagtcgaagccaagcgccgtatgggactttgggcgctgtgagcggcggcgagcaggtgctgctgcatgaggaggcgggtgattctggctttgtcagtctctctcggctgggcccatctctgagggacaaggacctggaaatggaggagctaatgctgcaggatgagacactgctggggaccatgcagagctacatggatgcctcccttatctccctcattgaggattttgggagccttggagagagcaggttatctctggaggaccagaatgaagtgtcgctgctcacggctctgacggagatcttggacaatgcagattctgagaacctttctccatttgacagcattcctgattcggagctgcttgtgtcaccccgggagggctcctctctgcacaagctgcttactctctctcggacacccccagaacgtgacctcatcaccccagttgacccactggggcccagtacaggcagcagtagagggagtggggttgaaatgtctcttccagatccctcttgggacttctccccaccctctttcttagagacctcttcccccaagcttcctagctggagacccccaagatcaagaccacgctggggccaatccccacctccccagcagcgcagtgatggagaagaagaggaggaggtggccagcttcagtggccagattcttgccggggagcttgacaactgtgtgagcagtatcccggacttccccatgcatttggcctgccctgaggaggaagataaagcaacagcagcagagatggcagtgccagcagctggtgatgagagcatctcctccctgagtgagctggtgcgggccatgcacccatactgcctgcccaacctcacccacctggcatcacttgaggatgagcttcaggagcagccagatgatttgacactgcctgagggctgcgtagtgctggagattgtggggcaggcagccacagctggcgatgacctggagatcccagttgtggtgcgacaggtctctcctggaccccggcctgtgctcctggatgactcgctagagactagttctgccttgcagctgcttatgcctacactggagtcagagacagaggctgctgtgcccaaggtaaccctctgctctgagaaagaggggttgtcattgaactcagaggagaagctggactcagcctgcttattgaagcccagggaggtcgtggagccggtggtgcccaaggagcctcagaacccacctgccaatgcagcaccaggttcccagagagctcgaaagggcaggaagaagaagagcaaggagcagccagcagcctgtgtggaaggctatgccaggaggctgaggtcatcttctcgcgggcagtctactgtaggtacagaagtgacctctcaggtagacaacttgcagaaacagcctcaggaagaacttcaaaaagagtctgggcctctccagggtaaggggaagccccgggcttgggctcgggcctgggcagctgccttggagaattctagccctaagaacttggagagaagtgctggacaaagtagtcctgctaaagaaggccctctagacctctacccaaagctggctgacactatccaaaccaatcctataccaacccatctctcattggtcgactctgcccaagccagccccatgccagttgactctgttgaagctgatcccactgcagttggccctgttctagctggccctgtacctgttgaccctgggttggttgaccttgcttcaaccagctcagaactggttgagcctctcccggctgagccagtgctgatcaacccagtcctggctgactcagcagcagttgaccctgcagtggttcccatctcagataacttgccaccagttgatgctgtcccgtctggcccagcaccagttgatctagcactggttgaccctgttcctaatgacctgactccagttgacccagtgctagttaagtccagaccaactgatcccagacgtggtgcagtgtcatcagccctggggggttcagcaccccagctcctcgtggagtcagagtccttggacccaccaaagaccatcatccctgaagtcaaagaggttgtggattctctgaaaattgaaagtggtaccagtgctacaacccatgaagccagacctcggcctctcagcttatctgagtaccggcgacgaaggcagcaacgccaagcagaaacagaagagagaagtccacagcccccaactgggaagtggcctagccttccagagactcccacagggctggcagacatcccttgtcttgtcatcccaccagccccagccaagaagacagctctgcagagaagccctgaaacaccccttgagatttgccttgtgcctgtaggtcccagccctgcttctcctagtcctgagccacctgtaagcaaacctgtggcctcatctcccactgagcaggtgccatcccaggagatgccactgttggcgagaccttcccctcctgtgcagtctgtgtcccctgctgtgcccacacctccctcgatgtctgctgccctgcctttccctgcaggtgggcttggcatgccccccagtctgcccccacctcccttgcagcctcctagtcttccattgtctatggggccagtactacctgatccgtttactcactatgcccccttgccatcctggccttgttatcctcatgtgtccccttctggctatccttgcctgccccccccaccaacggtgcccctagtgtctggtactcctggtgcctatgccgtgcctcccacttgcagtgtgccttgggcaccccctcctgccccagtctcaccttacagttccacatgtacctatgggcccttgggatggggcccagggcctcaacatgctccattctggtctactgttcccccacctcctttgcctccagcctccattgggagagctgttccccaacctaaaatggagtctaggggcactccagctggccctcctgaaaatgtacttcccttgtcgatggctcctcccctcagtcttgggctacctggccatggagctcctcagacagagcctaccaaggtggaggtcaagccagtgcctgcatctccccatccgaaacacaaggtgtctgccctggtgcaaagtccccagatgaaggctctagcatgtgtgtctgctgaaggtgtgactgttgaggagcctgcatcagagaggctaaagcctgagacccaagagaccaggcccagggagaagccccccttgcctgctaccaaggctgttcccacaccaaggcagagcactgtccccaagctgcctgctgtccacccagcccgtctaaggaagctgtccttcctgcctaccccacgtactcagggttctgaagatgtggtacaggctttcatcagtgagattggaattgaggcatcggacctgtccagtctgctggagcagtttgagaaatcagaaggtccagctgtagttcctctggacgttctcgaagatgctcttcctcttcttcgtcatcatcttcctcttcgtcttcctcatcctcatcatccagttctcgaagccgctcacgatccccatccccccgccggagaagtgacaggaggcggcggtacagctcttatcgttcacatgaccattaccaaaggcaaagagtgctacaaaaggagcgtgcaatagaagaaagaagggtggtcttcattggaaagatacctggccgcatgactcgatcagagctgaaacagaggttctccgtttttggagagattgaggagtgcaccatccacttccgtgtccaaggggacaactacggcttcgtcacttatcgctatgctgaggaggcatttgcagccattgagagtggccacaagctgcggcaggcagatgagcagccctttgatctctgctttgggggccgaaggcagttctgcaagaggagctattctgatcttgactccaaccgggaagactttgacccagcacctgtaaagagcaaatttgattctcttgactttgacacattgttgaaacaggcccagaagaacctcaggaggtaaccttgggcccttccctgctatcctttttctcctttggaggtgcccaacctcctccacccccttcccctactctaggggagagagctgctagtgagatgactgttttataaagaaatggaaaaaagtgaaataaaaaatatgttgaatca

SEQ ID NO: 309448 - DNA, 4551 bp, Homo sapiens
gccagcgatcagagcagcgctgggtgttcaggggccaagatggcggcgcgccggggacggagagacggagtcgcgccgcccccgagtgggggccccggtccggaccctggcgggggagcccgcggcagtggttggggaagtcgaagccaagcgccgtatgggactttgggcgctgtgagcggcggcgagcaggtgctgctgcatgaggaggcgggtgattctggctttgtcagtctctctcggctgggcccatctctgagggacaaggacctggaaatggaggagctaatgctgcaggatgagacactgctggggaccatgcagagctacatggatgcctcccttatctccctcattgaggattttgggagccttggagagagcaggttatctctggaggaccagaatgaagtgtcgctgctcacggctctgacggagatcttggacaatgcagattctgagaacctttctccatttgacagcattcctgattcggagctgcttgtgtcaccccgggagggctcctctctgcacaagctgcttactctctctcggacacccccagaacgtgacctcatcaccccagttgacccactggggcccagtacaggcagcagtagagggagtggggttgaaatgtctcttccagatccctcttgggacttctccccaccctctttcttagagacctcttcccccaagcttcctagctggagacccccaagatcaagaccacgctggggccaatccccacctccccagcagcgcagtgatggagaagaagaggaggaggtggccagcttcagtggccagattcttgccggggagcttgacaactgtgtgagcagtatcccggacttccccatgcatttggcctgccctgaggaggaagataaagcaacagcagcagagatggcagtgccagcagctggtgatgagagcatctcctccctgagtgagctggtgcgggccatgcacccatactgcctgcccaacctcacccacctggcatcacttgaggatgagcttcaggagcagccagatgatttgacactgcctgagggctgcgtagtgctggagattgtggggcaggcagccacagctggcgatgacctggagatcccagttgtggtgcgacaggtctctcctggaccccggcctgtgctcctggatgactcgctagagactagttctgccttgcagctgcttatgcctacactggagtcagagacagaggctgctgtgcccaaggtaaccctctgctctgagaaagaggggttgtcattgaactcagaggagaagctggactcagcctgcttattgaagcccagggaggtcgtggagccggtggtgcccaaggagcctcagaacccacctgccaatgcagcaccaggttcccagagagctcgaaagggcaggaagaagaagagcaaggagcagccagcagcctgtgtggaaggctatgccaggaggctgaggtcatcttctcgcgggcagtctactgtaggtacagaagtgacctctcaggtagacaacttgcagaaacagcctcaggaagaacttcaaaaagagtctgggcctctccagggtaaggggaagccccgggcttgggctcgggcctgggcagctgccttggagaattctagccctaagaacttggagagaagtgctggacaaagtagtcctgctaaagaaggccctctagacctctacccaaagctggctgacactatccaaaccaatcctataccaacccatctctcattggtcgactctgcccaagccagccccatgccagttgactctgttgaagctgatcccactgcagttggccctgttctagctggccctgtacctgttgaccctgggttggttgaccttgcttcaaccagctcagaactggttgagcctctcccggctgagccagtgctgatcaacccagtcctggctgactcagcagcagttgaccctgcagtggttcccatctcagataacttgccaccagttgatgctgtcccgtctggcccagcaccagttgatctagcactggttgaccctgttcctaatgacctgactccagttgacccagtgctagttaagtccagaccaactgatcccagacgtggtgcagtgtcatcagccctggggggttcagcaccccagctcctcgtggagtcagagtccttggacccaccaaagaccatcatccctgaagtcaaagaggttgtggattctctgaaaattgaaagtggtaccagtgctacaacccatgaagccagacctcggcctctcagcttatctgagtaccggcgacgaaggcagcaacgccaagcagaaacagaagagagaagtccacagcccccaactgggaagtggcctagccttccagagactcccacagggctggcagacatcccttgtcttgtcatcccaccagccccagccaagaagacagctctgcagagaagccctgaaacaccccttgagatttgccttgtgcctgtaggtcccagccctgcttctcctagtcctgagccacctgtaagcaaacctgtggcctcatctcccactgagcaggtgccatcccaggagatgccactgttggcgagaccttcccctcctgtgcagtctgtgtcccctgctgtgcccacacctccctcgatgtctgctgccctgcctttccctgcaggtgggcttggcatgccccccagtctgcccccacctcccttgcagcctcctagtcttccattgtctatggggccagtactacctgatccgtttactcactatgcccccttgccatcctggccttgttatcctcatgtgtccccttctggctatccttgcctgccccccccaccaacggtgcccctagtgtctggtactcctggtgcctatgccgtgcctcccacttgcagtgtgccttgggcaccccctcctgccccagtctcaccttacagttccacatgtacctatgggcccttgggatggggcccagggcctcaacatgctccattctggtctactgttcccccacctcctttgcctccagcctccattgggagagctgttccccaacctaaaatggagtctaggggcactccagctggccctcctgaaaatgtacttcccttgtcgatggctcctcccctcagtcttgggctacctggccatggagctcctcagacagagcctaccaaggtggaggtcaagccagtgcctgcatctccccatccgaaacacaaggtgtctgccctggtgcaaagtccccagatgaaggctctagcatgtgtgtctgctgaaggtgtgactgttgaggagcctgcatcagagaggctaaagcctgagacccaagagaccaggcccagggagaagccccccttgcctgctaccaaggctgttcccacaccaaggcagagcactgtccccaagctgcctgctgtccacccagcccgtctaaggaagctgtccttcctgcctaccccacgtactcagggttctgaagatgtggtacaggctttcatcagtgagattggaattgaggcatcggacctgtccagtctgctggagcagtttgagaaatcagaagccaaaaaggagtgtcctcctccggctcctgctgacagcttggctgtaggaaactcagggtccagctgtagttcctctggacgttctcgaagatgctcttcctcttcttcgtcatcatcttcctcttcgtcttcctcatcctcatcatccagttctcgaagccgctcacgatccccatccccccgccggagaagtgacaggaggcggcggtacagctcttatcgttcacatgaccattaccaaaggcaaagagtgctacaaaaggagcgtgcaatagaagaaagaagggtggtcttcattggaaagatacctggccgcatgactcgatcagagctgaaacagaggttctccgtttttggagagattgaggagtgcaccatccacttccgtgtccaaggggacaactacggcttcgtcacttatcgctatgctgaggaggcatttgcagccattgagagtggccacaagctgcggcaggcagatgagcagccctttgatctctgctttgggggccgaaggcagttctgcaagaggagctattctgatcttgactccaaccgggaagactttgacccagcacctgtaaagagcaaatttgattctcttgactttgacacattgttgaaacaggcccagaagaacctcaggaggtaaccttgggcccttccctgctatcctttttctcctttggaggtgcccaacctcctccacccccttcccctactctaggggagagagctgctagtgagatgactgttttataaagaaatggaaaaaagtgaaataaaaaatatgttgaatcagattttttaaaaggggtatttgtttttttataacaggtattgaaacaagttaacttgcattcctatgtaagataggaggggctgaggggatccccagtgtttggaacataagtcactatgcagactaataaacatcaactagagagaaaaaaaaaatgct

SEQ ID NO: 309449 - DNA, 5329 bp, Homo sapiens
gccagcgatcagagcagcgctgggtgttcaggggccaagatggcggcgcgccggggacggagagacggagtcgcgccgcccccgagtgggggccccggtccggaccctggcgggggagcccgcggcagtggttggggaagtcgaagccaagcgccgtatgggactttgggcgctgtgagcggcggcgagcaggtgctgctgcatgaggaggcgggtgattctggctttgtcagtctctctcggctgggcccatctctgagggacaaggacctggaaatggaggagctaatgctgcaggatgagacactgctggggaccatgcagagctacatggatgcctcccttatctccctcattgaggattttgggagccttggagagagcaggttatctctggaggaccagaatgaagtgtcgctgctcacggctctgacggagatcttggacaatgcagattctgagaacctttctccatttgacagcattcctgattcggagctgcttgtgtcaccccgggagggctcctctctgcacaagctgcttactctctctcggacacccccagaacgtgacctcatcaccccagttgacccactggggcccagtacaggcagcagtagagggagtggggttgaaatgtctcttccagatccctcttgggacttctccccaccctctttcttagagacctcttcccccaagcttcctagctggagacccccaagatcaagaccacgctggggccaatccccacctccccagcagcgcagtgatggagaagaagaggaggaggtggccagcttcagtggccagattcttgccggggagcttgacaactgtgtgagcagtatcccggacttccccatgcatttggcctgccctgaggaggaagataaagcaacagcagcagagatggcagtgccagcagctggtgatgagagcatctcctccctgagtgagctggtgcgggccatgcacccatactgcctgcccaacctcacccacctggcatcacttgaggatgagcttcaggagcagccagatgatttgacactgcctgagggctgcgtagtgctggagattgtggggcaggcagccacagctggcgatgacctggagatcccagttgtggtgcgacaggtctctcctggaccccggcctgtgctcctggatgactcgctagagactagttctgccttgcagctgcttatgcctacactggagtcagagacagaggctgctgtgcccaaggtaaccctctgctctgagaaagaggggttgtcattgaactcagaggagaagctggactcagcctgcttattgaagcccagggaggtcgtggagccggtggtgcccaaggagcctcagaacccacctgccaatgcagcaccaggttcccagagagctcgaaagggcaggaagaagaagagcaaggagcagccagcagcctgtgtggaaggctatgccaggaggctgaggtcatcttctcgcgggcagtctactgtaggtacagaagtgacctctcaggtagacaacttgcagaaacagcctcaggaagaacttcaaaaagagtctgggcctctccagggtaaggggaagccccgggcttgggctcgggcctgggcagctgccttggagaattctagccctaagaacttggagagaagtgctggacaaagtagtcctgctaaagaaggccctctagacctctacccaaagctggctgacactatccaaaccaatcctataccaacccatctctcattggtcgactctgcccaagccagccccatgccagttgactctgttgaagctgatcccactgcagttggccctgttctagctggccctgtacctgttgaccctgggttggttgaccttgcttcaaccagctcagaactggttgagcctctcccggctgagccagtgctgatcaacccagtcctggctgactcagcagcagttgaccctgcagtggttcccatctcagataacttgccaccagttgatgctgtcccgtctggcccagcaccagttgatctagcactggttgaccctgttcctaatgacctgactccagttgacccagtgctagttaagtccagaccaactgatcccagacgtggtgcagtgtcatcagccctggggggttcagcaccccagctcctcgtggagtcagagtccttggacccaccaaagaccatcatccctgaagtcaaagaggttgtggattctctgaaaattgaaagtggtaccagtgctacaacccatgaagccagacctcggcctctcagcttatctgagtaccggcgacgaaggcagcaacgccaagcagaaacagaagagagaagtccacagcccccaactgggaagtggcctagccttccagagactcccacagggctggcagacatcccttgtcttgtcatcccaccagccccagccaagaagacagctctgcagagaagccctgaaacaccccttgagatttgccttgtgcctgtaggtcccagccctgcttctcctagtcctgagccacctgtaagcaaacctgtggcctcatctcccactgagcaggtgccatcccaggagatgccactgttggcgagaccttcccctcctgtgcagtctgtgtcccctgctgtgcccacacctccctcgatgtctgctgccctgcctttccctgcaggtgggcttggcatgccccccagtctgcccccacctcccttgcagcctcctagtcttccattgtctatggggccagtactacctgatccgtttactcactatgcccccttgccatcctggccttgttatcctcatgtgtccccttctggctatccttgcctgccccccccaccaacggtgcccctagtgtctggtactcctggtgcctatgccgtgcctcccacttgcagtgtgccttgggcaccccctcctgccccagtctcaccttacagttccacatgtacctatgggcccttgggatggggcccagggcctcaacatgctccattctggtctactgttcccccacctcctttgcctccagcctccattgggagagctgttccccaacctaaaatggagtctaggggcactccagctggccctcctgaaaatgtacttcccttgtcgatggctcctcccctcagtcttgggctacctggccatggagctcctcagacagagcctaccaaggtggaggtcaagccagtgcctgcatctccccatccgaaacacaaggtgtctgccctggtgcaaagtccccagatgaaggctctagcatgtgtgtctgctgaaggtgtgactgttgaggagcctgcatcagagaggctaaagcctgagacccaagagaccaggcccagggagaagccccccttgcctgctaccaaggctgttcccacaccaaggcagagcactgtccccaagctgcctgctgtccacccagcccgtctaaggaagctgtccttcctgcctaccccacgtactcagggttctgaagatgtggtacaggctttcatcagtgagattggaattgaggcatcggacctgtccagtctgctggagcagtttgagaaatcagaagccaaaaaggagtgtcctcctccggctcctgctgacagcttggctgtaggaaactcaggcggcgttgacattccccaggagaagaggcccctagaccggttacaagccccagaactggccaacgtggcagggctcacccctccagctacccctccccaccagttatggaagcccctggctgctgtctcactgctggccaaagccaaatctcctaagtccaccgcccaggagggaaccctgaagcctgaaggagttacggaggccaaacatccagctgcagttcgcctccaagaaggggtccatggccctagtcgagtccatgtgggctctggggaccatgactattgtgtccggagcaggacccccccaaaaaagatgcctgccctagtcattccagaggtgggctcccgatggaatgtcaagcgccatcaggacatcaccatcaaacctgtcttgtccttgggcccagctgcccctccgcccccatgcatagctgcctcccgggagccgcttgatcacaggactagcagtgagcaggcagatccctcagcaccctgccttgccccatccagcttgctgtcccctgaggcctcaccctgccggaatgacatgaacactaggactccccctgaaccctcagccaagcagcggtcaatgcgctgttaccgaaaagcctgcaggtcagccagcccctcaagccagggctggcagggccgccgaggccgcaacagccgttctgtcagctctgggtccaaccggactagcgaagcatcttcctcatcctcatcatcgtcttcctcatcccgatctcggtccaggtccctctcccccccacacaagaggtggcgaaggtccagctgtagttcctctggacgttctcgaagatgctcttcctcttcttcgtcatcatcttcctcttcgtcttcctcatcctcatcatccagttctcgaagccgctcacgatccccatccccccgccggagaagtgacaggaggcggcggtacagctcttatcgttcacatgaccattaccaaaggcaaagagtgctacaaaaggagcgtgcaatagaagaaagaagggtggtcttcattggaaagatacctggccgcatgactcgatcagagctgaaacagaggttctccgtttttggagagattgaggagtgcaccatccacttccgtgtccaaggggacaactacggcttcgtcacttatcgctatgctgaggaggcatttgcagccattgagagtggccacaagctgcggcaggcagatgagcagccctttgatctctgctttgggggccgaaggcagttctgcaagaggagctattctgatcttggtgagtggagggagggcctaaagctttggaatgcttcatcccctccccagaagggttcctaaccctttgtgagtggggctaggcagacttaccttagtttgacatacaaagaacccaagggggctgggcatggtggctcacgcctgtaatcccagcactttgggaggctgaggcaggcaaatcacgaggtcaggagttcgagaccagcctggccaacatgatgaaaccccatctctaccaaaaatagaaaaaattagctagaggtggtggcacgcacctgtaatcccagctactcgggaagctgaggcaggagaattgcttgaacccaggaggcggaggttgcagtgagctgacatcacaacactgcactccagcctgggctacagaacgagactgtct

SEQ ID NO: 309450 - DNA, 5020 bp, Homo sapiens
gccagcgatcagagcagcgctgggtgttcaggggccaagatggcggcgcgccggggacggagagacggagtcgcgccgcccccgagtgggggccccggtccggaccctggcgggggagcccgcggcagtggttggggaagtcgaagccaagcgccgtatgggactttgggcgctgtgagcggcggcgagcaggtgctgctgcatgaggaggcgggtgattctggctttgtcagtctctctcggctgggcccatctctgagggacaaggacctggaaatggaggagctaatgctgcaggatgagacactgctggggaccatgcagagctacatggatgcctcccttatctccctcattgaggattttgggagccttggagagagcaggttatctctggaggaccagaatgaagtgtcgctgctcacggctctgacggagatcttggacaatgcagattctgagaacctttctccatttgacagcattcctgattcggagctgcttgtgtcaccccgggagggctcctctctgcacaagctgcttactctctctcggacacccccagaacgtgacctcatcaccccagttgacccactggggcccagtacaggcagcagtagagggagtggggttgaaatgtctcttccagatccctcttgggacttctccccaccctctttcttagagacctcttcccccaagcttcctagctggagacccccaagatcaagaccacgctggggccaatccccacctccccagcagcgcagtgatggagaagaagaggaggaggtggccagcttcagtggccagattcttgccggggagcttgacaactgtgtgagcagtatcccggacttccccatgcatttggcctgccctgaggaggaagataaagcaacagcagcagagatggcagtgccagcagctggtgatgagagcatctcctccctgagtgagctggtgcgggccatgcacccatactgcctgcccaacctcacccacctggcatcacttgaggatgagcttcaggagcagccagatgatttgacactgcctgagggctgcgtagtgctggagattgtggggcaggcagccacagctggcgatgacctggagatcccagttgtggtgcgacaggtctctcctggaccccggcctgtgctcctggatgactcgctagagactagttctgccttgcagctgcttatgcctacactggagtcagagacagaggctgctgtgcccaaggtaaccctctgctctgagaaagaggggttgtcattgaactcagaggagaagctggactcagcctgcttattgaagcccagggaggtcgtggagccggtggtgcccaaggagcctcagaacccacctgccaatgcagcaccaggttcccagagagctcgaaagggcaggaagaagaagagcaaggagcagccagcagcctgtgtggaaggctatgccaggaggctgaggtcatcttctcgcgggcagtctactgtaggtacagaagtgacctctcaggtagacaacttgcagaaacagcctcaggaagaacttcaaaaagagtctgggcctctccagggtaaggggaagccccgggcttgggctcgggcctgggcagctgccttggagaattctagccctaagaacttggagagaagtgctggacaaagtagtcctgctaaagaaggccctctagacctctacccaaagctggctgacactatccaaaccaatcctataccaacccatctctcattggtcgactctgcccaagccagccccatgccagttgactctgttgaagctgatcccactgcagttggccctgttctagctggccctgtacctgttgaccctgggttggttgaccttgcttcaaccagctcagaactggttgagcctctcccggctgagccagtgctgatcaacccagtcctggctgactcagcagcagttgaccctgcagtggttcccatctcagataacttgccaccagttgatgctgtcccgtctggcccagcaccagttgatctagcactggttgaccctgttcctaatgacctgactccagttgacccagtgctagttaagtccagaccaactgatcccagacgtggtgcagtgtcatcagccctggggggttcagcaccccagctcctcgtggagtcagagtccttggacccaccaaagaccatcatccctgaagtcaaagaggttgtggattctctgaaaattgaaagtggtaccagtgctacaacccatgaagccagacctcggcctctcagcttatctgagtaccggcgacgaaggcagcaacgccaagcagaaacagaagagagaagtccacagcccccaactgggaagtggcctagccttccagagactcccacagggctggcagacatcccttgtcttgtcatcccaccagccccagccaagaagacagctctgcagagaagccctgaaacaccccttgagatttgccttgtgcctgtaggtcccagccctgcttctcctagtcctgagccacctgtaagcaaacctgtggcctcatctcccactgagcaggtgccatcccaggagatgccactgttggcgagaccttcccctcctgtgcagtctgtgtcccctgctgtgcccacacctccctcgatgtctgctgccctgcctttccctgcaggtgggcttggcatgccccccagtctgcccccacctcccttgcagcctcctagtcttccattgtctatggggccagtactacctgatccgtttactcactatgcccccttgccatcctggccttgttatcctcatgtgtccccttctggctatccttgcctgccccccccaccaacggtgcccctagtgtctggtactcctggtgcctatgccgtgcctcccacttgcagtgtgccttgggcaccccctcctgccccagtctcaccttacagttccacatgtacctatgggcccttgggatggggcccagggcctcaacatgctccattctggtctactgttcccccacctcctttgcctccagcctccattgggagagctgttccccaacctaaaatggagtctaggggcactccagctggccctcctgaaaatgtacttcccttgtcgatggctcctcccctcagtcttgggctacctggccatggagctcctcagacagagcctaccaaggtggaggtcaagccagtgcctgcatctccccatccgaaacacaaggtgtctgccctggtgcaaagtccccagatgaaggctctagcatgtgtgtctgctgaaggtgtgactgttgaggagcctgcatcagagaggctaaagcctgagacccaagagaccaggcccagggagaagccccccttgcctgctaccaaggctgttcccacaccaaggcagagcactgtccccaagctgcctgctgtccacccagcccgtctaaggaagctgtccttcctgcctaccccacgtactcagggttctgaagatgtggtacaggctttcatcagtgagattggaattgaggcatcggacctgtccagtctgctggagcagtttgagaaatcagaagccaaaaaggagtgtcctcctccggctcctgctgacagcttggctgtaggaaactcaggcggcgttgacattccccaggagaagaggcccctagaccggttacaagccccagaactggccaacgtggcagggctcacccctccagctacccctccccaccagttatggaagcccctggctgctgtctcactgctggccaaagccaaatctcctaagtccaccgcccaggagggaaccctgaagcctgaaggagttacggaggccaaacatccagctgcagttcgcctccaagaaggggtccatggccctagtcgagtccatgtgggctctggggaccatgactattgtgtccggagcaggacccccccaaaaaagatgcctgccctagtcattccagaggtgggctcccgatggaatgtcaagcgccatcaggacatcaccatcaaacctgtcttgtccttgggcccagctgcccctccgcccccatgcatagctgcctcccgggagccgcttgatcacaggactagcagtgagcaggcagatccctcagcaccctgccttgccccatccagcttgctgtcccctgaggcctcaccctgccggaatgacatgaacactaggactccccctgaaccctcagccaagcagcggtcaatgcgctgttaccgaaaagcctgcaggtcagccagcccctcaagccagggctggcagggccgccgaggccgcaacagccgttctgtcagctctgggtccaaccggactagcgaagcatcttcctcatcctcatcatcgtcttcctcatcccgatctcggtccaggtccctctcccccccacacaagaggtggcgaaggtccagctgtagttcctctggacgttctcgaagatgctcttcctcttcttcgtcatcatcttcctcttcgtcttcctcatcctcatcatccagttctcgaagccgctcacgatccccatccccccgccggagaagtgacaggaggcggcggtacagctcttatcgttcacatgaccattaccaaaggcaaagagtgctacaaaaggagcgtgcaatagaagaaagaagggtggtcttcattggaaagatacctggccgcatgactcgatcagagctgaaacagaggttctccgtttttggagagattgaggagtgcaccatccacttccgtgtccaaggggacaactacggcttcgtcacttatcgctatgctgaggaggcatttgcagccattgagagtggccacaagctgcggcaggcagatgagcagccctttgatctctgctttgggggccgaaggcagttctgcaagaggagctattctgatcttgacgtgcgatcgcggcaatactctatctctgcacctatcggagaacctatgtgatctgtctctgatcgagatcactagcggctgaggtatg

SEQ ID NO: 309451 - DNA, 5040 bp, Homo sapiens
gccagcgatcagagcagcgctgggtgttcaggggccaagatggcggcgcgccggggacggagagacggagtcgcgccgcccccgagtgggggccccggtccggaccctggcgggggagcccgcggcagtggttggggaagtcgaagccaagcgccgtatgggactttgggcgctgtgagcggcggcgagcaggtgctgctgcatgaggaggcgggtgattctggctttgtcagtctctctcggctgggcccatctctgagggacaaggacctggaaatggaggagctaatgctgcaggatgagacactgctggggaccatgcagagctacatggatgcctcccttatctccctcattgaggattttgggagccttggagagagcaggttatctctggaggaccagaatgaagtgtcgctgctcacggctctgacggagatcttggacaatgcagattctgagaacctttctccatttgacagcattcctgattcggagctgcttgtgtcaccccgggagggctcctctctgcacaagctgcttactctctctcggacacccccagaacgtgacctcatcaccccagttgacccactggggcccagtacaggcagcagtagagggagtggggttgaaatgtctcttccagatccctcttgggacttctccccaccctctttcttagagacctcttcccccaagcttcctagctggagacccccaagatcaagaccacgctggggccaatccccacctccccagcagcgcagtgatggagaagaagaggaggaggtggccagcttcagtggccagattcttgccggggagcttgacaactgtgtgagcagtatcccggacttccccatgcatttggcctgccctgaggaggaagataaagcaacagcagcagagatggcagtgccagcagctggtgatgagagcatctcctccctgagtgagctggtgcgggccatgcacccatactgcctgcccaacctcacccacctggcatcacttgaggatgagcttcaggagcagccagatgatttgacactgcctgagggctgcgtagtgctggagattgtggggcaggcagccacagctggcgatgacctggagatcccagttgtggtgcgacaggtctctcctggaccccggcctgtgctcctggatgactcgctagagactagttctgccttgcagctgcttatgcctacactggagtcagagacagaggctgctgtgcccaaggtaaccctctgctctgagaaagaggggttgtcattgaactcagaggagaagctggactcagcctgcttattgaagcccagggaggtcgtggagccggtggtgcccaaggagcctcagaacccacctgccaatgcagcaccaggttcccagagagctcgaaagggcaggaagaagaagagcaaggagcagccagcagcctgtgtggaaggctatgccaggaggctgaggtcatcttctcgcgggcagtctactgtaggtacagaagtgacctctcaggtagacaacttgcagaaacagcctcaggaagaacttcaaaaagagtctgggcctctccagggtaaggggaagccccgggcttgggctcgggcctgggcagctgccttggagaattctagccctaagaacttggagagaagtgctggacaaagtagtcctgctaaagaaggccctctagacctctacccaaagctggctgacactatccaaaccaatcctataccaacccatctctcattggtcgactctgcccaagccagccccatgccagttgactctgttgaagctgatcccactgcagttggccctgttctagctggccctgtacctgttgaccctgggttggttgaccttgcttcaaccagctcagaactggttgagcctctcccggctgagccagtgctgatcaacccagtcctggctgactcagcagcagttgaccctgcagtggttcccatctcagataacttgccaccagttgatgctgtcccgtctggcccagcaccagttgatctagcactggttgaccctgttcctaatgacctgactccagttgacccagtgctagttaagtccagaccaactgatcccagacgtggtgcagtgtcatcagccctggggggttcagcaccccagctcctcgtggagtcagagtccttggacccaccaaagaccatcatccctgaagtcaaagaggttgtggattctctgaaaattgaaagtggtaccagtgctacaacccatgaagccagacctcggcctctcagcttatctgagtaccggcgacgaaggcagcaacgccaagcagaaacagaagagagaagtccacagcccccaactgggaagtggcctagccttccagagactcccacagggctggcagacatcccttgtcttgtcatcccaccagccccagccaagaagacagctctgcagagaagccctgaaacaccccttgagatttgccttgtgcctgtaggtcccagccctgcttctcctagtcctgagccacctgtaagcaaacctgtggcctcatctcccactgagcaggtgccatcccaggagatgccactgttggcgagaccttcccctcctgtgcagtctgtgtcccctgctgtgcccacacctccctcgatgtctgctgccctgcctttccctgcaggtgggcttggcatgccccccagtctgcccccacctcccttgcagcctcctagtcttccattgtctatggggccagtactacctgatccgtttactcactatgcccccttgccatcctggccttgttatcctcatgtgtccccttctggctatccttgcctgccccccccaccaacggtgcccctagtgtctggtactcctggtgcctatgccgtgcctcccacttgcagtgtgccttgggcaccccctcctgccccagtctcaccttacagttccacatgtacctatgggcccttgggatggggcccagggcctcaacatgctccattctggtctactgttcccccacctcctttgcctccagcctccattgggagagctgttccccaacctaaaatggagtctaggggcactccagctggccctcctgaaaatgtacttcccttgtcgatggctcctcccctcagtcttgggctacctggccatggagctcctcagacagagcctaccaaggtggaggtcaagccagtgcctgcatctccccatccgaaacacaaggtgtctgccctggtgcaaagtccccagatgaaggctctagcatgtgtgtctgctgaaggtgtgactgttgaggagcctgcatcagagaggctaaagcctgagacccaagagaccaggcccagggagaagccccccttgcctgctaccaaggctgttcccacaccaaggcagagcactgtccccaagctgcctgctgtccacccagcccgtctaaggaagctgtccttcctgcctaccccacgtactcagggttctgaagatgtggtacaggctttcatcagtgagattggaattgaggcatcggacctgtccagtctgctggagcagtttgagaaatcagaagccaaaaaggagtgtcctcctccggctcctgctgacagcttggctgtaggaaactcaggcggcgttgacattccccaggagaagaggcccctagaccggttacaagccccagaactggccaacgtggcagggctcacccctccagctacccctccccaccagttatggaagcccctggctgctgtctcactgctggccaaagccaaatctcctaagtccaccgcccaggagggaaccctgaagcctgaaggagttacggaggccaaacatccagctgcagttcgcctccaagaaggggtccatggccctagtcgagtccatgtgggctctggggaccatgactattgtgtccggagcaggacccccccaaaaaagatgcctgccctagtcattccagaggtgggctcccgatggaatgtcaagcgccatcaggacatcaccatcaaacctgtcttgtccttgggcccagctgcccctccgcccccatgcatagctgcctcccgggagccgcttgatcacaggactagcagtgagcaggcagatccctcagcaccctgccttgccccatccagcttgctgtcccctgaggcctcaccctgccggaatgacatgaacactaggactccccctgaaccctcagccaagcagcggtcaatgcgctgttaccgaaaagcctgcaggtcagccagcccctcaagccagggctggcagggccgccgaggccgcaacagccgttctgtcagctctgggtccaaccggactagcgaagcatcttcctcatcctcatcatcgtcttcctcatcccgatctcggtccaggtccctctcccccccacacaagaggtggcgaaggtccagctgtagttcctctggacgttctcgaagatgctcttcctcttcttcgtcatcatcttcctcttcgtcttcctcatcctcatcatccagttctcgaagccgctcacgatccccatccccccgccggagaagtgacaggaggcggcggtacagctcttatcgttcacatgaccattaccaaaggcaaagagtgctacaaaaggagcgtgcaatagaagaaatgaagtgagaagctaccatctccggggcaaagacaaagggccaaaaattcattcccaccctcacccccagcagacaaaaaaacaccatgggacattaaataaaacagaaatcactgaaaccacagagaaaaaatttattatcaattcgtcagaaatccactctcaaggttaaaagaagagatggggttttcccaaggcactctggtgtgaagtgaaaaaaatgacagaccagggaagatttagtctccttgatgaggttcaccatggaagacgtaaaagctgtatcccgaagaagggaatacaaggcaagagcaaaaccagaaaacgcaatcatcaggcaaaagcgaggccttgagtgaccactatgaggcagaaga

SEQ ID NO: 309452 - DNA, 1437 bp, Homo sapiens
atctttttttctcagtaaccaagttttcccacttaatgaagaattcttgggttttggagatgatatatgtcttcagaactggcccatactacaagtctagcagttaacctctctcatggtcacagtatttcagtgagacctggtaggggagcaatagtaacccaaaagacccaggcttggccccagcaccacagatagctgggtgtgagacctagggctcacccctctccctgagtctccatttattgttcttcctctttctgatttgttaaatatttttcaatttttaagtgcacaattgaaaatgtgatctcttccaaaacacttcacaacattccaggtacacctaaagttccatgaagggcctcagtttgttcatctctgaatgaaaattgttcttctagacctcttctactctgctttgtctttggtcctgagcttcctaaaagaaaggcaggactggggcctgggtgagataagcagagtatacctgaaccactcccagcattcctgcatgccctcttatccttcaggtccagctgtagttcctctggacgttctcgaagatgctcttcctcttcttcgtcatcatcttcctcttcgtcttcctcatcctcatcatccagttctcgaagccgctcacgatccccatccccccgccggagaagtgacaggaggcggcggtacagctcttatcgttcacatgaccattaccaaaggcaaagagtgctacaaaaggagcgtgcaatagaagaaagaagggtggtcttcattggaaagatacctggccgcatgactcgatcagagctgaaacagaggttctccgtttttggagagattgaggagtgcaccatccacttccgtgtccaaggggacaactacggcttcgtcacttatcgctatgctgaggaggcatttgcagccattgagagtggccacaagctgcggcaggcagatgagcagccctttgatctctgctttgggggccgaaggcagttctgcaagaggagctattctgatcttgactccaaccgggaagactttgacccagcacctgtaaagagcaaatttgattctcttgactttgacacattgttgaaacaggcccagaagaacctcaggaggtaaccttgggcccttccctgctatcctttttctcctttggaggtgcccaacctcctccacccccttcccctactctaggggagagagctgctagtgagatgactgttttataaagaaatggaaaaaagtgaaataaaaaatatgttgaatcagattttttaaaaggggtatttgtttttttataacaggtattgaaacaagttaacttgcattcctatgtaagataggaggggctgaggggatccccagtgtttggaacataagtcactatgcagactaataaacatcaactagagagaaaaaaaaaatgct

SEQ ID NO: 309453 - DNA, 848 bp, Homo sapiens
tcagggagcgctatgcacctgggatgcaggtgcctaagagttgagtcttgaattgtcttatgtttggggggctgatgacaccctcttttgtcaggtacagctcttatcgttcacatgaccattaccaaaggcaaagagtgctacaaaaggagcgtgcaatagaagaaagaagggtggtcttcattggaaagatacctggccgcatgactcgatcagagctgaaacagaggttctccgtttttggagagattgaggagtgcaccatccacttccgtgtccaaggggacaactacggcttcgtcacttatcgctatgctgaggaggcatttgcagccattgagagtggccacaagctgcggcaggcagatgagcagccctttgatctctgctttgggggccgaaggcagttctgcaagaggagctattctgatcttgactccaaccgggaagactttgacccagcacctgtaaagagcaaatttgattctcttgactttgacacattgttgaaacaggcccagaagaacctcaggaggtaaccttgggcccttccctgctatcctttttctcctttggaggtgcccaacctcctccacccccttcccctactctaggggagagagctgctagtgagatgactgttttataaagaaatggaaaaaagtgaaataaaaaatatgttgaatcagattttttaaaaggggtatttgtttttttataacaggtattgaaacaagttaacttgcattcctatgtaagataggaggggctgaggggatccccagtgtttggaacataagtcactatgcagactaataaacatcaactagagagaaaaaaaaaatgct

SEQ ID NO: 309454 - DNA, 4331 bp, Homo sapiens
gccagcgatcagagcagcgctgggtgttcaggggccaagatggcggcgcgccggggacggagagacggagtcgcgccgcccccgagtgggggccccggtccggaccctggcgggggagcccgcggcagtggttggggaagtcgaagccaagcgccgtatgggactttgggcgctgtgagcggcggcgagcaggtgctgctgcatgaggaggcgggtgattctggctttgtcagtctctctcggctgggcccatctctgagggacaaggacctggaaatggaggagctaatgctgcaggatgagacactgctggggaccatgcagagctacatggatgcctcccttatctccctcattgaggattttgggagccttggagagagcaggttatctctggaggaccagaatgaagtgtcgctgctcacggctctgacggagatcttggacaatgcagattctgagaacctttctccatttgacagcattcctgattcggagctgcttgtgtcaccccgggagggctcctctctgcacaagctgcttactctctctcggacacccccagaacgtgacctcatcaccccagttgacccactggggcccagtacaggcagcagtagagggagtggggttgaaatgtctcttccagatccctcttgggacttctccccaccctctttcttagagacctcttcccccaagcttcctagctggagacccccaagatcaagaccacgctggggccaatccccacctccccagcagcgcagtgatggagaagaagaggaggaggtggccagcttcagtggccagattcttgccggggagcttgacaactgtgtgagcagtatcccggacttccccatgcatttggcctgccctgaggaggaagataaagcaacagcagcagagatggcagtgccagcagctggtgatgagagcatctcctccctgagtgagctggtgcgggccatgcacccatactgcctgcccaacctcacccacctggcatcacttgaggatgagcttcaggagcagccagatgatttgacactgcctgagggctgcgtagtgctggagattgtggggcaggcagccacagctggcgatgacctggagatcccagttgtggtgcgacaggtctctcctggaccccggcctgtgctcctggatgactcgctagagactagttctgccttgcagctgcttatgcctacactggagtcagagacagaggctgctgtgcccaaggtaaccctctgctctgagaaagaggggttgtcattgaactcagaggagaagctggactcagcctgcttattgaagcccagggaggtcgtggagccggtggtgcccaaggagcctcagaacccacctgccaatgcagcaccaggttcccagagagctcgaaagggcaggaagaagaagagcaaggagcagccagcagcctgtgtggaaggctatgccaggaggctgaggtcatcttctcgcgggcagtctactgtaggtacagaagtgacctctcaggtagacaacttgcagaaacagcctcaggaagaacttcaaaaagagtctgggcctctccagggtaaggggaagccccgggcttgggctcgggcctgggcagctgccttggagaattctagccctaagaacttggagagaagtgctggacaaagtagtcctgctaaagaaggccctctagacctctacccaaagctggctgacactatccaaaccaatcctataccaacccatctctcattggtcgactctgcccaagccagccccatgccagttgactctgttgaagctgatcccactgcagttggccctgttctagctggccctgtacctgttgaccctgggttggttgaccttgcttcaaccagctcagaactggttgagcctctcccggctgagccagtgctgatcaacccagtcctggctgactcagcagcagttgaccctgcagtggttcccatctcagataacttgccaccagttgatgctgtcccgtctggcccagcaccagttgatctagcactggttgaccctgttcctaatgacctgactccagttgacccagtgctagttaagtccagaccaactgatcccagacgtggtgcagtgtcatcagccctggggggttcagcaccccagctcctcgtggagtcagagtccttggacccaccaaagaccatcatccctgaagtcaaagaggttgtggattctctgaaaattgaaagtggtaccagtgctacaacccatgaagccagacctcggcctctcagcttatctgagtaccggcgacgaaggcagcaacgccaagcagaaacagaagagagaagtccacagcccccaactgggaagtggcctagccttccagagactcccacagggctggcagacatcccttgtcttgtcatcccaccagccccagccaagaagacagctctgcagagaagccctgaaacaccccttgagatttgccttgtgcctgtaggtcccagccctgcttctcctagtcctgagccacctgtaagcaaacctgtggcctcatctcccactgagcaggtgccatcccaggagatgccactgttggcgagaccttcccctcctgtgcagtctgtgtcccctgctgtgcccacacctccctcgatgtctgctgccctgcctttccctgcaggtgggcttggcatgccccccagtctgcccccacctcccttgcagcctcctagtcttccattgtctatggggccagtactacctgatccgtttactcactatgcccccttgccatcctggccttgttatcctcatgtgtccccttctggctatccttgcctgccccccccaccaacggtgcccctagtgtctggtactcctggtgcctatgccgtgcctcccacttgcagtgtgccttgggcaccccctcctgccccagtctcaccttacagttccacatgtacctatgggcccttgggatggggcccagggcctcaacatgctccattctggtctactgttcccccacctcctttgcctccagcctccattgggagagctgttccccaacctaaaatggagtctaggggcactccagctggccctcctgaaaatgtacttcccttgtcgatggctcctcccctcagtcttgggctacctggccatggagctcctcagacagagcctaccaaggtggaggtcaagccagtgcctgcatctccccatccgaaacacaaggtgtctgccctggtgcaaagtccccagatgaaggctctagcatgtgtgtctgctgaaggtgtgactgttgaggagcctgcatcagagaggctaaagcctgagacccaagagaccaggcccagggagaagccccccttgcctgctaccaaggctgttcccacaccaaggcagagcactgtccccaagctgcctgctgtccacccagcccgtctaaggaagctgtccttcctgcctaccccacgtactcagggttctgaagatgtggtacaggctttcatcagtgagattggaattgaggcatcggacctgtccagtctgctggagcagtttgagaaatcagaagccaaaaaggagtgtcctcctccggctcctgctgacagcttggctgtaggaaactcagggtaagtatggagacatgagcgagttaccctacagctgttagtcagcagccggctgacactccaggactgtcaactggatgcctctgttgcagggacgctgtagtcagctctagagtctttccctgtttccccaccccttactctgcctatcactaccgggcagtgtcttgggtggtgaggtgagaacggggcatgttcactgccctccagctgattccagtcgggctccaaatgtcctagaggtgccttttatctcctggcaagtcatacctttggggatttctttctttcatttaataacacttcaagtttgctcagtgctggtaatggtgtaacttaaagtggaggaagatgttaatggctaggagtcatttttcatgttcatgatcctccatcctgttctgccaagcatgttcccctacccgggatacagatcccggggagggattaagctgtatttattgtttgctgtagctgtaggtgtcagaggctaatatttcttctggtgcccttgtgttagtctcccctggtgtcattggggctccctagtgagttcttaaataagatcttcggtgtgcaattttaaccattgtattcctggtatgttactaggaaccctactgaagagttcttcatgtaagcagaacacaatatgttatatgtactgtcgcgaagactactttc

SEQ ID NO: 309455 - DNA, 4176 bp, Homo sapiens
gccagcgatcagagcagcgctgggtgttcaggggccaagatggcggcgcgccggggacggagagacggagtcgcgccgcccccgagtgggggccccggtccggaccctggcgggggagcccgcggcagtggttggggaagtcgaagccaagcgccgtatgggactttgggcgctgtgagcggcggcgagcaggtgctgctgcatgaggaggcgggtgattctggctttgtcagtctctctcggctgggcccatctctgagggacaaggacctggaaatggaggagctaatgctgcaggatgagacactgctggggaccatgcagagctacatggatgcctcccttatctccctcattgaggattttgggagccttggagagagcaggttatctctggaggaccagaatgaagtgtcgctgctcacggctctgacggagatcttggacaatgcagattctgagaacctttctccatttgacagcattcctgattcggagctgcttgtgtcaccccgggagggctcctctctgcacaagctgcttactctctctcggacacccccagaacgtgacctcatcaccccagttgacccactggggcccagtacaggcagcagtagagggagtggggttgaaatgtctcttccagatccctcttgggacttctccccaccctctttcttagagacctcttcccccaagcttcctagctggagacccccaagatcaagaccacgctggggccaatccccacctccccagcagcgcagtgatggagaagaagaggaggaggtggccagcttcagtggccagattcttgccggggagcttgacaactgtgtgagcagtatcccggacttccccatgcatttggcctgccctgaggaggaagataaagcaacagcagcagagatggcagtgccagcagctggtgatgagagcatctcctccctgagtgagctggtgcgggccatgcacccatactgcctgcccaacctcacccacctggcatcacttgaggatgagcttcaggagcagccagatgatttgacactgcctgagggctgcgtagtgctggagattgtggggcaggcagccacagctggcgatgacctggagatcccagttgtggtgcgacaggtctctcctggaccccggcctgtgctcctggatgactcgctagagactagttctgccttgcagctgcttatgcctacactggagtcagagacagaggctgctgtgcccaaggtaaccctctgctctgagaaagaggggttgtcattgaactcagaggagaagctggactcagcctgcttattgaagcccagggaggtcgtggagccggtggtgcccaaggagcctcagaacccacctgccaatgcagcaccaggttcccagagagctcgaaagggcaggaagaagaagagcaaggagcagccagcagcctgtgtggaaggctatgccaggaggctgaggtcatcttctcgcgggcagtctactgtaggtacagaagtgacctctcaggtagacaacttgcagaaacagcctcaggaagaacttcaaaaagagtctgggcctctccagggtaaggggaagccccgggcttgggctcgggcctgggcagctgccttggagaattctagccctaagaacttggagagaagtgctggacaaagtagtcctgctaaagaaggccctctagacctctacccaaagctggctgacactatccaaaccaatcctataccaacccatctctcattggtcgactctgcccaagccagccccatgccagttgactctgttgaagctgatcccactgcagttggccctgttctagctggccctgtacctgttgaccctgggttggttgaccttgcttcaaccagctcagaactggttgagcctctcccggctgagccagtgctgatcaacccagtcctggctgactcagcagcagttgaccctgcagtggttcccatctcagataacttgccaccagttgatgctgtcccgtctggcccagcaccagttgatctagcactggttgaccctgttcctaatgacctgactccagttgacccagtgctagttaagtccagaccaactgatcccagacgtggtgcagtgtcatcagccctggggggttcagcaccccagctcctcgtggagtcagagtccttggacccaccaaagaccatcatccctgaagtcaaagaggttgtggattctctgaaaattgaaagtggtaccagtgctacaacccatgaagccagacctcggcctctcagcttatctgagtaccggcgacgaaggcagcaacgccaagcagaaacagaagagagaagtccacagcccccaactgggaagtggcctagccttccagagactcccacagggctggcagacatcccttgtcttgtcatcccaccagccccagccaagaagacagctctgcagagaagccctgaaacaccccttgagatttgccttgtgcctgtaggtcccagccctgcttctcctagtcctgagccacctgtaagcaaacctgtggcctcatctcccactgagcaggtgccatcccaggagatgccactgttggcgagaccttcccctcctgtgcagtctgtgtcccctgctgtgcccacacctccctcgatgtctgctgccctgcctttccctgcaggtgggcttggcatgccccccagtctgcccccacctcccttgcagcctcctagtcttccattgtctatggggccagtactacctgatccgtttactcactatgcccccttgccatcctggccttgttatcctcatgtgtccccttctggctatccttgcctgccccccccaccaacggtgcccctagtgtctggtactcctggtgcctatgccgtgcctcccacttgcagtgtgccttgggcaccccctcctgccccagtctcaccttacagttccacatgtacctatgggcccttgggatggggcccagggcctcaacatgctccattctggtctactgttcccccacctcctttgcctccagcctccattgggagagctgttccccaacctaaaatggagtctaggggcactccagctggccctcctgaaaatgtacttcccttgtcgatggctcctcccctcagtcttgggctacctggccatggagctcctcagacagagcctaccaaggtggaggtcaagccagtgcctgcatctccccatccgaaacacaaggtgtctgccctggtgcaaagtccccagatgaaggctctagcatgtgtgtctgctgaaggtgtgactgttgaggagcctgcatcagagaggctaaagcctgagacccaagagaccaggcccagggagaagccccccttgcctgctaccaaggctgttcccacaccaaggcagagcactgtccccaagctgcctgctgtccacccagcccgtctaaggaagctgtccttcctgcctaccccacgtactcagggttctgaagatgtggtacaggctttcatcagtgagattggaattgaggcatcggacctgtccagtctgctggagcagtttgagaaatcagaagccaaaaaggagtgtcctcctccggctcctgctgacagcttggctgtaggaaactcagggtaagtatggagacatgagcgagttaccctacagctgttagtcagcagccggctgacactccaggactgtcaactggatgcctctgttgcagggacgctgtagtcagctctagagtctttccctgtttccccaccccttactctgcctatcactaccgggcagtgtcttgggtggtgaggtgagaacggggcatgttcactgccctccagctgattccagtcgggctccaaatgtcctagaggtgccttttatctcctggcaagtcatacctttggggatttctttctttcatttaataacacttcaagtttgctcagtgctggtaatggtgtaacttaaagtggaggaagatgttaatggctaggagtcatttttcatgttcatgatcctccatcctgttctgccaagcatgttcccctccacattgatttcaggttggtgtgagctgggcaggtgagactcgatgtgaaggaggtggggggtattcaaggtcatggccagcctgcctcttggaattgggcagggctc

SEQ ID NO: 309456 - DNA, 4089 bp, Homo sapiens
gccagcgatcagagcagcgctgggtgttcaggggccaagatggcggcgcgccggggacggagagacggagtcgcgccgcccccgagtgggggccccggtccggaccctggcgggggagcccgcggcagtggttggggaagtcgaagccaagcgccgtatgggactttgggcgctgtgagcggcggcgagcaggtgctgctgcatgaggaggcgggtgattctggctttgtcagtctctctcggctgggcccatctctgagggacaaggacctggaaatggaggagctaatgctgcaggatgagacactgctggggaccatgcagagctacatggatgcctcccttatctccctcattgaggattttgggagccttggagagagcaggttatctctggaggaccagaatgaagtgtcgctgctcacggctctgacggagatcttggacaatgcagattctgagaacctttctccatttgacagcattcctgattcggagctgcttgtgtcaccccgggagggctcctctctgcacaagctgcttactctctctcggacacccccagaacgtgacctcatcaccccagttgacccactggggcccagtacaggcagcagtagagggagtggggttgaaatgtctcttccagatccctcttgggacttctccccaccctctttcttagagacctcttcccccaagcttcctagctggagacccccaagatcaagaccacgctggggccaatccccacctccccagcagcgcagtgatggagaagaagaggaggaggtggccagcttcagtggccagattcttgccggggagcttgacaactgtgtgagcagtatcccggacttccccatgcatttggcctgccctgaggaggaagataaagcaacagcagcagagatggcagtgccagcagctggtgatgagagcatctcctccctgagtgagctggtgcgggccatgcacccatactgcctgcccaacctcacccacctggcatcacttgaggatgagcttcaggagcagccagatgatttgacactgcctgagggctgcgtagtgctggagattgtggggcaggcagccacagctggcgatgacctggagatcccagttgtggtgcgacaggtctctcctggaccccggcctgtgctcctggatgactcgctagagactagttctgccttgcagctgcttatgcctacactggagtcagagacagaggctgctgtgcccaaggtaaccctctgctctgagaaagaggggttgtcattgaactcagaggagaagctggactcagcctgcttattgaagcccagggaggtcgtggagccggtggtgcccaaggagcctcagaacccacctgccaatgcagcaccaggttcccagagagctcgaaagggcaggaagaagaagagcaaggagcagccagcagcctgtgtggaaggctatgccaggaggctgaggtcatcttctcgcgggcagtctactgtaggtacagaagtgacctctcaggtagacaacttgcagaaacagcctcaggaagaacttcaaaaagagtctgggcctctccagggtaaggggaagccccgggcttgggctcgggcctgggcagctgccttggagaattctagccctaagaacttggagagaagtgctggacaaagtagtcctgctaaagaaggccctctagacctctacccaaagctggctgacactatccaaaccaatcctataccaacccatctctcattggtcgactctgcccaagccagccccatgccagttgactctgttgaagctgatcccactgcagttggccctgttctagctggccctgtacctgttgaccctgggttggttgaccttgcttcaaccagctcagaactggttgagcctctcccggctgagccagtgctgatcaacccagtcctggctgactcagcagcagttgaccctgcagtggttcccatctcagataacttgccaccagttgatgctgtcccgtctggcccagcaccagttgatctagcactggttgaccctgttcctaatgacctgactccagttgacccagtgctagttaagtccagaccaactgatcccagacgtggtgcagtgtcatcagccctggggggttcagcaccccagctcctcgtggagtcagagtccttggacccaccaaagaccatcatccctgaagtcaaagaggttgtggattctctgaaaattgaaagtggtaccagtgctacaacccatgaagccagacctcggcctctcagcttatctgagtaccggcgacgaaggcagcaacgccaagcagaaacagaagagagaagtccacagcccccaactgggaagtggcctagccttccagagactcccacagggctggcagacatcccttgtcttgtcatcccaccagccccagccaagaagacagctctgcagagaagccctgaaacaccccttgagatttgccttgtgcctgtaggtcccagccctgcttctcctagtcctgagccacctgtaagcaaacctgtggcctcatctcccactgagcaggtgccatcccaggagatgccactgttggcgagaccttcccctcctgtgcagtctgtgtcccctgctgtgcccacacctccctcgatgtctgctgccctgcctttccctgcaggtgggcttggcatgccccccagtctgcccccacctcccttgcagcctcctagtcttccattgtctatggggccagtactacctgatccgtttactcactatgcccccttgccatcctggccttgttatcctcatgtgtccccttctggctatccttgcctgccccccccaccaacggtgcccctagtgtctggtactcctggtgcctatgccgtgcctcccacttgcagtgtgccttgggcaccccctcctgccccagtctcaccttacagttccacatgtacctatgggcccttgggatggggcccagggcctcaacatgctccattctggtctactgttcccccacctcctttgcctccagcctccattgggagagctgttccccaacctaaaatggagtctaggggcactccagctggccctcctgaaaatgtacttcccttgtcgatggctcctcccctcagtcttgggctacctggccatggagctcctcagacagagcctaccaaggtggaggtcaagccagtgcctgcatctccccatccgaaacacaaggtgtctgccctggtgcaaagtccccagatgaaggctctagcatgtgtgtctgctgaaggtgtgactgttgaggagcctgcatcagagaggctaaagcctgagacccaagagaccaggcccagggagaagccccccttgcctgctaccaaggctgttcccacaccaaggcagagcactgtccccaagctgcctgctgtccacccagcccgtctaaggaagctgtccttcctgcctaccccacgtactcagggttctgaagatgtggtacaggctttcatcagtgagattggaattgaggcatcggacctgtccagtctgctggagcagtttgagaaatcagaaggtgagggaacatgggtagttttgctccaactctttttttggtgatacttttttgggcccagccctgtagttgcttaaactagggtgagaggggacacccttagccactggagcagacccctaattggaagagagagacaagattgaactgtgacggtaatccaagccagggacggcagtgatacagtaaggaaggtattaaagagtagactgggaatccaggccaggcgtggtggctcatgcctgtaatcccagcactctgggaagctgaggcgggtggatcatgaggtcaggagtttgagaccagcctggccaacatggtgaaaccccgtatctactaaaaatacaaaaattagctgggcgaggtggcgggcacctgtaatcccagttactcgggaggctgaggcaggagaattgtttgaacccagcaggcagagattgcagtgagccgagatcgtgccattgcactctagcctgggccacagggtgagactctgtctc

SEQ ID NO: 309457 - DNA, 374 bp, Homo sapiens
ggaaagatacctggccgcatgactcgatcagagctgaaacagaggttctccgtttttggagagattgaggagtgcaccatccacttccgtgtccaagggtaagcttgggccccaggctcaggatgttctttctatcccattcatctaccttggtgtttctttgtcttgcctccttgctctggtgtgctgagcaatatggggcaccttcatttctgcagtcagagggttggccactgggaatgagaagaaccacctctgtaccttgggatgctgtgtctcctctatggcatgggcccatatagccactccagcccctgcctcactctcctcctactagggacaactacggcttcgtcacttatcgctatgctgag

SEQ ID NO: 309458 - DNA, 436 bp, Homo sapiens
ttttttttttccccccctttttttaaaaaacagggaaaacgggttcccccaattttctgtggttttgggttaaaaaccctaaaaaaaaaagggttggtttccaccaaaatttttttaggaaaatcccctttaagattaaatttttcagaaagaaaattatagcttttttcccaaaatatttttaagatttaatctttttgtagtatgctacagatttaattatattaactcttttttaagacattgaccatgacttaacattttgccttctaacaccttttaaatctatgtactttaatagttaagagaaaataagtttgcagatttttaataatctgtttgtaaaaggctatctctaagcctagtatgtgggtaattttacaggtgtgttttttgataactttaatataaaataaactcattttatttgtggcaa

SEQ ID NO: 309459 - DNA, 2503 bp, Homo sapiens
cattatgaaccctaagtcaatatatttttggtggttttagtgatcagtaatcaaatttgtacttattatgcttgttcaggtaatttacttgactgttctatttgtttgtccaaaagataaaatgatgagagagattcgagaggtctttgatctgtctcccttttaagaaatgaagccagctggtaatgtatattcaggacttcctcagagtattggccaagaacataatgtttacacaggagtaccttggtataatgcatacattgtctcatgatactagtcataaaatattttatggattatttcacattcttcatatataacaagtaaaattaattcagttttcttctcccaacgtttaattctgaataactctatctactttaccctaatttttagcctcttaatttctggaaggactctaatttctattccaaatttctatgaattctaattgtaaattatcggaacagagttttatttatatgacctggtactagacttcttaatataactgttacactgtccttgtctttcctactcaaagacagtatcatctgaagttgcctaataaggtcatgtgagtcaagaactttatctgtgggagctgatttgcaccattttacctttttttttttttttttttggagacggagtcttgctctgtcaccaggctggagtgcagtggcgcgatctcggctcactacaacctctgcctcccgggttcgagcgattctcctgcctcggcctcccgagtaactgggtctacaggcccgtgctaccacgcccagctaatttttgtctttttagtagagacagggtttaaccatgttgcccaggatggtctccatctcttgacctcgtgatccgcccgcctcggcctcccaaacttctgggattacaggcgtgagccaccgcacccagccaccattttatctctctaaagtctggtcccagtattaaacctattctttagtaaactcatattactgttctaaattgaagaaattatttattactctgtacttctagactcaaaattctttatcaaagatagtctcaaagaggtagtacaagtcctgtttaactgcactttttcacattcacagtgcttcctctgatatctttccttacatcattatacactgttgatatcattttactcttctttctcttctacatttcttaaattttggttcttttcctgtacatgtgttttagcggggcccttttctttgaactttgtctaattagcctgtacatttttgtttcttttaaggtagaacagatctttttttgtttctccttttaagtctactggttttaaaagaggtaaatgtatccatagaccacagtgccttgctttttcctctgccagcacatggagcacgggattagatgcacaaacctatttagggaactattttggtagatgtttgagtttatacagaaattgcagctggtattttattttgctgtacatttactcaacttgtccattagtatttaactatttccagagtttgtttaggagtaagaattgacccattcgttagtttaccatattttttcctggtataaaaaggagccagaaataagccttattgctaaataattaattatgtaagcccacctaggtcctgcataagatccccctcacatacttcacaatatatatgtgtgtgtgtgtgtgtgtgtgtgtgtgtgtgtgtgtgtgtgtgtatttggctaaaaaattatactgccaaaattactgattataaatactttgactacactgattgatggggacaaaatgattaaagtattttcagggatcttattccatatgtcaccaccaaagatttctacagtgttataaagtatataaatattccaaatttctgtggttaaatatttttttcttttttttccttttttagaataacacagtctgtgctttccaaaaatgcttgaacttttatgttgttaagaaatatataatgatatcttacattaagcatgagtctaatttgtattaattgggatggactaaattttcatttgattatcaggaaaattaaggagttatatatttaaaagcaattttctgtgttttcttctttgtaagttgactcatttgtgaagcaattaggcaaattttgagaagatcattgttattgtggtttgcagtatatatttcttagtaaatatcacttaagattaaatttttcagaaagaaaattatagcttttttcccaaaatatttttaagatttaatctttttgtagtatgctacagatttaattatattaactcttttttaagacattgaccatgacttaacattttgccttctaacaccttttaaatctatgtactttaatagttaagagaaaataagtttgcagatttttaataatctgtttgtaaaaggctatctctaagcctagtatgtgggtaattttacaggtgtgttttttgataactttaatataaaataaactcattttatttgtggcaa

SEQ ID NO: 309460 - DNA, 2465 bp, Homo sapiens
cattatgaaccctaagtcaatatatttttggtggttttagtgatcagtaatcaaatttgtacttattatgcttgttcaggtaatttacttgactgttctatttgtttgtccaaaagataaaatgatgagagagattcgagaggtctttgatctgtctcccttttaagaaatgaagccagctggtaatgtatattcaggacttcctcagagtattggccaagaacataatgtttacacaggagtaccttggtataatgcatacattgtctcatgatactagtcataaaatattttatggattatttcacattcttcatatataacaagtaaaattaattcagttttcttctcccaacgtttaattctgaataactctatctactttaccctaatttttagcctcttaatttctggaaggactctaatttctattccaaatttctatgaattctaattgtaaattatcggaacagagttttatttatatgacctggtactagacttcttaatataactgttacactgtccttgtctttcctactcaaagacagtatcatctgaagttgcctaataaggtcatgtgagtcaagaactttatctgtgggagctgatttgcaccattttacctttttttttttttttttttggagacggagtcttgctctgtcaccaggctggagtgcagtggcgcgatctcggctcactacaacctctgcctcccgggttcgagcgattctcctgcctcggcctcccgagtaactgggtctacaggcccgtgctaccacgcccagctaatttttgtctttttagtagagacagggtttaaccatgttgcccaggatggtctccatctcttgacctcgtgatcgtgagccaccgcacccagccaccattttatctctctaaagtctggtcccagtattaaacctattctttagtaaactcatattactgttctaaattgaagaaattatttattactctgtacttctagactcaaaattctttatcaaagatagtctcaaagaggtagtacaagtcctgtttaactgcactttttcacattcacagtgcttcctctgatatctttccttacatcattatacactgttgatatcattttactcttctttctcttctacatttcttaaattttggttcttttcctgtacatgtgttttagcggggcccttttctttgaactttgtctaattagcctgtacatttttgtttcttttaaggtagaacagatctttttttgtttctccttttaagtctactggttttaaaagaggtaaatgtatccatagaccacagtgccttgctttttcctctgccagcacatggagcacgggattagatgcacaaacctatttagggaactattttggtagatgtttgagtttatacagaaattgcagctggtattttattttgctgtacatttactcaacttgtccattagtatttaactatttccagagtttgtttaggagtaagaattgacccattcgttagtttaccatattttttcctggtataaaaaggagccagaaataagccttattgctaaataattaattatgtaagcccacctaggtcctgcataagatccccctcacatacttcacaatatatatgtgtgtgtgtgtgtgtgtgtgtgtgtgtgtgtgtgtgtgtgtgtatttggctaaaaaattatactgccaaaattactgattataaatactttgactacactgattgatggggacaaaatgattaaagtattttcagggatcttattccatatgtcaccaccaaagatttctacagtgttataaagtatataaatattccaaatttctgtggttaaatatttttttcttttttttccttttttagaataacacagtctgtgctttccaaaaatgcttgaacttttatgttgttaagaaatatataatgatatcttacattaagcatgagtctaatttgtattaattgggatggactaaattttcatttgattatcaggaaaattaaggagttatatatttaaaagcaattttctgtgttttcttctttgtaagttgactcatttgtgaagcaattaggcaaattttgagaagatcattgttattgtggtttgcagtatatatttcttagtaaatatcacttaagattaaatttttcagaaagaaaattatagcttttttcccaaaatatttttaagatttaatctttttgtagtatgctacagatttaattatattaactcttttttaagacattgaccatgacttaacattttgccttctaacaccttttaaatctatgtactttaatagttaagagaaaataagtttgcagatttttaataatctgtttgtaaaaggctatctctaagcctagtatgtgggtaattttacaggtgtgttttttgataactttaatataaaataaactcattttatttgtggcaa

SEQ ID NO: 309461 - DNA, 2998 bp, Homo sapiens
cattatgaaccctaagtcaatatatttttggtggttttagtgatcagtaatcaaatttgtacttattatgcttgttcaggtaatttacttgactgttctatttgtttgtccaaaagataaaatgatgagagagattcgagaggtctttgatctgtctcccttttaagaaatgaagccagctggtaatgtatattcaggacttcctcagagtattggccaagaacataatgtttacacaggagtaccttggtataatgcatacattgtctcatgatactagtcataaaatattttatggattatttcacattcttcatatataacaagtaaaattaattcagttttcttctcccaacgtttaattctgaataactctatctactttaccctaatttttagcctcttaatttctggaaggactctaatttctattccaaatttctatgaattctaattgtaaattatcggaacagagttttatttatatgacctggtactagacttcttaatataactgttacactgtccttgtctttcctactcaaagacagtatcatctgaagttgcctaataaggtcatgtgagtcaagaactttatctgtgggagctgatttgcaccattttacctttttttttttttttttttggagacggagtcttgctctgtcaccaggctggagtgcagtggcgcgatctcggctcactacaacctctgcctcccgggttcgagcgattctcctgcctcggcctcccgagtaactgggtctacaggcccgtgctaccacgcccagctaatttttgtctttttagtagagacagggtttaaccatgttgcccaggatggtctccatctcttgacctcgtgatccgcccgcctcggcctcccaaacttctgggattacaggcgtgagccaccgcacccagccaccattttatctctctaaagtctggtcccagtattaaacctattctttagtaaactcatattactgttctaaattgaagaaattatttattactctgtacttctagactcaaaattctttatcaaagatagtctcaaagaggtagtacaagtcctgtttaactgcactttttcacattcacagtgcttcctctgatatctttccttacatcattatacactgttgatatcattttactcttctttctcttctacatttcttaaattttggttcttttcctgtacatgtgttttagcggggcccttttctttgaactttgtctaattagcctgtacatttttgtttcttttaaggtagaacagatctttttttgtttctccttttaagtctactggttttaaaagaggtaaatgtatccatagaccacagtgccttgctttttcctctgccagcacatggagcacgggattagatgcacaaacctatttagggaactattttggtagatgtttgagtttatacagaaattgcagctggtattttattttgctgtacatttactcaacttgtccattagtatttaactatttccagagtttgtttaggagtaagaattgacccattcgttagtttaccatattttttcctggtataaaaaggagccagaaataagccttattgctaaataattaattatgtaagcccacctaggtcctgcataagatccccctcacatacttcacaatatatatgtgtgtgtgtgtgtgtgtgtgtgtgtgtgtgtgtgtgtgtgtgtatttggctaaaaaattatactgccaaaattactgattataaatactttgactacactgattgatggggacaaaatgattaaagtattttcagggatcttattccatatgtcaccaccaaagatttctacagtgttataaagtatataaatattccaaatttctgtggttaaatatttttttcttttttttccttttttagaataacacagtctgtgctttccaaaaatgcttgaacttttatgttgttaagaaatatataatgatatcttacattaagcatgagtctaatttgtattaattgggatggactaaattttcatttgattatcaggaaaattaaggagttatatatttaaaagcaattttctgtgttttcttctttgtaagttgactcatttgtgaagcaattaggcaaattttgagaagatcattgttattgtggtttgcagtatatatttcttagtaaatatcacttaagattaaatttttcagaaagaaaattatagcttttttcccaaaatatttttaagatttaatctttttgtagtatgctacagatttaattatattaactcttttttaagacattgaccatgacttaacattttgccttctaacaccttttaaatctatgtactttaatagttaagagaaaataagtttgcagatttttaataatctgtttgtaaaaggctatctctaagcctagtatgtgggtaattttacaggtgtgttttttgataactttaatataaaataaactcattttatttgtggcaaaaaaaaaaaaaaaaaaaaaaaaaaaaaaaaaaaaaaaaaaaaaaaaaaaaagggggggggcgaacaaaaaagactctccacgggggggacacaacataacaacggcacaccgaaagattatgtattacaaaaaggagggaccactaaataggggactctataaaaacaagcagagagagggacggaggatatagaaaacaatggtaggagagagaacaaccgtacggagtgaggggcgattccgggaaggaagaagcaccacacaactgtgggggggggtcggaacacaaagtgggagggacaacaacacccccgacgagggagattagaaacagaggcccagcggggagcaagaaactacaacacaagcagaggttgatagtcgtggggagtaaacaacgatgggcatacaacatgacgtacgaacagcagaagttggcaataggagaattgatgatgaacaagatatttaaggaggaggtgtaacacaagggg

SEQ ID NO: 309462 - DNA, 2377 bp, Homo sapiens
cattatgaaccctaagtcaatatatttttggtggttttagtgatcagtaatcaaatttgtacttattatgcttgttcaggtaatttacttgactgttctatttgtttgtccaaaagataaaatgatgagagagattcgagaggtctttgatctgtctcccttttaagaaatgaagccagctggtaatgtatattcaggacttcctcagagtattggccaagaacataatgtttacacaggagtaccttggtataatgcatacattgtctcatgatactagtcataaaatattttatggattatttcacattcttcatatataacaagtaaaattaattcagttttcttctcccaacgtttaattctgaataactctatctactttaccctaatttttagcctcttaatttctggaaggactctaatttctattccaaatttctatgaattctaattgtaaattatcggaacagagttttatttatatgacctggtactagacttcttaatataactgttacactgtccttgtctttcctactcaaagacagtatcatctgaagttgcctaataaggtcatgtgagtcaagaactttatctgtgggagctgatttgcaccattttacctttttttttttttttttttggagacggagtcttgctctgtcaccaggctggagtgcagtggcgcgatctcggctcactacaacctctgcctcccgggttcgagcgattctcctgccgcccgcctcggcctcccaaacttctgggattacaggcgtgagccaccgcacccagccaccattttatctctctaaagtctggtcccagtattaaacctattctttagtaaactcatattactgttctaaattgaagaaattatttattactctgtacttctagactcaaaattctttatcaaagatagtctcaaagaggtagtacaagtcctgtttaactgcactttttcacattcacagtgcttcctctgatatctttccttacatcattatacactgttgatatcattttactcttctttctcttctacatttcttaaattttggttcttttcctgtacatgtgttttagcggggcccttttctttgaactttgtctaattagcctgtacatttttgtttcttttaaggtagaacagatctttttttgtttctccttttaagtctactggttttaaaagaggtaaatgtatccatagaccacagtgccttgctttttcctctgccagcacatggagcacgggattagatgcacaaacctatttagggaactattttggtagatgtttgagtttatacagaaattgcagctggtattttattttgctgtacatttactcaacttgtccattagtatttaactatttccagagtttgtttaggagtaagaattgacccattcgttagtttaccatattttttcctggtataaaaaggagccagaaataagccttattgctaaataattaattatgtaagcccacctaggtcctgcataagatccccctcacatacttcacaatatatatgtgtgtgtgtgtgtgtgtgtgtgtgtgtgtgtgtgtgtgtgtgtatttggctaaaaaattatactgccaaaattactgattataaatactttgactacactgattgatggggacaaaatgattaaagtattttcagggatcttattccatatgtcaccaccaaagatttctacagtgttataaagtatataaatattccaaatttctgtggttaaatatttttttcttttttttccttttttagaataacacagtctgtgctttccaaaaatgcttgaacttttatgttgttaagaaatatataatgatatcttacattaagcatgagtctaatttgtattaattgggatggactaaattttcatttgattatcaggaaaattaaggagttatatatttaaaagcaattttctgtgttttcttctttgtaagttgactcatttgtgaagcaattaggcaaattttgagaagatcattgttattgtggtttgcagtatatatttcttagtaaatatcacttaagattaaatttttcagaaagaaaattatagcttttttcccaaaatatttttaagatttaatctttttgtagtatgctacagatttaattatattaactcttttttaagacattgaccatgacttaacattttgccttctaacaccttttaaatctatgtactttaatagttaagagaaaataagtttgcagatttttaataatctgtttgtaaaaggctatctctaagcctagtatgtgggtaattttacaggtgtgttttttgataactttaatataaaataaactcattttatttgtggcaa

SEQ ID NO: 309463 - DNA, 2457 bp, Homo sapiens
cattatgaaccctaagtcaatatatttttggtggttttagtgatcagtaatcaaatttgtacttattatgcttgttcaggtaatttacttgactgttctatttgtttgtccaaaagataaaatgatgagagagattcgagaggtctttgatctgtctcccttttaagaaatgaagccagctggtaatgtatattcaggacttcctcagagtattggccaagaacataatgtttacacaggagtaccttggtataatgcatacattgtctcatgatactagtcataaaatattttatggattatttcacattcttcatatataacaagtaaaattaattcagttttcttctcccaacgtttaattctgaataactctatctactttaccctaatttttagcctcttaatttctggaaggactctaatttctattccaaatttctatgaattctaattgtaaattatcggaacagagttttatttatatgacctggtactagacttcttaatataactgttacactgtccttgtctttcctactcaaagacagtatcatctgaagttgcctaataaggtcatgtgagtcaagaactttatctgtgggagctgatttgcaccattttacctttttttttttttttttttggagacggagtcttgctctgtcaccaggctggagtgcagtggcgcgatctcggctcactacaacctctgcctcccgggttcgagcgattctcctgcctcggcctcccgagtaactgggtctacaggcccgtgctaccacgcccagctaatttttgtctttttagtagagacagggtttaaccatgttgcccaggatggtctccatctcttgacctcgtgatccgcccgcctcggcctcccaaacttctgggattacaggcgtgagccaccgcacccagccaccattttatctctctaaagtctggtcccagtattaaacctattctttagtaaactcatattactgttctaaattgaagaaattatttattactctgtacttctagactcaaaatttgcactttttcacattcacagtgcttcctctgatatctttccttacatcattatacactgttgatatcattttactcttctttctcttctacatttcttaaattttggttcttttcctgtacatgtgttttagcggggcccttttctttgaactttgtctaattagcctgtacatttttgtttcttttaaggtagaacagatctttttttgtttctccttttaagtctactggttttaaaagaggtaaatgtatccatagaccacagtgccttgctttttcctctgccagcacatggagcacgggattagatgcacaaacctatttagggaactattttggtagatgtttgagtttatacagaaattgcagctggtattttattttgctgtacatttactcaacttgtccattagtatttaactatttccagagtttgtttaggagtaagaattgacccattcgttagtttaccatattttttcctggtataaaaaggagccagaaataagccttattgctaaataattaattatgtaagcccacctaggtcctgcataagatccccctcacatacttcacaatatatatgtgtgtgtgtgtgtgtgtgtgtgtgtgtgtgtgtgtgtgtgtgtatttggctaaaaaattatactgccaaaattactgattataaatactttgactacactgattgatggggacaaaatgattaaagtattttcagggatcttattccatatgtcaccaccaaagatttctacagtgttataaagtatataaatattccaaatttctgtggttaaatatttttttcttttttttccttttttagaataacacagtctgtgctttccaaaaatgcttgaacttttatgttgttaagaaatatataatgatatcttacattaagcatgagtctaatttgtattaattgggatggactaaattttcatttgattatcaggaaaattaaggagttatatatttaaaagcaattttctgtgttttcttctttgtaagttgactcatttgtgaagcaattaggcaaattttgagaagatcattgttattgtggtttgcagtatatatttcttagtaaatatcacttaagattaaatttttcagaaagaaaattatagcttttttcccaaaatatttttaagatttaatctttttgtagtatgctacagatttaattatattaactcttttttaagacattgaccatgacttaacattttgccttctaacaccttttaaatctatgtactttaatagttaagagaaaataagtttgcagatttttaataatctgtttgtaaaaggctatctctaagcctagtatgtgggtaattttacaggtgtgttttttgataactttaatataaaataaactcattttatttgtggcaa

SEQ ID NO: 309464 - DNA, 3047 bp, Homo sapiens
cattatgaaccctaagtcaatatatttttggtggttttagtgatcagtaatcaaatttgtacttattatgcttgttcaggtaatttacttgactgttctatttgtttgtccaaaagataaaatgatgagagagattcgagaggtctttgatctgtctcccttttaagaaatgaagccagctggtaatgtatattcaggacttcctcagagtattggccaagaacataatgtttacacaggagtaccttggtataatgcatacattgtctcatgatactagtcataaaatattttatggattatttcacattcttcatatataacaagtaaaattaattcagttttcttctcccaacgtttaattctgaataactctatctactttaccctaatttttagcctcttaatttctggaaggactctaatttctattccaaatttctatgaattctaattgtaaattatcggaacagagttttatttatatgacctggtactagacttcttaatataactgttacactgtccttgtctttcctactcaaagacagtatcatctgaagttgcctaataaggtcatgtgagtcaagaactttatctgtgggagctgatttgcaccattttacctttttttttttttttttttggagacggagtcttgctctgtcaccaggctggagtgcagtggcgcgatctcggctcactacaacctctgcctcccgggttcgagcgattctcctgcctcggcctcccgagtaactgggtctacaggcccgtgctaccacgcccagctaatttttgtctttttagtagagacagggtttaaccatgttgcccaggatggtctccatctcttgacctcgtgatccgcccgcctcggcctcccaaacttctgggattacaggcgtgagccaccgcacccagccaccattttatctctctaaagtctggtcccagtattaaacctattctttagtaaactcatattactgttctaaattgaagaaattatttattactctgtacttctagactcaaaattctttatcaaagatagtctcaaagaggtagtacaagtcctgtttaactgcactttttcacattcacagtgcttcctctgatatctttccttacatcattatacactgttgatatcattttactcttctttctcttctacatttcttaaattttggttcttttcctgtacatgtgttttagcggggcccttttctttgaactttgtctaattagcctgtacatttttgtttcttttaaggtagaacagatctttttttgtttctccttttaagtctactggttttaaaagaggtaaatgtatccatagaccacagtgccttgctttttcctctgccagcacatggagcacgggattagatgcacaaacctatttagggaactattttggtagatgtttgagtttatacagaaattgcagctggtattttattttgctgtacatttactcaacttgtccattagtatttaactatttccagagtttgtttaggagtaagaattgacccattcgttagtttaccatattttttcctggtataaaaaggagccagaaataagccttattgctaaataattaattatgtaagcccacctaggtcctgcataagatccccctcacatacttcacaatatatatgtgtgtgtgtgtgtgtgtgtgtgtgtgtgtgtgtgtgtgtgtgtatttggctaaaaaattatactgccaaaattactgattataaatactttgactacactgattgatggggacaaaatgattaaagtattttcagggatcttattccatatgtcaccaccaaagatttctacagtgttataaagtatataaatattccaaatttctgtggttaaatatttttttcttttttttccttttttagaataacacagtctgtgctttccaaaaatgcttgaacttttatgttgttaagaaatatataatgatatcttacattaagcatgagtctaatttgtattaattgggatggactaaattttcatttgattatcaggaaaattaaggagttatatatttaaaagcaattttctgtgttttcttctttgtaagttgactcatttgtgaagcaattaggcaaattttgagaagatcattgttattgtggtttgcagtatatatttcttagtaaatatcacttaagattaaatttttcagaaagaaaattatagcttttttcccaaaatatttttaagatttaatctttttgtagtatgctacagatttaattatattaactcttttttaagacattgaccatgacttaacattttgccttctaacaccttttaaatctatgtactttaatagttaagagaaaataagtttgcagatttttaataatctgtttgtaaaaggctatctctaagcctagtatgtgggtaattttacaggtgtgttttttgataactttaatataaaataaactcattttatttgtggcaattcgcgtttctttttttatgccagagtacatatgttggattccatgaattggtattacttattattatgtgttgattaaatatatgcacacacttaggattacagatcacagagcaaattatgaaaatcataaacattctggtatggtcatccataggattatgaaaaagaaatactgaattgttaaatttggatgttagaaaggaaagataggaaaaacaatgagtacagaaatcctcaccatcaatttggatgggttagctgtctcaggcataaaatgtaacacaaaattcagatttatgtatcctggaaatgttctggggttccatctgttttaaagttagacgtctgtctgcctcacatttaagctttagagagaaatcctatgttttaagaagtttctttgtgttacttcattatgacacataatgcgtgttaaggtctttctagatagcattttaaatggaattattttcattttcattatgaggtatatacttgtaatgatctaaagaggttagaaatataaataaaaattcaaaag

SEQ ID NO: 309465 - DNA, 1859 bp, Homo sapiens
cattatgaaccctaagtcaatatatttttggtggttttagtgatcagtaatcaaatttgtacttattatgcttgttcaggtaatttacttgactgttctatttgtttgtccaaaagataaaatgatgagagagattcgagaggtctttgatctgtctcccttttaagaaatgaagccagctggtaatgtatattcaggacttcctcagagtattggccaagaacataatgtttacacaggagtaccttggtataatgcatacattgtctcatgatactagtcataaaatattttatggattatttcacattcttcatatataacaagtaaaattaattcagttttcttctcccaacgtttaattctgaataactctatctactttaccctaatttttagcctcttaatttctggaaggactctaatttctattccaaatttctatgaattctaattgtaaattatcggaacagagttttatttatatgacctggtactagacttcttaatataactgttacactgtccttgtctttcctactcaaagacagtatcatctgaagttgcctaataaggtcatgtgagtcaagaactttatctgtgggagctgatttgcaccattttacctttttttttttttttttttggagacggagtcttgctctgtcaccaggctggagtgcagtggcgcgatctcggctcactacaacctctgcctcccgggttcgagcgattctcctgcctcggcctcccgagtaactgggtctacaggcccgtgctaccacgcccagctaatttttgtctttttagtagagacagggtttaaccatgttgcccaggatggtctccatctcttgacctcgtgatccgcccgcctcggcctcccaaacttctgggattacaggcgtgagccaccgcacccagccaccattttatctctctaaagtctggtcccagtattaaacctattctttagtaaactcatattactgttctaaattgaagaaattatttattactctgtacttctagactcaaaattctttatcaaagatagtctcaaagaggtagtacaagtcctgtttaactgcactttttcacattcacagtgcttcctctgatatctttccttacatcattatacactgttgatatcattttactcttctttctcttctacatttcttaaattttggttcttttcctgtacatgtgttttagcggggcccttttctttgaactttgtctaattagcctgtacatttttgtttcttttaaggtagaacagatctttttttgtttctccttttaagtctactggttttaaaagaggtaaatgtatccatagaccacagtgccttgctttttcctctgccagcacatggagcacgggattagatgcacaaacctatttagggaactattttggtagatgtttgagtttatacagaaattgcagctggtattttattttgctgtacatttactcaacttgtccattagtatttaactatttccagagggaagagagcaaggtctgctgctgctgccccgggctccgaggccagcttcacagagtccagagggctgcagaataagaacagagggggggccaatgggaaagggaggcggggcagctaatcgctatacccactgcaacctttacaacgaccaccactgggacaatacccggactgccctccctcacaacaactgttgttcaggctacaccaaagagtcctccgttaaaacccattcaaccaaagcccacaattatgggagagcccatcaccgtgaacccagctctggtgtcactcaaagacaaaaagaaaaaggagaagcgaaagctaaaggacaaa

SEQ ID NO: 309466 - DNA, 1294 bp, Homo sapiens
cattatgaaccctaagtcaatatatttttggtggttttagtgatcagtaatcaaatttgtacttattatgcttgttcaggtaatttacttgactgttctatttgtttgtccaaaagataaaatgatgagagagattcgagaggtctttgatctgtctcccttttaagaaatgaagccagctggtaatgtatattcaggacttcctcagagtattggccaagaacataatgtttacacaggagtaccttggtataatgcatacattgtctcatgatactagtcataaaatattttatggattatttcacattcttcatatataacaagtaaaattaattcagttttcttctcccaacgtttaattctgaataactctatctactttaccctaatttttagcctcttaatttctggaaggactctaatttctattccaaatttctatgaattctaattgtaaattatcggaacagagttttatttatatgacctggtactagacttcttaatataactgttacactgtccttgtctttcctactcaaagacagtatcatctgaagttgcctaataaggtcatgtgagtcaagaactttatctgtgggagctgatttgcaccattttacctttttttttttttttttttggagacggagtcttgctctgtcaccaggctggagtgcagtggcgcgatctcggctcactacaacctctgcctcccgggttcgagcgattctcctgcctcggcctcccgagtaactgggtctacaggcccgtgctaccacgcccagctaatttttgtctttttagtagagacagggtttaaccatgttgcccaggatggtctccatctcttgacctcgtgatccgcccgcctcggcctcccaaacttctgggattacaggcgtgagccaccgcacccagccaccattttatctctctaaagtctggtcccagtattaaacctattctttagtaaactcatattactgttctaaattgaagaaattatttattactctgtacttctagactcaaaattctttatcaaagatagtctcaaagaggtagtacaagtcctgtttaactgcactttttcacattcacagtgcttcctctgatatctttccttacatcattatacactgttgatatcattttactcttctttctcttctacatttccctatcttctctattcttttcttcgccttcccgtacttctgtcttccagttttccacttcaaacttctatcttctccaaattgtttcatccgtcgacgcggccgcgaat

SEQ ID NO: 309467 - DNA, 1079 bp, Homo sapiens
acgcgcgcggccgtttccggaggcggtggccaaagtgggcggggctaggccggagctgctggtgggaggcagccacttgagatcaccaggcctcctgtagaccggcgggtgcagggcccggtcccagagttaagggaaagtcgtttggaaaccccaggccaacaggaccctttggcagctgaggctggaaacagcggaaccaaaggcagacggtcctcagttgcttgggcggacgtggacccaatctgtccgtccttacaagtttcccccaggggcaggacctagacgcgcggcgcattcaggttctcctggaccgtagtggtagtcgctggcccgagttagaggccagctgagaagtcttcgtgcttcagatttgtttacctacaaaatgcttcggtatccatatttttgtagaatgtataaagaatgcctttcatgttggttggaatctggcatacctaatttaggtgtctggccaaacagaatacatactacagcagaaaaatatagagaatatgaagcccgggagcaaacagatcaaactcaagcccaggagttacacagatctcaagatagagattttgaaactatggctaaattacatattccagtaatggtggatgaagttgttcattgtttgtcaccacaaaaaggacagcaaaagaagtaaactgtggatatttaatatattcataaagatggagaatttcccacttgagtgtattctattctgaattttggaaccaagctagctgattttacacgtttgattttatgattacatatggaaaaaaatcaaaaccgcaatgttacaggtctctcacacctttcactgtacttctgtaataaagggaattagaataatttattggttaaataaggtaactataaaccaatttttaacaaatttgattttgagttacgatgattgcgtattccaggtacaacttaaattgctgtaactgttttgttaagttcttttttggataaaaaatcttctaaaatcttatttttctgaaatgtaaacttaccttatagtatatgcatcttaattaaactgttcttgatcgacttaaggt

SEQ ID NO: 309468 - DNA, 1184 bp, Homo sapiens
acgcgcgcggccgtttccggaggcggtggccaaagtgggcggggctaggccggagctgctggtgggaggcagccacttgagatcaccaggcctcctgtagaccggcgggtgcagggcccggtcccagagttaagggaaagtcgtttggaaaccccaggccaacaggaccctttggcagctgaggctggaaacagcggaaccaaaggcagacggtcctcagttgcttgggcggacgtggacccaatctgtccgtccttacaagtttcccccaggggcaggacctagacgcgcggcgcattcaggttctcctggaccgtagtggtagtcgctggcccgagttagaggccagctgagaagtcttcgtgcttcagatttgtttacctacaaaatgcttcggtatccatatttttgtagaatgtataaagaatgcctttcatgttggttggaatctggcatacctaatttaggtgtctggccaaacagaatacatactacagcagaaaaatatagagaatatgaagcccgggagcaaacagatcaaactcaagcccaggagttacacagatctcaagatagagattttgaaactatggctaaattacatattccagtaatggtggatgaagttgttcattgtttgtcaccacaaaaaggacagatttttctagatatgacatttggttcgggagggcacacaaaagccattctgcagaaggagtcagatattgttctctatgccttggacagagacccaacagcttatgcattagctgaacatctttcagagttgtatcctaaacaaatccgagctatgctgggccagttcagccaggcagaagccttattaatgaaagctggagtgcagccaggaacttttgatggagttcttatggatcttgggtgtcctccatgcaattgatactcctgaaagaggttttcccttcggaaagatggccttggacatgagaatggatgtgccagatcaacgcactgcatctatctaagactacggggggggaagctgccagaaatcgttggcattgttcggccgcgattaccattacagaaccaggtgcacgttcggcgtgctcttattctcccggttgaaaactttccgtgccgtgggctcccccgtgttgtttccccccgggatgtaacagaacccttgggttggtgcccccccc

SEQ ID NO: 309469 - DNA, 1118 bp, Homo sapiens
acgcgcgcggccgtttccggaggcggtggccaaagtgggcggggctaggccggagctgctggtgggaggcagccacttgagatcaccaggcctcctgtagaccggcgggtgcagggcccggtcccagagttaagggaaagtcgtttggaaaccccaggccaacaggaccctttggcagctgaggctggaaacagcggaaccaaaggcagacggtcctcagttgcttgggcggacgtggacccaatctgtccgtccttacaagtttcccccaggggcaggacctagacgcgcggcgcattcaggttctcctggaccgtagtggtagtcgctggcccgagttagaggccagctgagaagtcttcgtgcttcagatttgtttacctacaaaatgcttcggtatccatatttttgtagaatgtataaagaatgcctttcatgttggttggaatctggcatacctaatttaggtgtctggccaaacagaatacatactacagcagaaaaatatagagaatatgaagcccgggagcaaacagatcaaactcaagcccaggagttacacagatctcaagatagagattttgaaactatggctaaattacatattccagtaatggtggatgaagttgttcattgtttgtcaccacaaaaaggacagagtcttggtgtgaggagtgtgggaatatgaatcctacagcaaaagaagtaaactgtggatatttaatatattcataaagatggagaatttcccacttgagtgtattctattctgaattttggaaccaagctagctgattttacacgtttgattttatgattacatatggaaaaaaatcaaaaccgcaatgttacaggtctctcacacctttcactgtacttctgtaataaagggaattagaataatttattggttaaataaggtaactataaaccaatttttaacaaatttgattttgagttacgatgattgcgtattccaggtacaacttaaattgctgtaactgttttgttaagttcttttttggataaaaaatcttctaaaatcttatttttctgaaatgtaaacttaccttatagtatatgcatcttaattaaactgttcttgatcgacttaaggt

SEQ ID NO: 309470 - DNA, 1072 bp, Homo sapiens
gcggggcagaggagctcatgcgcagtatgtgtggttggggaattcatgtggaggtcagagtggaagcaggtgtgagagggtccagcagaaggaaacatggctgccaaagtgtttgagtccattggcaagtttggcctggccttagctgttgcaggaggcgtggtgaactctgccttatataatgtggatgctgggcacagagctgtcatctttgaccgattccgtggagtgcaggacattgtggtaggggaagggactcattttctcatcccgtgggtacagaaaccaattatctttgactgccgttctcgaccacgtaatgtgccagtcatcactggtagcaaagatttacagaatgtcaacatcacactgcgcatcctcttccggcctgtcgccagccagcttcctcgcatcttcaccagcatcggagaggactatgatgagcgtgtgctgccgtccatcacaactgagatcctcaagtcagtggtggctcgctttgatgctggagaactaatcacccagagagagctggtctccaggcaggtgagcgacgaccttacagagcgagccgccacctttgggctcatcctggatgacgtgtccttgacacatctgaccttcgggaaggagttcacagaagcggtggaagccaaacaggtggctcagcaggaagcagagagggccagatttgtggtggaaaaggctgagcaacagaaaaaggcggccatcatctctgctgagggcgactccaaggcagctgagctgattgccaactcactggccactgcaggggatggcctgatcgagctgcgcaagctggaagctgcagaggacatcgcgtaccagctctcacgctctcggaacatcacctacctgccagcggggcagtccgtgctcctccagctgccccagtgagggcccaccctgcctgcacctccgcgggctgactgggccacagccccgatgattcttaacacagccttccttctgctcccaccccagaaatcactgtgaaatttcatgattggcttaaagtgaaggaaataaaggtaaaatcacttcagatctctaa

SEQ ID NO: 309471 - DNA, 1020 bp, Homo sapiens
ggccggggggtgaatcggccgagggtggaagcaggtgtgagagggtccagcagaaggaaacatggctgccaaagtgtttgagtccattggcaagtttggcctggccttagctgttgcaggaggcgtggtgaactctgccttatataatgtggatgctgggcacagagctgtcatctttgaccgattccgtggagtgcaggacattgtggtaggggaagggactcattttctcatcccgtgggtacagaaaccaattatctttgactgccgttctcgaccacgtaatgtgccagtcatcactggtagcaaagatttacagaatgtcaacatcacactgcgcatcctcttccggcctgtcgccagccagcttcctcgcatcttcaccagcatcggagaggactatgatgagcgtgtgctgccgtccatcacaactgagatcctcaagtcagtggtggctcgctttgatgctggagaactaatcacccagagagagctggtctccaggcaggtgagcgacgaccttacagagcgagccgccacctttgggctcatcctggatgacgtgtccttgacacatctgaccttcgggaaggagttcacagaagcggtggaagccaaacaggtggctcagcaggaagcagagagggccagatttgtggtggaaaaggctgagcaacagaaaaaggcggccatcatctctgctgagggcgactccaaggcagctgagctgattgccaactcactggccactgcaggggatggcctgatcgagctgcgcaagctggaagctgcagaggacatcgcgtaccagctctcacgctctcggaacatcactactgcaggggcagacgggactcatgccaatgggacccctgctggactcggggttctgtcacccacgtgtttaaagtcttggcccccaatatggaaatcgaggtaagagagaagaacactaaaaagggatatactaggcacccactaaggtccagaatacgggaacaaagagtaacgtcgcaaaaa

SEQ ID NO: 309472 - DNA, 716 bp, Homo sapiens
  misc_feature (608)..(608): n is a, c, g, or t
  misc_feature (624)..(624): n is a, c, g, or t
  misc_feature (651)..(651): n is a, c, g, or t
  misc_feature (672)..(672): n is a, c, g, or t
  misc_feature (699)..(699): n is a, c, g, or t
gcggggcagaggagctcatgcgcagtatgtgtggttggggaattcatgtggaggtcagagtggaagcaggtgtgagagggtccagcagaaggaaacatggctgccaaagtgtttgagtccattggcaagtttggcctggccttagctgttgcaggaggcgtggtgaactctgccttatataatgtggatgctgggcacagagctgtcatctttgaccgattccgtggagtgcaggacattgtggtaggggaagggactcattttctcatcccgtgggtacagaaaccaattatctttgactgccgttctcgaccacgtaatgtgccagtcatcactggtagcaaagatttacagaatgtcaacatcacactgcgcatcctcttccggcctgtcgccagccagcttcctcgcatcttcaccagcatcggagaggactatgatgagcgtgtgctgccgtccatcacaactgagatcctcaagtcagtggtggctcgctttgatgctggagaactaatcacccagagagagctggtctccaggcaggtgagcgacgaccttacagagcgagccgccacctttgggctcatcctggatgacgtgtccttggnaaacttactccggagngtcaagagggggagcacagtgtcaaangagaggaggcattgggggaangttaaaaaaagcgcccctttttggggnatcaggagtgattttgc

SEQ ID NO: 309473 - DNA, 975 bp, Homo sapiens
  misc_feature (114)..(114): n is a, c, g, or t
  misc_feature (116)..(116): n is a, c, g, or t
  misc_feature (118)..(118): n is a, c, g, or t
  misc_feature (120)..(120): n is a, c, g, or t
  misc_feature (127)..(127): n is a, c, g, or t
agcggcgcctttttcattagggagatagttggtattaggattaggattgtgtgaagtatagtacggatgcgtacttgtccaatgatggtaaaagggtagcttactggttgtccncngntncaggttnatgtggaggtcagagtggaagcaggtgtgagagggtccagcagaaggaaacatggctgccaaagtgtttgagtccattggcaagtttggcctggccttagctgttgcaggaggcgtggtgaactctgccttatataatgtggatgctgggcacagagctgtcatctttgaccgattccgtggagtgcaggacattgtggtaggggaagggactcattttctcatcccgtgggtacagaaaccaattatctttgactgccgttctcgaccacgtaatgtgccagtcatcactggtagcaaagatttacagaatgtcaacatcacactgcgcatcctcttccggcctgtcgccagccagcttcctcgcatcttcaccagcatcggagaggactatgatgagcgtgtgctgccgtccatcacaactgagatcctcaagtcagtggtggctcgctttgatgctggagaactaatcacccagagagagctggtctccaggcaggtgagcgacgaccttacagagcgagccgccacctttgggctcatcctggatgacgtgtccttgggtaagatccttcgggagaccgaggaggggaaggggctgcagttctcgtttaggtgcctggctccatttctgggtagacgctattaggtcctcccttctgctttgctagatgtgagacttgaaaacacggaaacatgctgaggtgaggcagtctccgtgggtttttcagttgagggttcttttaccttccccctgccacacacatttttcttatgacctctggttgtatccagatagtctctaaccactaaatgttttaccttctccaaactgttacccagagagtg

SEQ ID NO: 309474 - DNA, 636 bp, Homo sapiens
  misc_feature (114)..(114): n is a, c, g, or t
  misc_feature (116)..(116): n is a, c, g, or t
  misc_feature (118)..(118): n is a, c, g, or t
  misc_feature (120)..(120): n is a, c, g, or t
  misc_feature (127)..(127): n is a, c, g, or t
agcggcgcctttttcattagggagatagttggtattaggattaggattgtgtgaagtatagtacggatgcgtacttgtccaatgatggtaaaagggtagcttactggttgtccncngntncaggttnatgtggaggtcagagtggaagcaggtgtgagagggtccagcagaaggaaacatggctgccaaagtgtttgagtccattggcaagtttggcctggccttagctgttgcaggaggcgtggtgaactctgccttatataatggctgagcaacagaaaaaggcggccatcatctctgctgagggcgactccaaggcagctgagctgattgccaactcactggccactgcaggggatggcctgatcgagctgcgcaagctggaagctgcagaggacatcgcgtaccagctctcacgctctcggaacatcacctacctgccagcggggcagtccgtgctcctccagctgccccagtgagggcccaccctgcctgcacctccgcgggctgactgggccacagccccgatgattcttaacacagccttccttctgctcccaccccagaaatcactgtgaaatttcatgattggcttaaagtgaaggaaataaaggtaaaatcacttcagatctctaa

SEQ ID NO: 309475 - DNA, 478 bp, Homo sapiens
gcggggcagaggagctcatgcgcagtatgtgtggttggggaattcatgtggaggtcagagtggaagcaggtgtgagagggtccagcagaaggaaacatggctgccaaagtgtttgagtccattggcaagtttggcctggccttagctgttgcaggaggcgtggtgaactctgccttatataatgtggatgctgggcacagagctgtcatctttgaccgattccgtggagtgcaggacattgtggtaggggaagggactcattttctcatcccgtgggtacagaaaccaattatctttgactgccgttctcgaccacgtaatgtgccagtcatcactggtagcaaaggggctgactgggccacagccccgatgattcttaacacagccttccttctgctcccaccccagaaatcactgtgaaatttcatgattggcttaaagtgaaggaaataaaggtaaaatcacttcagatctctaa

SEQ ID NO: 309476 - DNA, 274 bp, Homo sapiens
  misc_feature (15)..(15): n is a, c, g, or t
  misc_feature (24)..(24): n is a, c, g, or t
  misc_feature (41)..(41): n is a, c, g, or t
  misc_feature (51)..(51): n is a, c, g, or t
  misc_feature (53)..(53): n is a, c, g, or t
  misc_feature (68)..(68): n is a, c, g, or t
ggcagtatgtgtggntggggaaancatttgttgttcagagnggaagcaggngngagagggggcagganatttaatcatgactgccaaagtggccccctcctccagctgccccagtgagggcccaccctgcctgcacctccgcgggctgactgggccacagccccgatgattcttaacacagccttccttctgctcccaccccagaaatcactgtgaaatttcatgattggcttaaagtgaaggaaataaaggtaaaatcacttcagatctctaa

SEQ ID NO: 309477 - DNA, 1871 bp, Homo sapiens
gcggggcagaggagctcatgcgcagtatgtgtggttggggaattcatgtggaggtcagagtggaagcaggtgtgagagggtccagcagaaggaaacatggctgccaaagtgtttgagtccattggcaagtttggcctggccttagctgttgcaggaggcgtggtgaactctgccttatataatgtggatgctgggcacagagctgtcatctttgaccgattccgtggagtgcaggacattgtggtaggggaagggactcattttctcatcccgtgggtacagaaaccaattatctttgactgccgttctcgaccacgtaatgtgccagtcatcactggtagcaaagatttacagaatgtcaacatcacactgcgcatcctcttccggcctgtcgccagccagcttcctcgcatcttcaccagcatcggagaggactatgatgagcgtgtgctgccgtccatcacaactgagatcctcaagtcagtggtggctcgctttgatgctggagaactaatcacccagagagagctggtctccaggcaggtgagcgacgaccttacagagcgagccgccacctttgggctcatcctggatgacgtgtccttgacacatctgaccttcgggaaggagttcacagaagcggtggaagccaaacaggtggctcagcaggaagcagagagggccagatttgtggtggaaaaggctgagcaacagaaaaaggcggccatcatctctgctgagggcgactccaaggcagctgagctgattgccaactcactggccactgcaggggatggcctgatcgagctgcgcaagctggaagctgcagaggacatcgcgtaccagctctcacgctctcggaacatcacctacctgccagcggggcagtccgtgctcctccagctgccccagtgagggcccaccctgcctgcacctccgcgggctgactgggccacagccccgatgattcttaacacagccttccttctgctcccaccccagaaatcactgtgaaatttcatgattggcttaaagtgaaggaaataaaggtaaaatcacttcagatctctaattagtctatcaaatgaaactctttcattcttctcacatccatctacttttttatccacctccctaccaggagttccggcctgggcaccagcatttggcagcacgcaggcggggcagtatgtgatggactggggagcacaggtgtctgcctagatccacgtgtggcctccgtcctgtcactgatggaaggtttgcggatgagggcatgtgcggctgaactgagaaggcaggcctccgtcttcccagcggttcctgtgcagatgctgctgaagagaggtgccggggaggggcagagaggaagtggtctgtctgttaccataagtctgattctctttaactgtgtgaccagcggaaacaggtgtgtgtgaactgggcacagattgaagaatctgcccctgttgaggtgggtgggcctgactgttgccccccagggtcctaaaacttggatggacttgtatagtgagagaggaggcctggaccgagatgtgagtcctgttgaagacttcctctctaccccccaccttggtccctctcagatacccagtggaattccaacttgaaggattgcatcctgctggggctgaacatgcctgccaaagacgtgtccgacctacgttcctggccccctcgttcagagactgcccttctcacgggctctatgcctgcactgggaaggaaacaaatgtgtataaactgctgtcaataaatgacacccagaccttccggctcaaaaaaaagacacccacgcccacacaggaccataccacacgccgctcacgacaggagctttcccgcgcccc

SEQ ID NO: 309478 - DNA, 1502 bp, Homo sapiens
gcggggcagaggagctcatgcgcagtatgtgtggttggggaattcatgtggaggtcagagtggaagcaggtgtgagagggtccagcagaaggaaacatggctgccaaagtgtttgagtccattggcaagtttggcctggccttagctgttgcaggaggcgtggtgaactctgccttatataatgtggatgctgggcacagagctgtcatctttgaccgattccgtggagtgcaggacattgtggtaggggaagggactcattttctcatcccgtgggtacagaaaccaattatctttgactgccgttctcgaccacgtaatgtgccagtcatcactggtagcaaagatttacagaatgtcaacatcacactgcgcatcctcttccggcctgtcgccagccagcttcctcgcatcttcaccagcatcggagaggactatgatgagcgtgtgctgccgtccatcacaactgagatcctcaagtcagtggtggctcgctttgatgctggagaactaatcacccagagagagctggtctccaggcaggtgagcgacgaccttacagagcgagccgccacctttgggctcatcctggatgacgtgtccttgacacatctgaccttcgggaaggagttcacagaagcggtggaagccaaacaggtggctcagcaggaagcagagagggccagatttgtggtggaaaaggctgagcaacagaaaaaggcggccatcatctctgctgagggcgactccaaggcagctgagctgattgccaactcactggccactgcaggggatggcctgatcgagctgcgcaagctggaagctgcagaggacatcgcgtaccagctctcacgctctcggaacatcacctacctgccagcggggcagtccgtgctcctccagctgccccagtgagggcccaccctgcctgcacctccgcgggctgactgggccacagccccgatgattcttaacacagccttccttctgctcccaccccagaaatcactgtgaaatttcatgattggcttaaagtgaaggaaataaaggtaaaatcacttcagatctctaaaaaaaaaaaaaaaaaaaaaaaaaaaaactgaaacaaaaaccaagataacaaaccaccaacatatcaacaacacaaaaaggggggggggggcggtaaaaaaatgccggggggcgcccaattatggggacactcatttttatatgaaagagcggcgcccctaagaagaggcgtataaaaagcgagggcaggcggtaaaaacaggctgggagggacaacagagtggctggggtaattgggagagaaccccctgccgtcgggtgtattaggaccaccacaccagatgatagagggcggggaacaaaacggtgttgtggtggcacccagctattgcgtgagaatgttgtttattttattaattatgtgtttgtgatagagaggaggaggaattttggtaggtagggtgggatggtagtagcagcggcatagaatc

SEQ ID NO: 309479 - DNA, 1076 bp, Homo sapiens
  misc_feature (42)..(42): n is a, c, g, or t
agagatctgaagtgattttacctttatttccttcactttaanccaattcatgtggaggtcagagtggaagcaggtgtgagagggtccagcagaaggaaacatggctgccaaagtgtttgagtccattggcaagtttggcctggccttagctgttgcaggaggcgtggtgaactctgccttatataatgtggatgctgggcacagagctgtcatctttgaccgattccgtggagtgcaggacattgtggtaggggaagggactcattttctcatcccgtgggtacagaaaccaattatctttgactgccgttctcgaccacgtaatgtgccagtcatcactggtagcaaagatttacagaatgtcaacatcacactgcgcatcctcttccggcctgtcgccagccagcttcctcgcatcttcaccagcatcggagaggactatgatgagcgtgtgctgccgtccatcacaactgagatcctcaagtcagtggtggctcgctttgatgctggagaactaatcacccagagagagctggtctccaggcaggtgagcgacgaccttacagagcgagccgccacctttgggctcatcctggatgacgtgtccttgacacatctgaccttcgggaaggagttcacagaagcggtggaagccaaacaggtggctcagcaggaagcagagagggccagatttgtggtggaaaaggctgagcaacagaaaaaggcggccatcatctctgctgagggcgactccaaggcagctgagctgattgccaactcactggccactgcaggggatggcctgatcgagctgcgcaagctggaagctgcagaggacatcgcgtaccagctctcacgctctcggaacatcacctacctgccagcggggcagtccgtgctcctccagctgccccagtgagggcccaccctgcctgcacctccgcgggctgactgggccacagccccgatgattcttaacacagccttccttctgctcccaccccagaaatcactgtgaaatttcatgattggcttaaagtgaaggaaataaaggtaaaatcacttcagatctctaa

SEQ ID NO: 309480 - DNA, 1051 bp, Homo sapiens
taaggggggcaccatacggctaggtacgaggccgggtggtggaagcaggtgtgagagggtccagcagaaggaaacatggctgccaaagtgtttgagtccattggcaagtttggcctggccttagctgttgcaggaggcgtggtgaactctgccttatataatgtggatgctgggcacagagctgtcatctttgaccgattccgtggagtgcaggacattgtggtaggggaagggactcattttctcatcccgtgggtacagaaaccaattatctttgactgccgttctcgaccacgtaatgtgccagtcatcactggtagcaaagatttacagaatgtcaacatcacactgcgcatcctcttccggcctgtcgccagccagcttcctcgcatcttcaccagcatcggagaggactatgatgagcgtgtgctgccgtccatcacaactgagatcctcaagtcagtggtggctcgctttgatgctggagaactaatcacccagagagagctggtctccaggcaggtgagcgacgaccttacagagcgagccgccacctttgggctcatcctggatgacgtgtccttgacacatctgaccttcgggaaggagttcacagaagcggtggaagccaaacaggtggctcagcaggaagcagagagggccagatttgtggtggaaaaggctgagcaacagaaaaaggcggccatcatctctgctgagggcgactccaaggcagctgagctgattgccaactcactggccactgcaggggatggcctgatcgagctgcgcaagctggaagctgcagaggacatcgcgtaccagctctcacgctctcggaacatcacctacctgccagcggggcagtccgtgctcctccagctgccccagtgagggcccaccctgcctgcacctccgcgggctgactgggccacagccccgatgattcttaacacagccttccttctgctcccaccccagaaatcactgtgaaatttcatgattggcttaaagtgaaggaaataaaggtaaaatcacttcagatctctaa

SEQ ID NO: 309481 - DNA, 1167 bp, Homo sapiens
gcggggcagaggagctcatgcgcagtatgtgtggttggggaattcatgtggaggtcagagtggaagcaggtgagaatggagggggcggcaaaggctcgtttctgggcatctctgcagtcctcctctgctccatgatgtgcactttgggcgaggagagtgcgtgcgtgtgagagggtccagcagaaggaaacatggctgccaaagtgtttgagtccattggcaagtttggcctggccttagctgttgcaggaggcgtggtgaactctgccttatataatgtggatgctgggcacagagctgtcatctttgaccgattccgtggagtgcaggacattgtggtaggggaagggactcattttctcatcccgtgggtacagaaaccaattatctttgactgccgttctcgaccacgtaatgtgccagtcatcactggtagcaaagatttacagaatgtcaacatcacactgcgcatcctcttccggcctgtcgccagccagcttcctcgcatcttcaccagcatcggagaggactatgatgagcgtgtgctgccgtccatcacaactgagatcctcaagtcagtggtggctcgctttgatgctggagaactaatcacccagagagagctggtctccaggcaggtgagcgacgaccttacagagcgagccgccacctttgggctcatcctggatgacgtgtccttgacacatctgaccttcgggaaggagttcacagaagcggtggaagccaaacaggtggctcagcaggaagcagagagggccagatttgtggtggaaaaggctgagcaacagaaaaaggcggccatcatctctgctgagggcgactccaaggcagctgagctgattgccaactcactggccactgcaggggatggcctgatcgagctgcgcaagctggaagctgcagaggacatcgcgtaccagctctcacgctctcggaacatcacctacctgccagcggggcagtccgtgctcctccagctgccccagtgagggcccaccctgcctgcacctccgcgggctgactgggccacagccccgatgattcttaacacagccttccttctgctcccaccccagaaatcactgtgaaatttcatgattggcttaaagtgaaggaaataaaggtaaaatcacttcagatctctaa

SEQ ID NO: 309482 - DNA, 1037 bp, Homo sapiens
ggccggggggtgaatcggccgagggtggaagcaggtgtgagagggtccagcagaaggaaacatggctgccaaagtgtttgagtccattggcaagtttggcctggccttagctgttgcaggaggcgtggtgaactctgccttatataatgtggatgctgggcacagagctgtcatctttgaccgattccgtggagtgcaggacattgtggtaggggaagggactcattttctcatcccgtgggtacagaaaccaattatctttgactgccgttctcgaccacgtaatgtgccagtcatcactggtagcaaagatttacagaatgtcaacatcacactgcgcatcctcttccggcctgtcgccagccagcttcctcgcatcttcaccagcatcggagaggactatgatgagcgtgtgctgccgtccatcacaactgagatcctcaagtcagtggtggctcgctttgatgctggagaactaatcacccagagagagctggtctccaggcaggtgagcgacgaccttacagagcgagccgccacctttgggctcatcctggatgacgtgtccttgacacatctgaccttcgggaaggagttcacagaagcggtggaagccaaacaggtggctcagcaggaagcagagagggccagatttgtggtggaaaaggctgagcaacagaaaaaggcggccatcatctctgctgagggcgactccaaggcagctgagctgattgccaactcactggccactgcaggggatggcctgatcgagctgcgcaagctggaagctgcagaggacatcgcgtaccagctctcacgctctcggaacatcacctacctgccagcggggcagtccgtgctcctccagctgccccagtgagggcccaccctgcctgcacctccgcgggctgactgggccacagccccgatgattcttaacacagccttccttctgctcccaccccagaaatcactgtgaaatttcatgattggcttaaagtgaaggaaataaaggtaaaatcacttcagatctctaa

SEQ ID NO: 309483 - DNA, 1156 bp, Homo sapiens
agcggctcttccccccgtcggactcagaccgtggctgcttgccacgaggcccgggggatgtggggcgtatgcatcgtgatcgagctgttgcttcataacacagcgctgtagtgctctaatacacgagtgttgacgagcagtatggatgaggaggtgtgagagggtccagcagaaggaaacatggctgccaaagtgtttgagtccattggcaagtttggcctggccttagctgttgcaggaggcgtggtgaactctgccttatataatgtggatgctgggcacagagctgtcatctttgaccgattccgtggagtgcaggacattgtggtaggggaagggactcattttctcatcccgtgggtacagaaaccaattatctttgactgccgttctcgaccacgtaatgtgccagtcatcactggtagcaaagatttacagaatgtcaacatcacactgcgcatcctcttccggcctgtcgccagccagcttcctcgcatcttcaccagcatcggagaggactatgatgagcgtgtgctgccgtccatcacaactgagatcctcaagtcagtggtggctcgctttgatgctggagaactaatcacccagagagagctggtctccaggcaggtgagcgacgaccttacagagcgagccgccacctttgggctcatcctggatgacgtgtccttgacacatctgaccttcgggaaggagttcacagaagcggtggaagccaaacaggtggctcagcaggaagcagagagggccagatttgtggtggaaaaggctgagcaacagaaaaaggcggccatcatctctgctgagggcgactccaaggcagctgagctgattgccaactcactggccactgcaggggatggcctgatcgagctgcgcaagctggaagctgcagaggacatcgcgtaccagctctcacgctctcggaacatcacctacctgccagcggggcagtccgtgctcctccagctgccccagtgagggcccaccctgcctgcacctccgcgggctgactgggccacagccccgatgattcttaacacagccttccttctgctcccaccccagaaatcactgtgaaatttcatgattggcttaaagtgaaggaaataaaggtaaaatcacttcagatctctaa

SEQ ID NO: 309484 - DNA, 1154 bp, Homo sapiens
  misc_feature (114)..(114): n is a, c, g, or t
  misc_feature (116)..(116): n is a, c, g, or t
  misc_feature (118)..(118): n is a, c, g, or t
  misc_feature (120)..(120): n is a, c, g, or t
  misc_feature (127)..(127): n is a, c, g, or t
agcggcgcctttttcattagggagatagttggtattaggattaggattgtgtgaagtatagtacggatgcgtacttgtccaatgatggtaaaagggtagcttactggttgtccncngntncaggttnatgtggaggtcagagtggaagcaggtgtgagagggtccagcagaaggaaacatggctgccaaagtgtttgagtccattggcaagtttggcctggccttagctgttgcaggaggcgtggtgaactctgccttatataatgtggatgctgggcacagagctgtcatctttgaccgattccgtggagtgcaggacattgtggtaggggaagggactcattttctcatcccgtgggtacagaaaccaattatctttgactgccgttctcgaccacgtaatgtgccagtcatcactggtagcaaagatttacagaatgtcaacatcacactgcgcatcctcttccggcctgtcgccagccagcttcctcgcatcttcaccagcatcggagaggactatgatgagcgtgtgctgccgtccatcacaactgagatcctcaagtcagtggtggctcgctttgatgctggagaactaatcacccagagagagctggtctccaggcaggtgagcgacgaccttacagagcgagccgccacctttgggctcatcctggatgacgtgtccttgacacatctgaccttcgggaaggagttcacagaagcggtggaagccaaacaggtggctcagcaggaagcagagagggccagatttgtggtggaaaaggctgagcaacagaaaaaggcggccatcatctctgctgagggcgactccaaggcagctgagctgattgccaactcactggccactgcaggggatggcctgatcgagctgcgcaagctggaagctgcagaggacatcgcgtaccagctctcacgctctcggaacatcacctacctgccagcggggcagtccgtgctcctccagctgccccagtgagggcccaccctgcctgcacctccgcgggctgactgggccacagccccgatgattcttaacacagccttccttctgctcccaccccagaaatcactgtgaaatttcatgattggcttaaagtgaaggaaataaaggtaaaatcacttcagatctctaa

SEQ ID NO: 309485 - DNA, 1055 bp, Homo sapiens
gcggggcagaggagctcatgcgcagtatgtgtggttggggaattcatgtggaggtcagagtggaagcaggtgtgagagggtccagcagaaggaaacatggctgccaaagtgtttgagtccattggcaagtttggcctggccttagctgttgcaggaggcgtggtgaactctgccttatataatgtggatgctgggcacagagctgtcatctttgaccgattccgtggagtgcaggacattgtggtaggggaagggactcattttctcatcccgtgggtacagaaaccaattatctttgactgccgttctcgaccacgtaatgtgccagtcatcactggtagcaaagatttacagaatgtcaacatcacactgcgcatcctcttccggcctgtcgccagccagcttcctcgcatcttcaccagcatcggagaggactatgatgagcgtgtgctgccgtccatcacaactgagatcctcaagtcagtggtggctcgctttgatgctggagaactaatcacccagagagagctggtctccaggcaggtgagcgacgaccttacagagcgagccgccacctttgggctcatcctggatgacgtgtccttgacacatctgaccttcgggaaggagttcacagaagcggtggaagccaaacaggtggctcagcaggaagcagagagggccagatttgtggtggaaaaggctgagcaacagaaaaaggcggccatcatctctgctgagggcgactccaaggcagctgagctgattgccaactcactggccactgcaggggatggcctgatcgagctgcgcaagctggaagctgcagaggacatcgcgtaccagctctcacgctctcggaacatcactactgcaggggcagacgggactcatgccaatgggacccctgctggactcggggttctgtcacccacgtgtttaaagtcttggcccccaatatggaaatcgaggtaagagagaagaacactaaaaagggatatactaggcacccactaaggtccagaatacgggaacaaagagtaacgtcgcaaaaa

SEQ ID NO: 309486 - DNA, 910 bp, Homo sapiens
tccgagggttacagtggataggtggatgctgggcacagagctgtcatctttgaccgattccgtggagtgcaggacattgtggtaggggaagggactcattttctcatcccgtgggtacagaaaccaattatctttgactgccgttctcgaccacgtaatgtgccagtcatcactggtagcaaagatttacagaatgtcaacatcacactgcgcatcctcttccggcctgtcgccagccagcttcctcgcatcttcaccagcatcggagaggactatgatgagcgtgtgctgccgtccatcacaactgagatcctcaagtcagtggtggctcgctttgatgctggagaactaatcacccagagagagctggtctccaggcaggtgagcgacgaccttacagagcgagccgccacctttgggctcatcctggatgacgtgtccttgacacatctgaccttcgggaaggagttcacagaagcggtggaagccaaacaggtggctcagcaggaagcagagagggccagatttgtggtggaaaaggctgagcaacagaaaaaggcggccatcatctctgctgagggcgactccaaggcagctgagctgattgccaactcactggccactgcaggggatggcctgatcgagctgcgcaagctggaagctgcagaggacatcgcgtaccagctctcacgctctcggaacatcacctacctgccagcggggcagtccgtgctcctccagctgccccagtgagggcccaccctgcctgcacctccgcgggctgactgggccacagccccgatgattcttaacacagccttccttctgctcccaccccagaaatcactgtgaaatttcatgattggcttaaagtgaaggaaataaaggtaaaatcacttcagatctctaa

SEQ ID NO: 309487 - DNA, 1149 bp, Homo sapiens
atgtctcgggggaaggcccggtggatgtcccgggaggtaagagggcttatgaaccatgttccaaacctttgcgttgcttttctttccatcgtgtctatttcataacatccctgtgaggctggatgtgggaacttcagcactgccgtactcttgggaaatttgtccaaggccacccggctgagcagcggttgaaccaggacaccatcaggcatgcgtttcttgtctccaccacaccctcaacccactccccgcgccgtccgctggatgctgggcacagagctgtcatctttgaccgattccgtggagtgcaggacattgtggtaggggaagggactcattttctcatcccgtgggtacagaaaccaattatctttgactgccgttctcgaccacgtaatgtgccagtcatcactggtagcaaagatttacagaatgtcaacatcacactgcgcatcctcttccggcctgtcgccagccagcttcctcgcatcttcaccagcatcggagaggactatgatgagcgtgtgctgccgtccatcacaactgagatcctcaagtcagtggtggctcgctttgatgctggagaactaatcacccagagagagctggtctccaggcaggtgagcgacgaccttacagagcgagccgccacctttgggctcatcctggatgacgtgtccttgacacatctgaccttcgggaaggagttcacagaagcggtggaagccaaacaggtggctcagcaggaagcagagagggccagatttgtggtggaaaaggctgagcaacagaaaaaggcggccatcatctctgctgagggcgactccaaggcagctgagctgattgccaactcactggccactgcaggggatggcctgatcgagctgcgcaagctggaagctgcagaggacatcgcgtaccagctctcacgctctcggaacatcacctacctgccagcggggcagtccgtgctcctccagctgccccagtgagggcccaccctgcctgcacctccgcgggctgactgggccacagccccgatgattcttaacacagccttccttctgctcccaccccagaaatcactgtgaaatttcatgattggcttaaagtgaaggaaataaaggtaaaatcacttcagatctctaa

SEQ ID NO: 309488 - DNA, 842 bp, Homo sapiens
taaggggggcaccatacggctaggtacgaggccgggtggtggaagcagacagaaaccaattatctttgactgccgttctcgaccacgtaatgtgccagtcatcactggtagcaaagatttacagaatgtcaacatcacactgcgcatcctcttccggcctgtcgccagccagcttcctcgcatcttcaccagcatcggagaggactatgatgagcgtgtgctgccgtccatcacaactgagatcctcaagtcagtggtggctcgctttgatgctggagaactaatcacccagagagagctggtctccaggcaggtgagcgacgaccttacagagcgagccgccacctttgggctcatcctggatgacgtgtccttgacacatctgaccttcgggaaggagttcacagaagcggtggaagccaaacaggtggctcagcaggaagcagagagggccagatttgtggtggaaaaggctgagcaacagaaaaaggcggccatcatctctgctgagggcgactccaaggcagctgagctgattgccaactcactggccactgcaggggatggcctgatcgagctgcgcaagctggaagctgcagaggacatcgcgtaccagctctcacgctctcggaacatcacctacctgccagcggggcagtccgtgctcctccagctgccccagtgagggcccaccctgcctgcacctccgcgggctgactgggccacagccccgatgattcttaacacagccttccttctgctcccaccccagaaatcactgtgaaatttcatgattggcttaaagtgaaggaaataaaggtaaaatcacttcagatctctaa

SEQ ID NO: 309489 - DNA, 1903 bp, Homo sapiens
gcggggcagaggagctcatgcgcagtatgtgtggttggggaattcatgtggaggtcagagtggaagcaggtgtgagagggtccagcagaaggaaacatggctgccaaagtgtttgagtccattggcaagtttggcctggccttagctgttgcaggaggcgtggtgaactctgccttatataatgtggatgctgggcacagagctgtcatctttgaccgattccgtggagtgcaggacattgtggtaggggaagggactcattttctcatcccgtgggtacagaaaccaattatctttgactgccgttctcgaccacgtaatgtgccagtcatcactggtagcaaagatttacagaatgtcaacatcacactgcgcatcctcttccggcctgtcgccagccagcttcctcgcatcttcaccagcatcggagaggactatgatgagcgtgtgctgccgtccatcacaactgagatcctcaagtcagtggtgtaatcacccagagagagctggtctccaggcaggtgagcgacgaccttacagagcgagccgccacctttgggctcatcctggatgacgtgtccttgacacatctgaccttcgggaaggagttcacagaagcggtggaagccaaacaggtggctcagcaggaagcagagagggccagatttgtggtggaaaaggctgagcaacagaaaaaggcggccatcatctctgctgagggcgactccaaggcagctgagctgattgccaactcactggccactgcaggggatggcctgatcgagctgcgcaagctggaagctgcagaggacatcgcgtaccagctctcacgctctcggaacatcacctacctgccagcggggcagtccgtgctcctccagctgccccagtgagggcccaccctgcctgcacctccgcgggctgactgggccacagccccgatgattcttaacacagccttccttctgctcccaccccagaaatcactgtgaaatttcatgattggcttaaagtgaaggaaataaaggtaaaatcacttcagatctctaattagtctatcaaatgaaactctttcattcttctcacatccatctacttttttatccacctccctaccaaaaattgccaagtgcctatgcaaaccagctttaggtcccaattcggggcctgctggagttccggcctgggcaccagcatttggcagcacgcaggcggggcagtatgtgatggactggggagcacaggtgtctgcctagatccacgtgtggcctccgtcctgtcactgatggaaggtttgcggatgagggcatgtgcggctgaactgagaaggcaggcctccgtcttcccagcggttcctgtgcagatgctgctgaagagaggtgccggggaggggcagagaggaagtggtctgtctgttaccataagtctgattctctttaactgtgtgaccagcggaaacaggtgtgtgtgaactgggcacagattgaagaatctgcccctgttgaggtgggtgggcctgactgttgccccccagggtcctaaaacttggatggacttgtatagtgagagaggaggcctggaccgagatgtgagtcctgttgaagacttcctctctaccccccaccttggtccctctcagatacccagtggaattccaacttgaaggattgcatcctgctggggctgaacatgcctgccaaagacgtgtccgacctacgttcctggccccctcgttcagagactgcccttctcacgggctctatgcctgcactgggaaggaaacaaatgtgtataaactgctgtcaataaatgacacccagaccttccggctcaaaaaaaagacacccacgcccacacaggaccataccacacgccgctcacgacaggagctttcccgcgcccc

SEQ ID NO: 309490 - DNA, 1272 bp, Homo sapiens
gaggatttctattggatacgcggatacgggcagatttgtggtggaaaaggctgagcaacagaaaaaggcggccatcatctctgctgagggcgactccaaggcagctgagctgattgccaactcactggccactgcaggggatggcctgatcgagctgcgcaagctggaagctgcagaggacatcgcgtaccagctctcacgctctcggaacatcacctacctgccagcggggcagtccgtgctcctccagctgccccagtgagggcccaccctgcctgcacctccgcgggctgactgggccacagccccgatgattcttaacacagccttccttctgctcccaccccagaaatcactgtgaaatttcatgattggcttaaagtgaaggaaataaaggtaaaatcacttcagatctctaattagtctatcaaatgaaactctttcattcttctcacatccatctacttttttatccacctccctaccaaaaattgccaagtgcctatgcaaaccagctttaggtcccaattcggggcctgctggagttccggcctgggcaccagcatttggcagcacgcaggcggggcagtatgtgatggactggggagcacaggtgtctgcctagatccacgtgtggcctccgtcctgtcactgatggaaggtttgcggatgagggcatgtgcggctgaactgagaaggcaggcctccgtcttcccagcggttcctgtgcagatgctgctgaagagaggtgccggggaggggcagagaggaagtggtctgtctgttaccataagtctgattctctttaactgtgtgaccagcggaaacaggtgtgtgtgaactgggcacagattgaagaatctgcccctgttgaggtgggtgggcctgactgttgccccccagggtcctaaaacttggatggacttgtatagtgagagaggaggcctggaccgagatgtgagtcctgttgaagacttcctctctaccccccaccttggtccctctcagatacccagtggaattccaacttgaaggattgcatcctgctggggctgaacatgcctgccaaagacgtgtccgacctacgttcctggccccctcgttcagagactgcccttctcacgggctctatgcctgcactgggaaggaaacaaatgtgtataaactgctgtcaataaatgacacccagaccttccggctcaaaaaaaagacacccacgcccacacaggaccataccacacgccgctcacgacaggagctttcccgcgcccc

SEQ ID NO: 309491 - DNA, 1425 bp, Homo sapiens
gcggggcagaggagctcatgcgcagtatgtgtggttggggaattcatgtggaggtcagagtggaagcaggtgtgagagggtccagcagaaggaaacatggctgccaaagtgtttgagtccattggcaagtttggcctggccttagctgttgcaggaggcgtggtgaactctgccttatataatgtggatgctgggcacagagctgtcatctttgaccgattccgtggagtgcaggacattgtggtaggggaagggactcattttctcatcccgtgggtacagaaaccaattatctttgactgccgttctcgaccacgtaatgtgccagtcatcactggtagcaaagctctcacgctctcggaacatcacctacctgccagcggggcagtccgtgctcctccagctgccccagtgagggcccaccctgcctgcacctccgcgggctgactgggccacagccccgatgattcttaacacagccttccttctgctcccaccccagaaatcactgtgaaatttcatgattggcttaaagtgaaggaaataaaggtaaaatcacttcagatctctaattagtctatcaaatgaaactctttcattcttctcacatccatctacttttttatccacctccctaccaaaaattgccaagtgcctatgcaaaccagctttaggtcccaattcggggcctgctggagttccggcctgggcaccagcatttggcagcacgcaggcggggcagtatgtgatggactggggagcacaggtgtctgcctagatccacgtgtggcctccgtcctgtcactgatggaaggtttgcggatgagggcatgtgcggctgaactgagaaggcaggcctccgtcttcccagcggttcctgtgcagatgctgctgaagagaggtgccggggaggggcagagaggaagtggtctgtctgttaccataagtctgattctctttaactgtgtgaccagcggaaacaggtgtgtgtgaactgggcacagattgaagaatctgcccctgttgaggtgggtgggcctgactgttgccccccagggtcctaaaacttggatggacttgtatagtgagagaggaggcctggaccgagatgtgagtcctgttgaagacttcctctctaccccccaccttggtccctctcagatacccagtggaattccaacttgaaggattgcatcctgctggggctgaacatgcctgccaaagacgtgtccgacctacgttcctggccccctcgttcagagactgcccttctcacgggctctatgcctgcactgggaaggaaacaaatgtgtataaactgctgtcaataaatgacacccagaccttccggctcaaaaaaaagacacccacgcccacacaggaccataccacacgccgctcacgacaggagctttcccgcgcccc

SEQ ID NO: 309492 - DNA, 981 bp, Homo sapiens
gcggggcagaggagctcatgcgcagtatgtgtggttggggaattcatgtggaggtcagagtggaagcagttatcttggccccaggatgtcatccagctcctgcttccataagaagcatgtcgttcttaatacacgatgttgacaagcagtatggtgaggaggtgtgagagggtccagcagaaggaaacatggctgccaaagtgtttgagtccattggcaagtttggcctggccttagctgttgcaggaggcgtggtgaactctgccttatataatgtggatgctgggcacagagctgtcatctttgaccgattccgtggagtgcaggacattgtggtaggggaagggactcattttctcatcccgtgggtacagaaaccaattatctttgactgccgttctcgaccacgtaatgtgccagtcatcactggtagcaaagatttacagaatgtcaacatcacactgcgcatcctcttccggcctgtcgccagccagcttcctcgcatcttcaccagcatcggagaggactatgatgagcgtgtgctgccgtccatcacaactgagatcctcaagtcagtggtggctcgctttgatgctggagaactaatcacccagagagagctggtctccaggcaggtgagcgacgaccttacagagcgagccgccacctttgggctcatcctggatgacgtgtccttgacacatctgaccttcgggaaggagttcacagaagcggtggaagccaaacaggtggctcagcaggaagcagagagggccagatttgtggtggaaaaggctgagcaacagaaaaaggcggccatcatctctgctgagggcgactccaaggcagctgagctgattgccaactcactggccactgcaggggatggcctgatcggaaagaggactggagagaatcgcggacacatctcagcccggacaaaacatacgggagggggagcgcgcaccgatgccacagggg

SEQ ID NO: 309493 - DNA, 967 bp, Homo sapiens
gcggggcagaggagctcatgcgcagtatgtgtggttggggaattcatgtggaggtcagagtggaagcaggtgtgagagggtccagcagaaggaaacatggctgccaaagtgtttgagtccattggcaagtttggcctggccttagctgttgcaggaggcgtggtgaactctgccttatataatgtggatgctgggcacagagctgtcatctttgaccgattccgtggagtgcaggacattgtggtaggggaagggactcattttctcatcccgtgggtacagaaaccaattatctttgactgccgttctcgaccacgtaatgtgccagtcatcactggtagcaaagatttacagaatgtcaacatcacactgcgcatcctcttccggcctgtcgccagccagcttcctcgcatcttcaccagcatcggagaggactatgatgagcgtgtgctgccgtccatcacaactgagatcctcaagtcagtggtggctcgctttgatgctggagaactaatcacccagagagagctggtctccaggcaggtgagcgacgaccttacagagcgagccgccacctttgggctcatcctggatgacgtgtccttgacacatttggaaccttccggggaagggagttcacacagacgcggcgggaagtccacatcaggtgggcctcgcgggaaccccagagggcccgactatgcggctggaccaccgctgcgccactggaacacaggcgcactcactctctccctgagcgggacctccggcactgacgacgacttgcaactccatgcccacgcccgggcatgctccagctctactctcacacgcgagtccagcaatcggaacacctagcgcactgacaacacatcacacagcggcgtctcctcgccacagggccacgcgcctccgcactgcccaccatcaccaacgcgcccaacgaaccacgccgagggtgccccac

SEQ ID NO: 309494 - DNA, 600 bp, Homo sapiens
gcggggcagaggagctcatgcgcagtatgtgtggttggggaattcatgtggaggtcagagtggaagcaggtgtgagagggtccagcagaaggaaacatggctgccaaagtgtttgagtccattggcaagtttggcctggccttagctgttgcaggaggcgtggtgaactctgccttatataatgtggatgctgggcacagagctgtcatctttgaccgattccgtggagtgcaggacattgtggtaggggaagggactcattttctcatcccgtgggtacagaaaccaattatctttgactgccgttctcgaccacgtaatgtgccagtcatcactggtagcaaagatttacagactgtcaacatcacactgcgcatcctaggaacggcggcaagaggcacagccagtggcggcagcaggggtgggcatccgggctaaggctttacttggcggtagtctcatcggattttgcagcttctgggcccccaagctgggcccgcgactcgaaggtgactgggatggtgatctcgttggactgcgtggctagcttgggcattgggggctccacggtcagtgtgccctcaggggacagggaggagg

SEQ ID NO: 309495 - DNA, 572 bp, Homo sapiens
gcggggcagaggagctcatgcgcagtatgtgtggttggggaattcatgtggaggtcagagtggaagcaggtgtgagagggtccagcagaaggaaacatggctgccaaagtgtttgagtccattggcaagtttggcctggccttagctgttgcaggaggcgtggtgaactctgccttatataatgtggatgctgggcacagagctgtcatctttgaccgattccgtggagtgcaggacattgtggtaggggaagggactcattttctcatcccgtgggtacagaaaccaattatctttgactgccgttctcgaccacgtaatgtgccagtcatcactggtagcaaagctctcacgctctcggaacatcacctacctgccagcggggcagtccgtgctcctccagctgccccagtgagggcccaccctgcctgcacctccgcgggctgactgggccacagccccgatgattcttaacacagccttccttctgctcccaccccagaaatcactgtgaaatttcatgattggcttaaagtgaaggaaataaaggtaaaatcacttcagatctctaa

SEQ ID NO: 309496 - DNA, 765 bp, Homo sapiens
  misc_feature (730)..(730): n is a, c, g, or t
  misc_feature (744)..(744): n is a, c, g, or t
gcggggcagaggagctcatgcgcagtatgtgtggttggggaattcatgtggaggtcagagtggaagcaggtgtgagagggtccagcagaaggaaacatggctgccaaagtgtttgagtccattggcaagtttggcctggccttagctgttgcaggaggcgtggtgaactctgccttatataatgtggatgctgggcacagagctgtcatctttgaccgattccgtggagtgcaggacattgtggtaggggaagggactcattttctcatcccgtgggtacagaaaccaattatctttgactgccgttctcgaccacgtaatgtgccagtcatcactggtagcaaagatttacagaatgtcaacatcacactgcgcatcctcttccggcctgtcgccagccagcttcctcgcatcttcaccagcatcggagaggactatgatgagcgtgtgctgccgtccatcacaactgagatcctcaagtcagtggtggctcgctttgatgctggagaactaatcacccagagagagctggtctccaggcaggtgagcgacgaccttacagagcgagccgccacctttgggctcatcctggatgacgtgtccttgacacatctgaccttcgggaaggagttcacagaagcggtggaagccaaacaggtggctcagcaggaagcagagagggccagatttgtggtggaaaagaagggcttgaagcaaacaagaaaaaaangggcgggccaatcnatctcctggcttgaaggggcc

SEQ ID NO: 309497 - DNA, 909 bp, Homo sapiens
  misc_feature (34)..(34): n is a, c, g, or t
gggctgttggaattcggcactaggtggaggtcanagtggaagcaggtgtgagagggtccagcagaaggaaacatggctgccaaagtgtttgagtccattggcaagtttggcctggccttagctgttgcaggaggcgtggtgaactctgccttatataatgtggatgctgggcacagagctgtcatctttgaccgattccgtggagtgcaggacattgtggtaggggaagggactcattttctcatcccgtgggtacagaaaccaattatctttgactgccgttctcgaccacgtaatgtgccagtcatcactggtagcaaagatttacagaatgtcaacatcacactgcgcatcctcttccggcctgtcgccagccagcttcctcgcatcttcaccagcatcggagaggactatgatgagcgtgtgctgccgtccatcacaactgagatcctcaagtcagtggtggctcgctttgatgctggagaactaatcacccagagagagctggtctccaggcaggtgagcgacgaccttacagagcgagccgccacctttgggctcatcctggatgacgtgtccttgacacatctgaccttcgggaaggagttcacagaagcggtggaagccaaacaggtggctcagcaggaagcagagagggccagatttgtggtggaaaaggctgagcaacagaaaaaggcggccatcatctctgctgagggcgactccaaggcagctgagctgattgccaactcactggccactgcaggggatggcctgatcgatgaacgggcaagttgaagtgcaagaccttggtaccattttcagccttcggaataactactgccggggcacgggtccccactgcctgaggccccctcgccccggtatggcagcctgttttaagttttc

SEQ ID NO: 309498 - DNA, 977 bp, Homo sapiens
acttccagagaagctggttataaaaaaccagcaatttcacaaggagccaggctgtgcaaatctgggtggctgctctcgtgtgtgagagggtccagcagaaggaaacatggctgccaaagtgtttgagtccattggcaagtttggcctggccttagctgttgcaggaggcgtggtgaactctgccttatataatgtggatgctgggcacagagctgtcatctttgaccgattccgtggagtgcaggacattgtggtaggggaagggactcattttctcatcccgtgggtacagaaaccaattatctttgactgccgttctcgaccacgtaatgtgccagtcatcactggtagcaaagatttacagaatgtcaacatcacactgcgcatcctcttccggcctgtcgccagccagcttcctcgcatcttcaccagcatcggagaggactatgatgagcgtgtgctgccgtccatcacaactgagatcctcaagtcagtggtggctcgctttgatgctggagaactaatcacccagagagagctggtctccaggcaggtgagcgacgaccttacagagcgagccgccacctttgggctcatcctggatgacgtgtccttgacacatttggaaccttccggggaagggagttcacacagacgcggcgggaagtccacatcaggtgggcctcgcgggaaccccagagggcccgactatgcggctggaccaccgctgcgccactggaacacaggcgcactcactctctccctgagcgggacctccggcactgacgacgacttgcaactccatgcccacgcccgggcatgctccagctctactctcacacgcgagtccagcaatcggaacacctagcgcactgacaacacatcacacagcggcgtctcctcgccacagggccacgcgcctccgcactgcccaccatcaccaacgcgcccaacgaaccacgccgagggtgccccac

SEQ ID NO: 309499 - DNA, 1925 bp, Homo sapiens
gcggggcagaggagctcatgcgcagtatgtgtggttggggaattcatgtggaggtcagagtggaagcaggtgtgagagggtccagcagaaggaaacatggctgccaaagtgtttgagtccattggcaagtttggcctggccttagctgttgcaggaggcgtggtgaactctgccttatataatgtggatgctgggcacagagctgtcatctttgaccgattccgtggagtgcaggacattgtggtaggggaagggactcattttctcatcccgtgggtacagaaaccaattatctttgactgccgttctcgaccacgtaatgtgccagtcatcactggtagcaaagatttacagaatgtcaacatcacactgcgcatcctcttccggcctgtcgccagccagcttcctcgcatcttcaccagcatcggagaggactatgatgagcgtgtgctgccgtccatcacaactgagatcctcaagtcagtggtggctcgctttgatgctggagaactaatcacccagagagagctggtctccaggcaggtgagcgacgaccttacagagcgagccgccacctttgggctcatcctggatgacgtgtccttgacacatctgaccttcgggaaggagttcacagaagcggtggaagccaaacaggtggctcagcaggaagcagagagggccagatttgtggtggaaaaggctgagcaacagaaaaaggcggccatcatctctgctgagggcgactccaaggcagctgagctgattgccaactcactggccactgcaggggatggcctgatcgagctgcgcaagctggaagctgcagaggacatcgcgtaccagctctcacgctctcggaacatcacctacctgccagcggggcagtccgtgctcctccagctgccccagtgagggcccaccctgcctgcacctccgcgggctgactgggccacagccccgatgattcttaacacagccttccttctgctcccaccccagaaatcactgtgaaatttcatgattggcttaaagtgaaggaaataaaggtaaaatcacttcagatctctaattagtctatcaaatgaaactctttcattcttctcacatccatctacttttttatccacctccctaccaaaaattgccaagtgcctatgcaaaccagctttaggtcccaattcggggcctgctggagttccggcctgggcaccagcatttggcagcacgcaggcggggcagtatgtgatggactggggagcacaggtgtctgcctagatccacgtgtggcctccgtcctgtcactgatggaaggtttgcggatgagggcatgtgcggctgaactgagaaggcaggcctccgtcttcccagcggttcctgtgcagatgctgctgaagagaggtgccggggaggggcagagaggaagtggtctgtctgttaccataagtctgattctctttaactgtgtgaccagcggaaacaggtgtgtgtgaactgggcacagattgaagaatctgcccctgttgaggtgggtgggcctgactgttgccccccagggtcctaaaacttggatggacttgtatagtgagagaggaggcctggaccgagatgtgagtcctgttgaagacttcctctctaccccccaccttggtccctctcagatacccagtggaattccaacttgaaggattgcatcctgctggggctgaacatgcctgccaaagacgtgtccgacctacgttcctggccccctcgttcagagactgcccttctcacgggctctatgcctgcactgggaaggaaacaaatgtgtataaactgctgtcaataaatgacacccagaccttccggctcaaaaaaaagacacccacgcccacacaggaccataccacacgccgctcacgacaggagctttcccgcgcccc

SEQ ID NO: 309500 - DNA, 1727 bp, Homo sapiens
gcggggcagaggagctcatgcgcagtatgtgtggttggggaattcatgtggaggtcagagtggaagcaggtgtgagagggtccagcagaaggaaacatggctgccaaagtgtttgagtccattggcaagtttggcctggccttagctgttgcaggaggcgtggtgaactctgccttatataatgtggatgctgggcacagagctgtcatctttgaccgattccgtggagtgcaggacattgtggtaggggaagggactcattttctcatcccgtgggtacagaaaccaattatctttgactgccgttctcgaccacgtaatgtgccagtcatcactggtagcaaagatttacagaatgtcaacatcacactgcgcatcctcttccggcctgtcgccagccagcttcctcgcatcttcaccagcatcggagaggactatgatgagcgtgtgctgccgtccatcacaactgagatcctcaagtcagtggtggctcgctttgatgctggagaactaatcacccagagagagctggtctccaggcaggtgagcgacgaccttacagagcgagccgccacctttgggctcatcctggatgacgtgtccttgacacatctgaccttcgggaaggagttcacagaagcggtggaagccaaacaggtggctcagcaggaagcagagagggccagatttgtggtggaaaaggctgagcaacagaaaaaggcggccatcatctctgctgagggcgactccaaggcagctgagctgattgccaactcactggccactgcaggggatggcctgatcgagctgcgcaagctggaagctgcagaggacatcgcgtaccagctctcacgctctcggaacatcacctacctgccagcggggcagtccgtgctcctccagctgccccagtgagggcccaccctgcctgcacctccgcgggctgactgggccacagccccgatgattcttaacacagccttccttctgctcccaccccagaaatcactgtgaaatttcatgattggcttaaagtgaaggaaataaaggtaaaatcacttcagatctctaattagtctatcaaatgaaactctttcattcttctcacatccatctacttttttatccacctccctaccaaaaattgccaagtgcctatgcaaaccagctttaggtcccaattcggggcctgctggagttccggcctgggcaccagcatttggcagcacgcaggcggggcagtatgtgatggactggggagcacaggtgtctgcctagatccacgtgtggcctccgtcctgtcactgatggaaggtttgcggatgagggcatgtgcggctgaactgagaaggcaggcctccgtcttcccagcggttcctgtgcagatgctgctgaagagaggtgccggggaggggcagagaggaagtggtctgtctgttaccataagtctgattctctttaactgtgtgaccagcggaaacaggtgtgtgtgaactgggcacagattgaagaatctgcccctgttgaggtgggtgggcctgactgttgcccccctcgttcagagactgcccttctcacgggctctatgcctgcactgggaaggaaacaaatgtgtataaactgctgtcaataaatgacacccagaccttccggctcaaaaaaaagacacccacgcccacacaggaccataccacacgccgctcacgacaggagctttcccgcgcccc

SEQ ID NO: 309501 - DNA, 1090 bp, Homo sapiens
tactggtgcagcggttagcggttatgcgtacggccacgttcttggtgaggtgttggggaattcatgtggaggtcagagtggaagcaggtgtgagagggtccagcagaaggaaacatggctgccaaagtgtttgagtccattggcaagtttggcctggccttagctgttgcaggaggcgtggtgaactctgccttatataatgtggatgctgggcacagagctgtcatctttgaccgattccgtggagtgcaggacattgtggtaggggaagggactcattttctcatcccgtgggtacagaaaccaattatctttgactgccgttctcgaccacgtaatgtgccagtcatcactggtagcaaagatttacagaatgtcaacatcacactgcgcatcctcttccggcctgtcgccagccagcttcctcgcatcttcaccagcatcggagaggactatgatgagcgtgtgctgccgtccatcacaactgagatcctcaagtcagtggtggctcgctttgatgctggagaactaatcacccagagagagctggtctccaggcaggtgagcgacgaccttacagagcgagccgccacctttgggctcatcctggatgacgtgtccttgacacatctgaccttcgggaaggagttcacagaagcggtggaagccaaacaggtggctcagcaggaagcagagagggccagatttgtggtggaaaaggctgagcaacagaaaaaggcggccatcatctctgctgagggcgactccaaggcagctgagctgattgccaactcactggccactgcaggggatggcctgatcgagctgcgcaagctggaagctgcagaggacatcgcgtaccagctctcacgctctcggaacatcacctacctgccagcggggcagtccgtgctcctccagctgccccagtgagggcccaccctgcctgcacctccgcgggctgactgggccacagccccgatgattcttaacacagccttccttctgctcccaccccagaaatcactgtgaaatttcatgattggcttaaagtgaaggaaataaaggtaaaatcacttcagatctctaa

SEQ ID NO: 309502 - DNA, 1164 bp, Homo sapiens
gcggggcagaggagctcatgcgcagtatgtgtggttggggaattcatgtggaggtcagagtggaagcagttatcttggccccaggatgtcatccagctcctgcttccataagaagcatgtcgttcttaatacacgatgttgacaagcagtatggtgaggaggtgtgagagggtccagcagaaggaaacatggctgccaaagtgtttgagtccattggcaagtttggcctggccttagctgttgcaggaggcgtggtgaactctgccttatataatgtggatgctgggcacagagctgtcatctttgaccgattccgtggagtgcaggacattgtggtaggggaagggactcattttctcatcccgtgggtacagaaaccaattatctttgactgccgttctcgaccacgtaatgtgccagtcatcactggtagcaaagatttacagaatgtcaacatcacactgcgcatcctcttccggcctgtcgccagccagcttcctcgcatcttcaccagcatcggagaggactatgatgagcgtgtgctgccgtccatcacaactgagatcctcaagtcagtggtggctcgctttgatgctggagaactaatcacccagagagagctggtctccaggcaggtgagcgacgaccttacagagcgagccgccacctttgggctcatcctggatgacgtgtccttgacacatctgaccttcgggaaggagttcacagaagcggtggaagccaaacaggtggctcagcaggaagcagagagggccagatttgtggtggaaaaggctgagcaacagaaaaaggcggccatcatctctgctgagggcgactccaaggcagctgagctgattgccaactcactggccactgcaggggatggcctgatcgagctgcgcaagctggaagctgcagaggacatcgcgtaccagctctcacgctctcggaacatcacctacctgccagcggggcagtccgtgctcctccagctgccccagtgagggcccaccctgcctgcacctccgcgggctgactgggccacagccccgatgattcttaacacagccttccttctgctcccaccccagaaatcactgtgaaatttcatgattggcttaaagtgaaggaaataaaggtaaaatcacttcagatctctaa

SEQ ID NO: 309503 - DNA, 1040 bp, Homo sapiens
  misc_feature (18)..(18): n is a, c, g, or t
  misc_feature (20)..(20): n is a, c, g, or t
aatagctagtagaggctngngtgaatcggccgaggaggtgtgagagggtccagcagaaggaaacatggctgccaaagtgtttgagtccattggcaagtttggcctggccttagctgttgcaggaggcgtggtgaactctgccttatataatgtggatgctgggcacagagctgtcatctttgaccgattccgtggagtgcaggacattgtggtaggggaagggactcattttctcatcccgtgggtacagaaaccaattatctttgactgccgttctcgaccacgtaatgtgccagtcatcactggtagcaaagatttacagaatgtcaacatcacactgcgcatcctcttccggcctgtcgccagccagcttcctcgcatcttcaccagcatcggagaggactatgatgagcgtgtgctgccgtccatcacaactgagatcctcaagtcagtggtggctcgctttgatgctggagaactaatcacccagagagagctggtctccaggcaggtgagcgacgaccttacagagcgagccgccacctttgggctcatcctggatgacgtgtccttgacacatctgaccttcgggaaggagttcacagaagcggtggaagccaaacaggtggctcagcaggaagcagagagggccagatttgtggtggaaaaggctgagcaacagaaaaaggcggccatcatctctgctgagggcgactccaaggcagctgagctgattgccaactcactggccactgcaggggatggcctgatcgagctgcgcaagctggaagctgcagaggacatcgcgtaccagctctcacgctctcggaacatcacctacctgccagcggggcagtccgtgctcctccagctgccccagtgagggcccaccctgcctgcacctccgcgggctgactgggccacagccccgatgattcttaacacagccttccttctgctcccaccccagaaatcactgtgaaatttcatgattggcttaaagtgaaggaaataaaggtaaaatcacttcagatctctaa

SEQ ID NO: 309504 - DNA, 1030 bp, Homo sapiens
gaacaggggctagggagcaggggatatgtgtgagagggtccagcagaaggaaacatggctgccaaagtgtttgagtccattggcaagtttggcctggccttagctgttgcaggaggcgtggtgaactctgccttatataatgtggatgctgggcacagagctgtcatctttgaccgattccgtggagtgcaggacattgtggtaggggaagggactcattttctcatcccgtgggtacagaaaccaattatctttgactgccgttctcgaccacgtaatgtgccagtcatcactggtagcaaagatttacagaatgtcaacatcacactgcgcatcctcttccggcctgtcgccagccagcttcctcgcatcttcaccagcatcggagaggactatgatgagcgtgtgctgccgtccatcacaactgagatcctcaagtcagtggtggctcgctttgatgctggagaactaatcacccagagagagctggtctccaggcaggtgagcgacgaccttacagagcgagccgccacctttgggctcatcctggatgacgtgtccttgacacatctgaccttcgggaaggagttcacagaagcggtggaagccaaacaggtggctcagcaggaagcagagagggccagatttgtggtggaaaaggctgagcaacagaaaaaggcggccatcatctctgctgagggcgactccaaggcagctgagctgattgccaactcactggccactgcaggggatggcctgatcgagctgcgcaagctggaagctgcagaggacatcgcgtaccagctctcacgctctcggaacatcacctacctgccagcggggcagtccgtgctcctccagctgccccagtgagggcccaccctgcctgcacctccgcgggctgactgggccacagccccgatgattcttaacacagccttccttctgctcccaccccagaaatcactgtgaaatttcatgattggcttaaagtgaaggaaataaaggtaaaatcacttcagatctctaa

SEQ ID NO: 309505 - DNA, 1032 bp, Homo sapiens
acgcgtccgcggacgcgtgggggaagcaggtgtgagagggtccagcagaaggaaacatggctgccaaagtgtttgagtccattggcaagtttggcctggccttagctgttgcaggaggcgtggtgaactctgccttatataatgtggatgctgggcacagagctgtcatctttgaccgattccgtggagtgcaggacattgtggtaggggaagggactcattttctcatcccgtgggtacagaaaccaattatctttgactgccgttctcgaccacgtaatgtgccagtcatcactggtagcaaagatttacagaatgtcaacatcacactgcgcatcctcttccggcctgtcgccagccagcttcctcgcatcttcaccagcatcggagaggactatgatgagcgtgtgctgccgtccatcacaactgagatcctcaagtcagtggtggctcgctttgatgctggagaactaatcacccagagagagctggtctccaggcaggtgagcgacgaccttacagagcgagccgccacctttgggctcatcctggatgacgtgtccttgacacatctgaccttcgggaaggagttcacagaagcggtggaagccaaacaggtggctcagcaggaagcagagagggccagatttgtggtggaaaaggctgagcaacagaaaaaggcggccatcatctctgctgagggcgactccaaggcagctgagctgattgccaactcactggccactgcaggggatggcctgatcgagctgcgcaagctggaagctgcagaggacatcgcgtaccagctctcacgctctcggaacatcacctacctgccagcggggcagtccgtgctcctccagctgccccagtgagggcccaccctgcctgcacctccgcgggctgactgggccacagccccgatgattcttaacacagccttccttctgctcccaccccagaaatcactgtgaaatttcatgattggcttaaagtgaaggaaataaaggtaaaatcacttcagatctctaa

SEQ ID NO: 309506 - DNA, 933 bp, Homo sapiens
gcggggcagaggagctcatgcgcagtatgtgtggttggggaattcatgtggaggtcagagtggaagcaggtgtgagagggtccagcagaaggaaacatggctgccaaagtgtttgagtccattggcaagtttggcctggccttagctgttgcaggaggcgtggtgaactctgccttatataatgtggatgctgggcacagagctgtcatctttgaccgattccgtggagtgcaggacattgtggtaggggaagggactcattttctcatcccgtgggtacagaaaccaattatctttgactgccgttctcgaccacgtaatgtgccagtcatcactggtagcaaagatttacagaatgtcaacatcacactgcgcatcctcttccggcctgtcgccagccagcttcctcgcatcttcaccagcatcggagaggactatgatgagcgtgtgctgccgtccatcacaactgagatcctcaagtcagtggtggctcgctttgatgctggagaactaatcacccagagagagctggtctccaggcaggtgagcgacgaccttacagagcgagccgccacctttgggctcatcctggatgacgtgtccttgacacatctgaccttcgggaaggagttcacagaagcggtggaagccaaacaggtggctcagcaggaagcagagagggccagatttgtggtggaaaaggctgagcaacagaaaaaggcggccatcatctctgctgagggcgactccaaggcagctgagctgattgccaactcactggccactgcaggggatggcctgatcgatgaacgggcaagttgaagtgcaagaccttggtaccattttcagccttcggaataactactgccggggcacgggtccccactgcctgaggccccctcgccccggtatggcagcctgttttaagttttc

SEQ ID NO: 309507 - DNA, 1012 bp, Homo sapiens
  misc_feature (3)..(3): n is a, c, g, or t
tgntttcttactggatgtgtgtccgggcatttcatgtggcggtcagagtggaatcaggtgtgagagggtccagcagaaggaaacatggctgccaaagtgtttgagtccattggcaagtttggcctggccttagctgttgcaggaggcgtggtgaactctgccttatataatgtggatgctgggcacagagctgtcatctttgaccgattccgtggagtacagaaaccaattatctttgactgccgttctcgaccacgtaatgtgccagtcatcactggtagcaaagatttacagaatgtcaacatcacactgcgcatcctcttccggcctgtcgccagccagcttcctcgcatcttcaccagcatcggagaggactatgatgagcgtgtgctgccgtccatcacaactgagatcctcaagtcagtggtggctcgctttgatgctggagaactaatcacccagagagagctggtctccaggcaggtgagcgacgaccttacagagcgagccgccacctttgggctcatcctggatgacgtgtccttgacacatctgaccttcgggaaggagttcacagaagcggtggaagccaaacaggtggctcagcaggaagcagagagggccagatttgtggtggaaaaggctgagcaacagaaaaaggcggccatcatctctgctgagggcgactccaaggcagctgagctgattgccaactcactggccactgcaggggatggcctgatcgagctgcgcaagctggaagctgcagaggacatcgcgtaccagctctcacgctctcggaacatcacctacctgccagcggggcagtccgtgctcctccagctgccccagtgagggcccaccctgcctgcacctccgcgggctgactgggccacagccccgatgattcttaacacagccttccttctgctcccaccccagaaatcactgtgaaatttcatgattggcttaaagtgaaggaaataaaggtaaaatcacttcagatctctaa

SEQ ID NO: 309508 - DNA, 1353 bp, Homo sapiens
gtgtgtagttgttctagaggatccctgaggtagaacacatctgaccttcgggaaggagttcacagaagcggtggaagccaaacaggtggctcagcaggaagcagagagggccagatttgtggtggaaaaggctgagcaacagaaaaaggcggccatcatctctgctgagggcgactccaaggcagctgagctgattgccaactcactggccactgcaggggatggcctgatcgagctgcgcaagctggaagctgcagaggacatcgcgtaccagctctcacgctctcggaacatcacctacctgccagcggggcagtccgtgctcctccagctgccccagtgagggcccaccctgcctgcacctccgcgggctgactgggccacagccccgatgattcttaacacagccttccttctgctcccaccccagaaatcactgtgaaatttcatgattggcttaaagtgaaggaaataaaggtaaaatcacttcagatctctaattagtctatcaaatgaaactctttcattcttctcacatccatctacttttttatccacctccctaccaaaaattgccaagtgcctatgcaaaccagctttaggtcccaattcggggcctgctggagttccggcctgggcaccagcatttggcagcacgcaggcggggcagtatgtgatggactggggagcacaggtgtctgcctagatccacgtgtggcctccgtcctgtcactgatggaaggtttgcggatgagggcatgtgcggctgaactgagaaggcaggcctccgtcttcccagcggttcctgtgcagatgctgctgaagagaggtgccggggaggggcagagaggaagtggtctgtctgttaccataagtctgattctctttaactgtgtgaccagcggaaacaggtgtgtgtgaactgggcacagattgaagaatctgcccctgttgaggtgggtgggcctgactgttgccccccagggtcctaaaacttggatggacttgtatagtgagagaggaggcctggaccgagatgtgagtcctgttgaagacttcctctctaccccccaccttggtccctctcagatacccagtggaattccaacttgaaggattgcatcctgctggggctgaacatgcctgccaaagacgtgtccgacctacgttcctggccccctcgttcagagactgcccttctcacgggctctatgcctgcactgggaaggaaacaaatgtgtataaactgctgtcaataaatgacacccagaccttccggctcaaaaaaaagacacccacgcccacacaggaccataccacacgccgctcacgacaggagctttcccgcgcccc

SEQ ID NO: 309509 - DNA, 1397 bp, Homo sapiens
ccagtgttggtttgagtttgtttctttactgaattcatgggcctgttgaattttagtggagcggacccgctcccctcacatccgtactggcccggaatgctgcgagagccaggaagtctcctccgctgtggccacatccgtactggcccgcgggccagtacggatgtggaaaaggctgagcaacagaaaaaggcggccatcatctctgctgagggcgactccaaggcagctgagctgattgccaactcactggccactgcaggggatggcctgatcgagctgcgcaagctggaagctgcagaggacatcgcgtaccagctctcacgctctcggaacatcacctacctgccagcggggcagtccgtgctcctccagctgccccagtgagggcccaccctgcctgcacctccgcgggctgactgggccacagccccgatgattcttaacacagccttccttctgctcccaccccagaaatcactgtgaaatttcatgattggcttaaagtgaaggaaataaaggtaaaatcacttcagatctctaattagtctatcaaatgaaactctttcattcttctcacatccatctacttttttatccacctccctaccaaaaattgccaagtgcctatgcaaaccagctttaggtcccaattcggggcctgctggagttccggcctgggcaccagcatttggcagcacgcaggcggggcagtatgtgatggactggggagcacaggtgtctgcctagatccacgtgtggcctccgtcctgtcactgatggaaggtttgcggatgagggcatgtgcggctgaactgagaaggcaggcctccgtcttcccagcggttcctgtgcagatgctgctgaagagaggtgccggggaggggcagagaggaagtggtctgtctgttaccataagtctgattctctttaactgtgtgaccagcggaaacaggtgtgtgtgaactgggcacagattgaagaatctgcccctgttgaggtgggtgggcctgactgttgccccccagggtcctaaaacttggatggacttgtatagtgagagaggaggcctggaccgagatgtgagtcctgttgaagacttcctctctaccccccaccttggtccctctcagatacccagtggaattccaacttgaaggattgcatcctgctggggctgaacatgcctgccaaagacgtgtccgacctacgttcctggccccctcgttcagagactgcccttctcacgggctctatgcctgcactgggaaggaaacaaatgtgtataaactgctgtcaataaatgacacccagaccttccggctcaaaaaaaagacacccacgcccacacaggaccataccacacgccgctcacgacaggagctttcccgcgcccc

SEQ ID NO: 309510 - DNA, 1393 bp, Homo sapiens
  misc_feature (19)..(19): n is a, c, g, or t
  misc_feature (23)..(23): n is a, c, g, or t
  misc_feature (25)..(25): n is a, c, g, or t
ctcgtgcaatttcggcagnggtncnacgaggaagcaggtgtgagagggtccagcagaaggaaacatggctgccaaagtgtttgagtccattggcaagtttggcctggccttagctgttgcaggaggcgtggtgaactctgccttatataatgtggatgctgggcacagagctgtcatctttgaccgattccgtggagtgcaggacattgtggtaggggaagggactcattttctcatcccgtgggtacagaaaccaattatctttgactgccgttctcgaccacgtaatgtgccagtcatcactggtagcaaagctctcacgctctcggaacatcacctacctgccagcggggcagtccgtgctcctccagctgccccagtgagggcccaccctgcctgcacctccgcgggctgactgggccacagccccgatgattcttaacacagccttccttctgctcccaccccagaaatcactgtgaaatttcatgattggcttaaagtgaaggaaataaaggtaaaatcacttcagatctctaattagtctatcaaatgaaactctttcattcttctcacatccatctacttttttatccacctccctaccaaaaattgccaagtgcctatgcaaaccagctttaggtcccaattcggggcctgctggagttccggcctgggcaccagcatttggcagcacgcaggcggggcagtatgtgatggactggggagcacaggtgtctgcctagatccacgtgtggcctccgtcctgtcactgatggaaggtttgcggatgagggcatgtgcggctgaactgagaaggcaggcctccgtcttcccagcggttcctgtgcagatgctgctgaagagaggtgccggggaggggcagagaggaagtggtctgtctgttaccataagtctgattctctttaactgtgtgaccagcggaaacaggtgtgtgtgaactgggcacagattgaagaatctgcccctgttgaggtgggtgggcctgactgttgccccccagggtcctaaaacttggatggacttgtatagtgagagaggaggcctggaccgagatgtgagtcctgttgaagacttcctctctaccccccaccttggtccctctcagatacccagtggaattccaacttgaaggattgcatcctgctggggctgaacatgcctgccaaagacgtgtccgacctacgttcctggccccctcgttcagagactgcccttctcacgggctctatgcctgcactgggaaggaaacaaatgtgtataaactgctgtcaataaatgacacccagaccttccggctcaaaaaaaagacacccacgcccacacaggaccataccacacgccgctcacgacaggagctttcccgcgcccc

SEQ ID NO: 309511 - DNA, 705 bp, Homo sapiens
gcggggcagaggagctcatgcgcagtatgtgtggttggggaattcatgtggaggtcagagtggaagcaggtgtgagagggtccagcagaaggaaacatggctgccaaagtgtttgagtccattggcaagtttggcctggccttagctgttgcaggaggcgtggtgaactctgccttatataatgtggatgctgggcacagagctgtcatctttgaccgattccgtggagtgcaggacattgtggtaggggaagggactcattttctcatcccgtgggtacagaaaccaattatctttgactgccgttctcgaccacgtaatgtgccagtcatcactggtagcaaagatttacagaatgtcaacatcacactgcgcatcctcttccggcctgtcgccagccagcttcctcgcatcttcaccagcatcggagaggactatgatgagcgtgtgctgccgtccatcacaactgagatcctcaagtcagtggtggctcgctttgatgctggagaactaatcacccagagagagctggtctccaggcaggtgagcgacgaccttacagagcgagccgccacctttgggctcatcctggatgacgtgtccttgacacagccttccttctgctcccaccccagaaatcactgtgaaatttcatgattggcttaaagtgaaggaaataaaggtaaaatcacttcagatctctaa

SEQ ID NO: 309512 - DNA, 1056 bp, Homo sapiens
gtgacgatggtgatcgttgctgccgcggccgatatggaacccaagcagtggcgaagggaatcgcaaggctcttccctgaccattttctactgtccctgcgcgaggctgagttatgaacttcggtttggtttctttctgcaatccctgcagggccataaattcttggcccttaagactgggtggcccataacagactcagtgataccatcagtaaccacaattcacactggagtcaagttatctgattccccacacccagttggagaactggagattccttagaacttttaactgtcatgttttcaaagttgacatggaaaattttacatgaagcttaaaaatacaactaatctgtggtgatagagacgagaagagttaagctctaaaattagaagagcagttcgttttgaggcagcactgattgggagggagcatggagtatataattacacatttctatgtaatgtaaaaatgtatagatttaagatttatgcattttatgtaaattttactacaataaaacgaaaatgaaagaagacagatcatagtttaatcaaatattgtgtacaaagtaatttctgttaaacatttatatttttatgtgtatatgtatcttttacatgtatgtgttaaggatatgcattaaaatggtaataacttcctctgcctgttgggataatggagagttttgttactttttgtctttttttaaaacatgttcttcaataataatgtattgcttttgtaattatgaaaaacaaaagttattttgtaaatctttgttactgataagagatgggtattctgttaactactcaattctcatgtaggaaaacaaaatacataatgtctatttgataaatcgagaaacagaagcattacttagaaatctgagttacctctaaaataatgactggcatttgaagttgaggatgggtcttgagttcctgtgattttaagctcttggatatgagggttgggtgagttcctctttttctcttttaaaatatatgtatgtttaactttgctaaataaaatttaaaagatgcaatgtat

SEQ ID NO: 309513 - DNA, 861 bp, Homo sapiens
gtgacgatggtgatcgttgctgccgcggccgatatggaacccaagcagtggcgaagggaatcgcaaggctcttccctgaccattttctactgtccctgcgcgaggtgagggccccggctcggcctctgcaaaactttggggcgctggcgcggaggaggagacaggatttctcccgtgacttttgtaactgcgtcagggcaagatggcgctgggtctccttggggcgcggggggagaggcacgtccaccgccgcagcgcatgtgaccgggctgcattcctgtggggtttggctccgacccaggccggggcgggggaggggacagggcttgggcggaggagactgtggtgcggtcggcgttggcggcctgaagaggaagagatgactgttggaaagcgttcccctcccccatacggcagaacagctgcggctcccaggggaaagcccccgcaggacagtcctcgtggggtgtgacggctgttggtggagaaggtttggcgccctattttcttatctgcctttctccccgcaaagtatacttatgtaaggtggtagttccctgacgtgggactcggaatcaactaggagtccttgagggcctctgggaggcctagcgaggggtagaccagcttctgggggtacaacgtcaaggaggatcgattactttctgaggaaacagtttctcagattgaaatagaaaagtatttccaaagtttggaaacaaatttaaaggtgtaaataacacccaggaacactttaattgctttgaaaaggcataagcagccatctgaatttaagggcccttttcagactcttccttcctcctgtgatcctgttctttattcagtttctgtctgtcatcc

SEQ ID NO: 309514 - DNA, 4107 bp, Homo sapiens
gcagatttgtattttaacaagccttttaggaatgcagatattataggggataacatgaatggtggtaaagaggggggcatatttgagcaatgatttttcaagagctatgaatttacagtgcaatcctagcaggaaaagagagggagaaaagaacatctattttgagctgcagacataattgcatcacagctgagatttcatagtccccgtcctctctattcctgttgaattacatgattaaaggtaactatatatatatgaatatatgaagatgtttaattgttgcaggttggagaatttgggccagggagaattcacttggccaatgagttaaaaatgagaaaaggattagcagtcatcaaaatttctaagtagttaattatctgcatggtgggttcagtataaacaaacatggtactctcaaatgactgttgatgggctattaaattacattagtatcctgtgaaccctggtcatagctggaaaggagaatcttttgagaaatggaaaaaccaggttatttgtacataaggaatatgtcttttaaacacccccaaagtatagattaagacgtgattgatgaaaagtctccattttctaatgatggttttatgaaaccaaagtatttacaactaagaaccaaccatctgatcgccagtagagagtggaaaataggaaagggtaacgtctcagtatggtatctggagtagtctggctaggaccataaacttcattttgtttacaagttcccagaaaataagcctgaatgagcttagagcttaatacttccagtgatggttctctcttccctcaagtatacagattaactatttttgtgccgtgggcttttgacagcccccaaaagcccgtggatcccatctcagaatgttttacatgtgtattacataatgctcacacattctaaattttatctaccgactcctagttagaaatcccttgcaaggggtgttagggttctgagagaaggctggtaagtaatgaggcttttaacttatttcagtatcctgttcaggtcgggaatatgttgtgttctaattactctagtttccagctcaattggtgttggagaaactagcccacttataagtggctcaaatgaaaacccacggggaggcatttttctttaataagcaaccctaagccccctttgaagtcagtctgactaatcaaaagaaagaggttatatatcccagttttgaccttttgtgaaaatagcccttttactgtatgtgatatattattggcatctcattctgcacagtccaaatgatgtagacaaaatagtgattggtatataactatggacaccgaagatccactgcaaggcctgccgatcactttacacagaaggagcccctttcctgaggtccgcttgctcgctcggggtggggtggtactttgccctagtaaactaccaagcagtccgaacgttcgctcctctggaagaccgagttgtgggcggctgcgctgcgggggcaaactcgccgcatgcccgctggccagagcgagtcggggcctggcgttagggcaatccagactggccggcatggtacagggcgtatccctagccgccttctgtgtcatatggggcgccgccctccagcctaggagaggcggccgctaggaggggcagaagggccttgtctgccccggtctgaataccccaggcggggtcggaaagcgggtcacagaagagcccagtaaactgcaggggtgcagctcgtctccaggaaccggcaacccccagggccgcacaagccggtaacaacccataatccgatcctgtcttcgggatcagaagagaggacagctggcccgcgcgccagctcagttcctcctccgcattcttcaggaggagccccagaaacgcacttccgccgcgcgggcctgcctccacgcagggcgcgtcctaggccggttcatttccgcccagcgctttctgtggctaggggagtcaggggtttccttttcccttattcgggctcttatgttacccccgttttccgttgaacccttttctcccctcttgccctccaaaaaagcagtctgctgccgctcccgacttttctcgctgagacaccgtcagctcactccgagcccagcacagcggccatcttcggtaaattctggcagcagcccgcctgttcattgtcctgtgtgcccagaggaaagaactactcatttttcgtgatcaagctaggggaggcaggagcaataatggccctgctataggactggcttttatttgaattccaactcttctgccaccttaaccagctgtatccagattttaaaagttaatctatccgagcctcttattaaatattaggttgatgagatgatgcatgcaaagcgcttagaacagtactaggcataaagcgtccgacataaaggttaagtaaaagtaaggaaaagctatggggatgtattgagtatctctttgcccaatgacgtattagtcgtattaaatatggaaagtgcctttgattcgccgtgcccatgggagaaggcataggaatggccttttcccacctgtaatcagagagcaggtgtttcaagaacgcctcaatatgtttgcgatctctcacgcagcctttcaggctcctaattcctacgaagtttccgcttttattcaaattggctcactcctttttgcagggctttgtactgaatgagtattcttttaagggtggtggacaagcaaaggtttggtagcatcacatttttaatttcacagggaaaatgggtatgaaacatcttcccaagtacatcttagactgccagctgacagcaagccataatgctccccagctcttgggccctacaccccctctcccccatccccgctttagttctttgtcattgctcatggacagctggtttggggaccaggtgcagatgatgggaggtgtctgaaaaacagcaagtgagaaatgctagttttgttgttttaagttgcactgatgactccagtagttatctgtgctgcttgtgataatttataaggcaatgataacgaattaaacatacaaaagattattatcttccacaggaaaaaaaaactgcaaacttgtgacaccatttatgatccacttagtcttgagatactgagtaatagaactttctccttttaggctgagttatgaacttcggtttggtttctttctgcaatccctgcagggccataaattcttggcccttaagactgggtggcccataacagactcagtgataccatcagtaaccacaattcacactggagtcaagttatctgattccccacacccagttggagaactggagattccttagaacttttaactgtcatgttttcaaagttgacatggaaaattttacatgaagcttaaaaatacaactaatctgtggtgatagagacgagaagagttaagctctaaaattagaagagcagttcgttttgaggcagcactgattgggagggagcatggagtatataattacacatttctatgtaatgtaaaaatgtatagatttaagatttatgcattttatgtaaattttactacaataaaacgaaaatgaaagaagacagatcatagtttaatcaaatattgtgtacaaagtaatttctgttaaacatttatatttttatgtgtatatgtatcttttacatgtatgtgttaaggatatgcattaaaatggtaataacttcctctgcctgttgggataatggagagttttgttactttttgtctttttttaaaacatgttcttcaataataatgtattgcttttgtaattatgaaaaacaaaagttattttgtaaatctttgttactgataagagatgggtattctgttaactactcaattctcatgtaggaaaacaaaatacataatgtctatttgataaatcgagaaacagaagcattacttagaaatctgagttacctctaaaataatgactggcatttgaagttgaggatgggtcttgagttcctgtgattttaagctcttggatatgagggttgggtgagttcctctttttctcttttaaaatatatgtatgtttaactttgctaaataaaatttaaaagatgcaatgtat

SEQ ID NO: 309515 - DNA, 875 bp, Homo sapiens
agtttgaagaaggctcttacagcatggccgccggtactgcagctgccttagcgtttttgagtcaggagagccgaacgcgggccgggggtgtcgggggcctacgggtcccggccccggtcactatggacagttttttcttcggctgtgagctctccggccacacccgctccttcacctttaaggtagaggaagaggatgatgcggagcacgtgctggcactaaccatgctctgcctcaccgagggagccaaagacgagtgtaatgtggtagaagttgtggcccggaaccatgaccatcaggagatcgcagtccctgtggccaacctcaagctgtcctgccaacccatgctcagtctggatgacttccagctccaaccacctgtaaccttccgcctgaagtcgggctctggccctgtgcggatcactgggcggcaccagattgttacgatgagcaatgatgtttctgaggaggagagcgaggaagaggaagaggacagtgatgaggaagaagttgagctgtgccccatccttcctgccaaaaagcaggggggcaggccctagccctcctaggtcagctccatgtgccatgcaccgccatgcaccctgttccctgacaagtttcaacaattgtaaatatttcttccttgaagaggagagcttgggtgggggttgggtgggagggacttgggtctttggtgctaggagagggcctgtgctccacacagccgtggttttctgattttcaccatgcccggggcctcccttcccacctgcctgtgagaattggaggttagtgcctgaagctcagagctacacatttttaatagtttttacatttttggataaaggttgaaataaagtggtgtggagtttttg

SEQ ID NO: 309516 - DNA, 1339 bp, Homo sapiens
agtttgaagaaggctcttacagcatggccgccggtactgcagctgccttagcgtttttgagtcaggagagccgaacgcgggccgggggtgtcgggggcctacgggtcccggccccggtcactatggacagttttttcttcggctgtgagctctccggccacacccgctccttcacctttaaggtagaggaagaggatgatgcggagcacgtgctggcactaaccatgctctgcctcaccgagggagccaaagacgagtgtaatgtggtagaagttgtggcccggaaccatgaccatcaggagatcgcagtccctgtggccaacctcaagctgtcctgccaacccatgctcagtctggatgacttccagctccaaccacctgtaaccttccgcctgaagtcgggctctggccctgtgcggatcactgggcggcaccagattgttacgatgagcaatgatgtttctgaggaggagagcgaggaagaggaagaggacagtgatgaggaagaagttgagctgtgccccatccttcctgccaaaaagcaggggggcaggccctagccctcctaggtcagctccatgtgccatgcaccgccatgcaccctgttccctgacaagtttcaacaattgtaaatatttcttccttgaagaggagagcttgggtgggggttgggtgggagggacttgggtctttggtgctaggagagggcctgtgctccacacagccgtggttttctgattttcaccatgcccggggcctcccttcccacctgcctgtgagaattggaggttagtgcctgaagctcagagctacacatttttaatagtttttacatttttggataaaggttgaaataaagtggtgtggagtttttgcagctcttgtgtggcttcttcctgtgctgggtgatgtttccctagggaccgccaggtggcactgtggaagcccccagcgtggccctgggcctgggggagggtggagaactgtgggatcctctaccctcatggccctgggctaggacctggggcctgggcgccagttgccttgctggaaggggacctcccaacactcagcccattcccagtctctgcaggtgggagagggtcatcgcaggaggttatcagcatccaaacaaggggtctgggcctctgtcagcactcggctgatgggcaggggggcagataagcgagcttaggcagcctgaggaatgcgcgtccctagccccacgagggtctctggcccagagagggcctgtgagggcagggcgggaccaggcttcgctcctcctttgagccttgcaggctgtctctgagcagggctgggcccttagagaaacctg

SEQ ID NO: 309517 - DNA, 931 bp, Homo sapiens
agtttgaagaaggctcttacagcatggccgccggtactgcagctgccttagcgtttttgagtcaggagagccgaacgcgggccgggggtgtcgggggcctacgggtcccggccccggtcactatggacagttttttcttcggctgtgagctctccggccacacccgctccttcacctttaaggtagaggaagaggatgatgcggagcacgtgctggcactaaccatgctctgcctcaccgagggagccaaagacgagtgtaatgtggtagaagttgtggcccggaaccatgaccatcaggagatcgcagtccctgtggccaacctcaagctgtcctgccaacccatgctcagtctggatgacttccagctccaaccacctgtaaccttccgcctgaagtcgggctctggccctgtgcggatcactgggcggcaccagattgttacgatgagcaatgatgtttctgaggaggagagcgaggaagaggaagaggacagtgatgaggaagaagttgagctgtgccccatccttcctgccaaaaagcaggggggcaggccctagccctcctaggtcagctccatgtgccatgcaccgccatgcaccctgttccctgacaagtttcaacaattgtaaatatttcttccttgaagaggagagcttgggtgggggttgggtgggagggacttgggtctttggtgctaggagagggcctgtgctccacacagccgtggttttctgattttcaccatgcccggggcctcccttcccacctgcctgtgagaattggaggttagtgcctgaagctcagagctacacatttttaatagtttttacatttttggataaaggttgaaataaagtggtgtggagtttttgttttttttttttttttttttttttttttgggaaaaatttttttttttaaaaaaaaa

SEQ ID NO: 309518 - DNA, 789 bp, Homo sapiens
agtttgaagaaggctcttacagcatggccgccggtactgcagctgccttagcgtttttgagtcaggagagccgaacgcgggccgggggtgtcgggggcctacgggtcccggccccggtcactatggacagttttttcttcgctctgcctcaccgagggagccaaagacgagtgtaatgtggtagaagttgtggcccggaaccatgaccatcaggagatcgcagtccctgtggccaacctcaagctgtcctgccaacccatgctcagtctggatgacttccagctccaaccacctgtaaccttccgcctgaagtcgggctctggccctgtgcggatcactgggcggcaccagattgttacgatgagcaatgatgtttctgaggaggagagcgaggaagaggaagaggacagtgatgaggaagaagttgagctgtgccccatccttcctgccaaaaagcaggggggcaggccctagccctcctaggtcagctccatgtgccatgcaccgccatgcaccctgttccctgacaagtttcaacaattgtaaatatttcttccttgaagaggagagcttgggtgggggttgggtgggagggacttgggtctttggtgctaggagagggcctgtgctccacacagccgtggttttctgattttcaccatgcccggggcctcccttcccacctgcctgtgagaattggaggttagtgcctgaagctcagagctacacatttttaatagtttttacatttttggataaaggttgaaataaagtggtgtggagtttttg

SEQ ID NO: 309519 - DNA, 4875 bp, Homo sapiens
ggaattccgggaggagcggacgtcggcttctccccgcgggagcccccagcatggttgactatattgtggagtatgactatgatgctgtacatgatgatgaattaactattcgagttggagaaatcatcaggaatgtgaaaaagctacaggaggaagggtggctggaaggagaactaaatgggagaagaggaatgttccctgacaatttcgttaaggaaattaaaagagagacggaattcaaggatgacagtttgcccatcaaacgggaaaggcatgggaatgtagcaagtcttgtacaacgaataagcacctatggacttccagctggaggaattcagccacatccacaaaccaaaaacattaagaagaagaccaagaagcgtcagtgtaaagttctttttgagtacattccacaaaatgaggatgaactggagctgaaagtgggagatattattgatattaatgaagaggtagaagaaggctggtggagtggaaccctgaataacaagttgggactgtttccctcaaattttgtgaaagaattagaggtaacagatgatggtgaaactcatgaagcccaggacgattcagaaactgttttggctgggcctacttcacctataccttctctgggaaatgtgagtgaaactgcatctggatcagttacacagccaaagaaaattcgaggaattggatttggagacatttttaaagaaggctctgtgaaacttcggacaagaacatccagtagtgaaacagaagagaaaaaaccagaaaagcccttaatcctacagtcactgggacccaaaactcagagtgtggagataacaaaaacagataccgaaggtaaaattaaagctaaagaatattgtagaacattatttgcctatgaaggtactaatgaagatgaacttacttttaaagagggggagataatccatttgataagtaaggagactggagaagctggctggtggaggggcgaacttaatggtaaagaaggagtatttccagacaattttgctgtccagataaatgaacttgataaagactttccaaaaccaaagaaaccaccacctcctgctaaggctccagctccaaagcctgaactgatagctgcagagaagaaatatttttctttaaagcctgaagaaaaggatgaaaaatcaacactggaacagaaaccttctaaaccagcagctccacaagtcccacccaagaaacctactccacctaccaaagccagtaatttattgagatcttctggaacagtgtacccaaagcgacctgaaaaaccagttcctccaccacctcctatagccaagattaatggggaagtttctagcatttcatcaaaatttgaaactgagccagtatcaaaactaaagctagattctgaacagctgccccttagaccaaaatcagtagactttgattcacttacagtaaggacctccaaagaaacagatgttgtaaattttgatgacatagcttcctcagaaaacttgcttcatctcactgcaaatagaccaaagatgcctggaagaaggttgccgggccgtttcaatggtggacattctccaactcacagccccgaaaaaatcttgaagttaccaaaagaagaagacagtgccaacctgaagccatctgaattaaaaaaagatacatgctactctccaaagccatctgtgtacctttcaacaccttccagtgcttctaaagcaaatacaactgctttcctgactccattagaaatcaaagctaaagtggaaacagatgatgtgaaaaaaaattccctggatgaacttagagcccagattattgaattgttgtgcattgtagaagcactgaaaaaggatcacgggaaagaactggaaaaactgcgaaaagatttggaagaagagaagacaatgagaagtaatctagagatggaaatagagaagctgaaaaaagctgtcctgtcttcttgagtggtgtggacctggtgttcataatgttccagggattcagaagcaacgctatgaacttcagctgacttgttacttaaaaattgtgaattctgttgttgtgataaatatgagcaaatgaagtgtaatatctatagaaaagtagagtgagggtgaatttatatatatattttgttttgccaatatgaagaaaaagaggccttatttcttaactgtgctgggattgcaaacactttttaaaaaattgtttgcttgaaaatactactgaatataaataagaatgtgcacagtagtttttttattgaaacttgtattatttttaaagagatctatactataaatatggtgatatatttacaagtaatctgtaagatatactatttgagagggacagattagccttttagtaactatagtcactactttttccataatgcataagggatataaactctgtgtgtgtgtgtgtgtgtgtgtgtgtgtgtgtgtgtgtatatatatatatatatttttacttttatcctcttaccgaaggttacactgttgtgcctgtttgtctgcaatgctgtttatattttgggtgatgaaataggagtttcctagctatataaaccagattactcacccatgcatatagtaagaactaatgaataatcaaaataatttcatcaacttttagaatattttatgttgcttgcactataggagtcataaaaggaacttagttaaaatatgttggattgttaaacatttggggaaatatgaactgtattttaaatttgttaggtctgaagaatctaaaactgttaatttaacccttaacttgtgcctagaaactacagcacatataaaatatgtaaacaccagcctgttgctgtacttttctgcttattttacagcctcaaatatttctcattatcttgtcacttagttcttcatgtttctccttctgacttttaataatggtaataggaaaacaaaacccaaagcttttcagaacttcagtgtgaggtttcctattttgacaagttaacttgtaaatactcaggttttacgatgtataatttacctaatagaccaaactaactcatggagatattttgaactattatttaggtacaaactttataaagaatgttagtatgtcataaaatataacattacagcttatttaaaaccaaatatagttgaacatatttaaaatacattttcacagaatggatgaattagttgtttcttcagagttacttatgaacagttgaatgctttaaaatgttctgtctgtaggtaacatctaaaacacaagtgggtttatttaaatttttaaaatttgaaattttttatttgcaaaaaattgttttatgctttattatatcgcaaatgagtgtcagatttttgagtaccaatgatcatgcttccattttttttagttttaaaccaccaaaccaatatttttcctttaaattttaatcttataatatagaaatcttatgtaaatgaaattttgtcatgtttcaaataaagagaactgaagtagaaaatagaaatgccagtaaacaacataatgtttaatttacaacttacattaggggtttgggggaatgctaattatatattgagaatatacattagaactcttcaaaatgggctcttctaatgaggtcactactgaacaaaattgttccctcttctgttaaatagaataggtttaaatgactagtcaaatgaattattttcttcttgttaaataaattaaatcttactttcttttaatgaccaaccttaggtaaaacaaaaatattgtaatcctagaaattatcctccagctttctcacctgaaaatctattgaagtgatccctggtcatcctaataatgggatgagggaagtttccagcagatttcaggctgttcttaaagtttttgttggtcattttctcaatagtacatgaaatcaagatgcttatgagcatggaaatgtatttaaagtttttgcttgtgtcctcctcagtcagaatagaaaagtaactgaaatactcttacctttctgtccttgataaaatagtaaagaaaaccaaacaaacccaggcctgatgggaaaaatgattcctttattctagcaacttactttctgttggtatgggaaatgttattaatttctattactaaagttcatatcacaaaatgatatttaataataaccttggggtaaatcatgaatttttttttctacgtgtgagtataaaagacaaaagttgaacagcatggaatctcattgccaaattattagtgaatgtatagttcaggtattctttgagacacacagtatcattaatttccgaattgtatttcagtgttattttttgtttgtgaccactaagcttctgtcttaatacaaagctgttaccttctacagaatttaagtctgaagatgtaaagagagaacaggccttgtgtaacagaagatactcttttttatgctccttactgtgatcacagaaaaattaaaaatccaagtgctctctagatttgttgataaacattttatgcttgcatttaaacttgaaatgtatgagcagaatgagacaatcagttaaatcagaaatgagaagtattataatgtaaaggccttgttttgctgtagcaataaaatgaccaagtgcaatgacttgatttaataaaatcatattttaaaagttgctgctatgaatatttttggctataaaattttaccctgacttgctttcaataactgttacgtaatgcagttgatgttgtaacctaacattccaaaaaaaaaattgagagggggaatctcaaaatagtatatacttcactaacttgtttacaggtgctgtatttaaaagcatgcttctctctcaaaaagaaaaattaaaggattttattgcc

SEQ ID NO: 309520 - DNA, 3853 bp, Homo sapiens
  misc_feature (28)..(28): n is a, c, g, or t
ttcgagcgcggtaccccctttggggtcnttgctccaaaaccaaagaaaccaccacctcctgctaaggctccagctccaaagcctgaactgatagctgcagagaagaaatatttttctttaaagcctgaagaaaaggatgaaaaatcaacactggaacagaaaccttctaaaccagcagctccacaagtcccacccaagaaacctactccacctaccaaagccagtaatttattgagatcttctggaacagtgtacccaaagcgacctgaaaaaccagttcctccaccacctcctatagccaagattaatggggaagtttctagcatttcatcaaaatttgaaactgagccagtatcaaaactaaagctagattctgaacagctgccccttagaccaaaatcagtagactttgattcacttacagtaaggacctccaaagaaacagatgttgtaaattttgatgacatagcttcctcagaaaacttgcttcatctcactgcaaatagaccaaagatgcctggaagaaggttgccgggccgtttcaatggtggacattctccaactcacagccccgaaaaaatcttgaagttaccaaaagaagaagacagtgccaacctgaagccatctgaattaaaaaaagatacatgctactctccaaagccatctgtgtacctttcaacaccttccagtgcttctaaagcaaatacaactgctttcctgactccattagaaatcaaagctaaagtggaaacagatgatgtgaaaaaaaattccctggatgaacttagagcccagattattgaattgttgtgcattgtagaagcactgaaaaaggatcacgggaaagaactggaaaaactgcgaaaagatttggaagaagagaagacaatgagaagtaatctagagatggaaatagagaagctgaaaaaagctgtcctgtcttcttgagtggtgtggacctggtgttcataatgttccagggattcagaagcaacgctatgaacttcagctgacttgttacttaaaaattgtgaattctgttgttgtgataaatatgagcaaatgaagtgtaatatctatagaaaagtagagtgagggtgaatttatatatatattttgttttgccaatatgaagaaaaagaggccttatttcttaactgtgctgggattgcaaacactttttaaaaaattgtttgcttgaaaatactactgaatataaataagaatgtgcacagtagtttttttattgaaacttgtattatttttaaagagatctatactataaatatggtgatatatttacaagtaatctgtaagatatactatttgagagggacagattagccttttagtaactatagtcactactttttccataatgcataagggatataaactctgtgtgtgtgtgtgtgtgtgtgtgtgtgtgtgtgtgtgtatatatatatatatatttttacttttatcctcttaccgaaggttacactgttgtgcctgtttgtctgcaatgctgtttatattttgggtgatgaaataggagtttcctagctatataaaccagattactcacccatgcatatagtaagaactaatgaataatcaaaataatttcatcaacttttagaatattttatgttgcttgcactataggagtcataaaaggaacttagttaaaatatgttggattgttaaacatttggggaaatatgaactgtattttaaatttgttaggtctgaagaatctaaaactgttaatttaacccttaacttgtgcctagaaactacagcacatataaaatatgtaaacaccagcctgttgctgtacttttctgcttattttacagcctcaaatatttctcattatcttgtcacttagttcttcatgtttctccttctgacttttaataatggtaataggaaaacaaaacccaaagcttttcagaacttcagtgtgaggtttcctattttgacaagttaacttgtaaatactcaggttttacgatgtataatttacctaatagaccaaactaactcatggagatattttgaactattatttaggtacaaactttataaagaatgttagtatgtcataaaatataacattacagcttatttaaaaccaaatatagttgaacatatttaaaatacattttcacagaatggatgaattagttgtttcttcagagttacttatgaacagttgaatgctttaaaatgttctgtctgtaggtaacatctaaaacacaagtgggtttatttaaatttttaaaatttgaaattttttatttgcaaaaaattgttttatgctttattatatcgcaaatgagtgtcagatttttgagtaccaatgatcatgcttccattttttttagttttaaaccaccaaaccaatatttttcctttaaattttaatcttataatatagaaatcttatgtaaatgaaattttgtcatgtttcaaataaagagaactgaagtagaaaatagaaatgccagtaaacaacataatgtttaatttacaacttacattaggggtttgggggaatgctaattatatattgagaatatacattagaactcttcaaaatgggctcttctaatgaggtcactactgaacaaaattgttccctcttctgttaaatagaataggtttaaatgactagtcaaatgaattattttcttcttgttaaataaattaaatcttactttcttttaatgaccaaccttaggtaaaacaaaaatattgtaatcctagaaattatcctccagctttctcacctgaaaatctattgaagtgatccctggtcatcctaataatgggatgagggaagtttccagcagatttcaggctgttcttaaagtttttgttggtcattttctcaatagtacatgaaatcaagatgcttatgagcatggaaatgtatttaaagtttttgcttgtgtcctcctcagtcagaatagaaaagtaactgaaatactcttacctttctgtccttgataaaatagtaaagaaaaccaaacaaacccaggcctgatgggaaaaatgattcctttattctagcaacttactttctgttggtatgggaaatgttattaatttctattactaaagttcatatcacaaaatgatatttaataataaccttggggtaaatcatgaatttttttttctacgtgtgagtataaaagacaaaagttgaacagcatggaatctcattgccaaattattagtgaatgtatagttcaggtattctttgagacacacagtatcattaatttccgaattgtatttcagtgttattttttgtttgtgaccactaagcttctgtcttaatacaaagctgttaccttctacagaatttaagtctgaagatgtaaagagagaacaggccttgtgtaacagaagatactcttttttatgctccttactgtgatcacagaaaaattaaaaatccaagtgctctctagatttgttgataaacattttatgcttgcatttaaacttgaaatgtatgagcagaatgagacaatcagttaaatcagaaatgagaagtattataatgtaaaggccttgttttgctgtagcaataaaatgaccaagtgcaatgacttgatttaataaaatcatattttaaaagttgctgctatgaatatttttggctataaaattttaccctgacttgctttcaataactgttacgtaatgcagttgatgttgtaacctaacattccaaaaaaaaaattgagagggggaatctcaaaatagtatatacttcactaacttgtttacaggtgctgtatttaaaagcatgcttctctctcaaaaagaaaaattaaaggattttattgcc

SEQ ID NO: 309521 - DNA, 3003 bp, Homo sapiens
  misc_feature (1)..(1): n is a, c, g, or t
  misc_feature (6)..(6): n is a, c, g, or t
ntcggnagaatgcaatctgcgaagtatggaagaggaaaaatgagagtaatctagagatggaaatagagaagctgaaaaaagctgtcctgtcttcttgagtggtgtggacctggtgttcataatgttccagggattcagaagcaacgctatgaacttcagctgacttgttacttaaaaattgtgaattctgttgttgtgataaatatgagcaaatgaagtgtaatatctatagaaaagtagagtgagggtgaatttatatatatattttgttttgccaatatgaagaaaaagaggccttatttcttaactgtgctgggattgcaaacactttttaaaaaattgtttgcttgaaaatactactgaatataaataagaatgtgcacagtagtttttttattgaaacttgtattatttttaaagagatctatactataaatatggtgatatatttacaagtaatctgtaagatatactatttgagagggacagattagccttttagtaactatagtcactactttttccataatgcataagggatataaactctgtgtgtgtgtgtgtgtgtgtgtgtgtgtgtgtgtgtgtatatatatatatatatttttacttttatcctcttaccgaaggttacactgttgtgcctgtttgtctgcaatgctgtttatattttgggtgatgaaataggagtttcctagctatataaaccagattactcacccatgcatatagtaagaactaatgaataatcaaaataatttcatcaacttttagaatattttatgttgcttgcactataggagtcataaaaggaacttagttaaaatatgttggattgttaaacatttggggaaatatgaactgtattttaaatttgttaggtctgaagaatctaaaactgttaatttaacccttaacttgtgcctagaaactacagcacatataaaatatgtaaacaccagcctgttgctgtacttttctgcttattttacagcctcaaatatttctcattatcttgtcacttagttcttcatgtttctccttctgacttttaataatggtaataggaaaacaaaacccaaagcttttcagaacttcagtgtgaggtttcctattttgacaagttaacttgtaaatactcaggttttacgatgtataatttacctaatagaccaaactaactcatggagatattttgaactattatttaggtacaaactttataaagaatgttagtatgtcataaaatataacattacagcttatttaaaaccaaatatagttgaacatatttaaaatacattttcacagaatggatgaattagttgtttcttcagagttacttatgaacagttgaatgctttaaaatgttctgtctgtaggtaacatctaaaacacaagtgggtttatttaaatttttaaaatttgaaattttttatttgcaaaaaattgttttatgctttattatatcgcaaatgagtgtcagatttttgagtaccaatgatcatgcttccattttttttagttttaaaccaccaaaccaatatttttcctttaaattttaatcttataatatagaaatcttatgtaaatgaaattttgtcatgtttcaaataaagagaactgaagtagaaaatagaaatgccagtaaacaacataatgtttaatttacaacttacattaggggtttgggggaatgctaattatatattgagaatatacattagaactcttcaaaatgggctcttctaatgaggtcactactgaacaaaattgttccctcttctgttaaatagaataggtttaaatgactagtcaaatgaattattttcttcttgttaaataaattaaatcttactttcttttaatgaccaaccttaggtaaaacaaaaatattgtaatcctagaaattatcctccagctttctcacctgaaaatctattgaagtgatccctggtcatcctaataatgggatgagggaagtttccagcagatttcaggctgttcttaaagtttttgttggtcattttctcaatagtacatgaaatcaagatgcttatgagcatggaaatgtatttaaagtttttgcttgtgtcctcctcagtcagaatagaaaagtaactgaaatactcttacctttctgtccttgataaaatagtaaagaaaaccaaacaaacccaggcctgatgggaaaaatgattcctttattctagcaacttactttctgttggtatgggaaatgttattaatttctattactaaagttcatatcacaaaatgatatttaataataaccttggggtaaatcatgaatttttttttctacgtgtgagtataaaagacaaaagttgaacagcatggaatctcattgccaaattattagtgaatgtatagttcaggtattctttgagacacacagtatcattaatttccgaattgtatttcagtgttattttttgtttgtgaccactaagcttctgtcttaatacaaagctgttaccttctacagaatttaagtctgaagatgtaaagagagaacaggccttgtgtaacagaagatactcttttttatgctccttactgtgatcacagaaaaattaaaaatccaagtgctctctagatttgttgataaacattttatgcttgcatttaaacttgaaatgtatgagcagaatgagacaatcagttaaatcagaaatgagaagtattataatgtaaaggccttgttttgctgtagcaataaaatgaccaagtgcaatgacttgatttaataaaatcatattttaaaagttgctgctatgaatatttttggctataaaattttaccctgacttgctttcaataactgttacgtaatgcagttgatgttgtaacctaacattccaaaaaaaaaattgagagggggaatctcaaaatagtatatacttcactaacttgtttacaggtgctgtatttaaaagcatgcttctctctcaaaaagaaaaattaaaggattttattgcc

SEQ ID NO: 309522 - DNA, 4418 bp, Homo sapiens
ggaattccgggaggagcggacgtcggcttctccccgcgggagcccccagcatggttgactatattgtggagtatgactatgatgctgtacatgatgatgaattaactattcgagttggagaaatcatcaggaatgtgaaaaagctacaggaggaagggtggctggaaggagaactaaatgggagaagaggaatgttccctgacaatttcgttaaggaaattaaaagagagacggaattcaaggatgacagtttgcccatcaaacgggaaaggcatgggaatgtagcaagtcttgtacaacgaataagcacctatggacttccagctggaggaattcagccacatccacaaaccaaaaacattaagaagaagaccaagaagcgtcagtgtaaagttctttttgagtacattccacaaaatgaggatgaactggagctgaaagtgggagatattattgatattaatgaagaggtagaagaaggctggtggagtggaaccctgaataacaagttgggactgtttccctcaaattttgtgaaagaattagaggtaacagatgatggtgaaactcatgaagcccaggacgattcagaaactgttttggctgggcctacttcacctataccttctctgggaaatgtgagtgaaactgcatctggatcagttacacagccaaagaaaattcgaggaattggatttggagacatttttaaagaaggctctgtgaaacttcggacaagaacatccagtagtgaaacagaagagaaaaaaccagaaaagcccttaatcctacagtcactgggacccaaaactcagagtgtggagataacaaaaacagataccgaaggtaaaattaaagctaaagaatattgtagaacattatttgcctatgaaggtactaatgaagatgaacttacttttaaagagggggagataatccatttgataagtaaggagactggagaagctggctggtggaggggcgaacttaatggtaaagaaggagtatttccagacaattttgctgtccagataaatgaacttgataaagactttccaaaaccaaagaaaccaccacctcctgctaaggctccagctccaaagcctgaactgatagctgcagagaagaaatatttttctttaaagcctgaagaaaaggatgaaaaatcaacactggaacagaaaccttctaaaccagcagctccacaagtcccacccaagaaacctactccacctaccaaagccagtaatttattgagatcttctggaacagtgtacccaaagcgacctgaaaaaccagttcctccaccacctcctatagccaagattaatggggaagtttctagcatttcatcaaaatttgaaactgagccagtatcaaaactaaagctagattctgaacagctgccccttagaccaaaatcagtagactttgattcacttacagtaaggacctccaaagaaacagatgttgtaaattttgatgacatagcttcctcagaaaacttgcttcatctcactgcaaatagaccaaagatgcctggaagaaggttgccgggccgtttcaatggtggacattctccaactcacagccccgaaaaaatcttgaagttaccaaaagaagaagacagtgccaacctgaagccatctgaattaaaaaaagatacatgctactctccaaagccatctgtgtacctttcaacaccttccagtgcttctaaagcaaatacaactgctttcctgactccattagaaatcaaagctaaagtggaaacagatgatgtgaaaaaaaattccctggatgaacttagagcccagattattgaattgttgtgcattgtagaagcactgaaaaaggatcacgggaaagaactggaaaaactgcgaaaagatttggaagaagagaagacaatgagaagtaatctagagatggaaatagagaagctgaaaaaagctgtcctgtcttcttgagtggtgtggacctggtgttcataatgttccagggattcagaagcaacgctatgaacttcagctgacttgttacttaaaaattgtgaattctgttgttgtgataaatatgagcaaatgaagtgtaatatctatagaaaagtagagtgagggtgaatttatatatatattttgttttgccaatatgaagaaaaagaggccttatttcttaactgtgctgggattgcaaacactttttaaaaaattgtttgcttgaaaatactactgaatataaataagaatgtgcacagtagtttttttattgaaacttgtattatttttaaagagatctatactataaatatggtgatatatttacaagtaatctgtaagatatactatttgagagggacagattagccttttagtaactatagtcactactttttccataatgcataagggatataaactctgtgtgtgtgtgtgtgtgtgtgtgtgtgtgtgtgtgtgtatatatatatatatatttttacttttatcctcttaccgaaggttacactgttgtgcctgtttgtctgcaatgctgtttatattttgggtgatgaaataggagtttcctagctatataaaccagattactcacccatgcatatagtaagaactaatgaataatcaaaataatttcatcaacttttagaatattttatgttgcttgcactataggagtcataaaaggaacttagttaaaatatgttggattgttaaacatttggggaaatatgaactgtattttaaatttgttaggtctgaagaatctaaaactgttaatttaacccttaacttgtgcctagaaactacagcacatataaaatatgtaaacaccagcctgttgctgtacttttctgcttattttacagcctcaaatatttctcattatcttgtcacttagttcttcatgtttctccttctgacttttaataatggtaataggaaaacaaaacccaaagcttttcagaacttcagtgtgaggtttcctattttgacaagttaacttgtaaatactcaggttttacgatgtataatttacctaatagaccaaactaactcatggagatattttgaactattatttaggtacaaactttataaagaatgttagtatgtcataaaatataacattacagcttatttaaaaccaaatatagttgaacatatttaaaatacattttcacagaatggatgaattagttgtttcttcagagttacttatgaacagttgaatgctttaaaatgttctgtctgtaggtaacatctaaaacacaagtgggtttatttaaatttttaaaatttgaaattttttatttgcaaaaaattgttttatgctttattatatcgcaaatgagtgtcagatttttgagtaccaatgatcatgcttccattttttttagttttaaaccaccaaaccaatatttttcctttaaattttaatcttataatatagaaatcttatgtaaatgaaattttgtcatgtttcaaataaagagaactgaagtagaaaatagaaatgccagtaaacaacataatgtttaatttacaacttacattaggggtttgggggaatgctaattatatattgagaatatacattagaactcttcaaaatgggctcttctaatgaggtcactactgaacaaaattgttccctcttctgttaaatagaataggtttaaatgactagtcaaatgaattattttcttcttgttaaataaattaaatcttactttcttttaatgaccaaccttaggtaaaacaaaaatattgtaatcctagaaattatcctccagctttctcacctgaaaatctattgaagtgatccctggtcatcctaataatgggatgagggaagtttccagcagatttcaggctgttcttaaagtttttgttggtcattttctcaatagtacatgaaatcaagatgcttatgagcatggaaatgtatttaaagtttttgcttgtgtcctcctcagtcagaatagaaaagtaactgaaatactcttacctttctgtccttgataaaatagtaaagaaaaccaaacaaacccaggcctgatgggaaaaatgattcctttattctagcaacttactttctgttggtatgggaaatgttattaatttctattactaaagttcatatcacaaaatgatatttaataataaccttggggtaaatcatgaatttttttttctacgtgtgagtataaaagacaaaagttgaacagcatggaatctcattgccaaattattagtgaatgtatagttcaggtattctttgagacacacagtaaataatggctgaccagcatgagggcagtactgtcagaaatttctttgagctgtgagatggatttatttttaaatgctactttgtaaaggtgacctttaaaaaataaaaggaaaataaagaatgtt

SEQ ID NO: 309523 - DNA, 1856 bp, Homo sapiens
ggaattccgggaggagcggacgtcggcttctccccgcgggagcccccagcatggttgactatattgtggagtatgactatgatgctgtacatgatgatgaattaactattcgagttggagaaatcatcaggaatgtgaaaaagctacaggaggaagggtggctggaaggagaactaaatgggagaagaggaatgttccctgacaatttcgttaaggaaattaaaagagagacggaattcaaggatgacagtttgcccatcaaacgggaaaggcatgggaatgtagcaagtcttgtacaacgaataagcacctatggacttccagctggaggaattcagccacatccacaaaccaaaaacattaagaagaagaccaagaagcgtcagtgtaaagttctttttgagtacattccacaaaatgaggatgaactggagctgaaagtgggagatattattgatattaatgaagaggtagaagaaggctggtggagtggaaccctgaataacaagttgggactgtttccctcaaattttgtgaaagaattagaggtaacagatgatggtgaaactcatgaagcccaggacgattcagaaactgttttggctgggcctacttcacctataccttctctgggaaatgtgagtgaaactgcatctggatcagttacacagccaaagaaaattcgaggaattggatttggagacatttttaaagaaggctctgtgaaacttcggacaagaacatccagtagtgaaacagaagagaaaaaaccagaaaagcccttaatcctacagtcactgggacccaaaactcagagtgtggagataacaaaaacagataccgaaggtaaaattaaagctaaagaatattgtagaacattatttgcctatgaaggtactaatgaagatgaacttacttttaaagagggggagataatccatttgataagtaaggagactggagaagctggctggtggaggggcgaacttaatggtaaagaaggagtatttccagacaattttgctgtccagataaatgaacttgataaagactttccaaaaccaaagaaaccaccacctcctgctaaggctccagctccaaagcctgaactgatagctgcagagaagaaatatttttctttaaagcctgaagaaaagggtgaggctaattttcaactttcaaaaaagcaattatttcttttattgtcattttaaagagaattatttctccacactgagtcatttacactgatttttaacaggtattcagtatgtatttaacaatgcttggagttttctgggagggagtagttcatttctcaaacagataacaatttacattcattaaaaaattaaactattcagtaggatgttgtctttattcagttatttcacagactgtataagaaaactaagcattaaataactatgcttttattatttttatagtgtttcagtttttaaaaaattccttagaatgttgaagacccagttcctacttaagcatgaaaataattaattacatattatttaatctcactgcatgtgtttgtcataatgtaaacctggaaagttattccagggtaccacatgtattttgctaaaaaccttattggtttgttgtgaatttggagaaaataagtccttctcattgcacataaagatttgcaatgattgtcactagtagattagtttatatacatcaagaaacttgaatactattttagaatgctttttgtttcttcctccagtgttgtagtctaatccatccttgtttcttgcctaaagtattgtatcctcttacttgatttctctcactttagctccttttctggctcatacttcatgttgttgcca

SEQ ID NO: 309524 - DNA, 1738 bp, Homo sapiens
ggaattccgggaggagcggacgtcggcttctccccgcgggagcccccagcatggttgactatattgtggagtatgactatgatgctgtacatgatgatgaattaactattcgagttggagaaatcatcaggaatgtgaaaaagctacaggaggaagggtggctggaaggagaactaaatgggagaagaggaatgttccctgacaatttcgttaaggaaattaaaagagagacggaattcaaggatgacagtttgcccatcaaacgggaaaggcatgggaatgtagcaagtcttgtacaacgaataagcacctatggacttccagctggaggaattcagccacatccacaaaccaaaaacattaagaagaagaccaagaagcgtcagtgtaaagttctttttgagtacattccacaaaatgaggatgaactggagctgaaagtgggagatattattgatattaatgaagaggtagaagaaggctggtggagtggaaccctgaataacaagttgggactgtttccctcaaattttgtgaaagaattagaggtaacagatgatggtgaaactcatgaagcccaggacgattcagaaactgttttggctgggcctacttcacctataccttctctgggaaatgtgagtgaaactgcatctggatcagttacacagccaaagaaaattcgaggaattggatttggagacatttttaaagaaggctctgtgaaacttcggacaagaacatccagtagtgaaacagaagagaaaaaaccagaaaagcccttaatcctacagtcactgggacccaaaactcagagtgtggagataacaaaaacagataccgaaggtaaaattaaagctaaagaatattgtagaacattatttgcctatgaaggtactaatgaagatgaacttacttttaaagagggggagataatccatttgataagtaaggagactggagaagctggctggtggaggggcgaacttaatggtaaagaaggagtatttccagacaattttgctgtccagataaatgaacttgataaagactttccaaaaccaaagaaaccaccacctcctgctaaggctccagctccaaagcctgaactgatagctgcagagaagaaatatttttctttaaagcctgaagaaaaggatgaaaaatcaacactggaacagaaaccttctaaaccagcagctccacaagtcccacccaagaaacctactccacctaccaaagccagtaatttattgagatcttctggaacagtgtacccaaagcgacctgaaaaaccagttcctccaccacctcctatagccaagattaatggggaagtttctagcatttcatcaaaatttgaaactgagccagtatcaaaactaaagctagattctgaacagctgccccttagaccaaaatcagtagactttgattcacttacagtaaggacctccaaagaaacagatgttgtaaattttgatgacatagcttcctcagaaaacttgcttcatctcactgcaaatagaccaaagatgcctggaagaaggttgccgggccgtttcaatggtggacattctccaactcacagccccgaaaaaatcttgaagttaccaaaagaagaagacagtgcctctgcctcgagggccgcgctgaagagactggtagagcgccgcgggcggatggaggcgactcttcgccccgcctgagctcaggaggggctagcgcggagcgcggg

SEQ ID NO: 309525 - DNA, 1497 bp, Homo sapiens
ggaattccgggaggagcggacgtcggcttctccccgcgggagcccccagcatggttgactatattgtggagtatgactatgatgctgtacatgatgatgaattaactattcgagttggagaaatcatcaggaatgtgaaaaagctacaggaggaagggtggctggaaggagaactaaatgggagaagaggaatgttccctgacaatttcgttaaggaaattaaaagagagacggaattcaaggatgacagtttgcccatcaaacgggaaaggcatgggaatgtagcaagtcttgtacaacgaataagcacctatggacttccagctggaggaattcagccacatccacaaaccaaaaacattaagaagaagaccaagaagcgtcagtgtaaagttctttttgagtacattccacaaaatgaggatgaactggagctgaaagtgggagatattattgatattaatgaagaggtagaagaaggctggtggagtggaaccctgaataacaagttgggactgtttccctcaaattttgtgaaagaattagaggtaacagatgatggtgaaactcatgaagcccaggacgattcagaaactgttttggctgggcctacttcacctataccttctctgggaaatgtgagtgaaactgcatctggatcagttacacagccaaagaaaattcgaggaattggatttggagacatttttaaagaaggctctgtgaaacttcggacaagaacatccagtagtgaaacagaagagaaaaaaccagaaaagcccttaatcctacagtcactgggacccaaaactcagagtgtggagataacaaaaacagataccgaaggtaaaattaaagctaaagaatattgtagaacattatttgcctatgaaggtactaatgaagatgaacttacttttaaagagggggagataatccatttgataagtaaggagactggagaagctggctggtggaggggcgaacttaatggtaaagaaggagtatttccagacaattttgctgtccagataaatgaacttgataaagactttccaaaaccaaagaaaccaccacctcctgctaaggctccagctccaaagcctgaactgatagctgcagagaagaaatatttttctttaaagcctgaagaaaaggatgaaaaatcaacactggaacagaaaccttctaaaccagcagctccacaagtcccacccaagaaacctactccacctaccaaagccagtaatttattgagatcttctggaacagtgtacccaaagcgacctgaaaaaccagttcctccaccacctcctatagccaagattaatggggaagtttctagcatttcatcaaaatttgaaactgagccagtatcaaaactaaagctagattctgaacagctgccccttagaccaaaatcagtagactttgattcacttacagtaaggacctccaaagaaacaggtaagtcagcatggacagcggtggtgcatt

SEQ ID NO: 309526 - DNA, 4047 bp, Homo sapiens
ccgctgcggagcgccggcccgtaggcgcgggagcctccctattaagggcacgcgacatcgaggcaatagtgcgcaggtgcttagccagaggcggagcccgagaggcaggcagcggacttccggttccgggagcaacgaacagccgcggaggcgacagctaccgcttcagaggaggcggccgcggaggaggaggaaggggaggagggcgaggcgggaggtgcaggagggaccctcgccatgggtccacgggcctagagtggcggaagataccggcctggtgccaaactggctactgctgcttcctgtggcctccatggctgaggactggctggactgcccggccctgggccctggctggaagcgccgcgaagtctttcgcaagtcaggggccacctgtggacgctcagacacctattaccagagccccacaggagacaggatccgaagcaaagttgagctgactcgatacctgggccctgcgtgtgatctcaccctcttcgacttcaaacaaggcatcttgtgctatccagcccccaaggcccatcccgtggcggttgccagcaagaagcgaaagaagccttcaaggccagccaagactcggaaacgtcaggttggaccccagagtggtgaggtcaggaaggaggccccgagggatgagaccaaggctgacactgacacagccccagcttcattccctgctcctgggtgctgtgagaactgtggaatcagcttctcaggggatggcacccaaaggcagcggctcaaaacgttgtgcaaagactgtcgagcacagagaattgccttcaaccgggaacagagaatgtttaagcgtgtgggctgtggggagtgtgcagcctgccaggtaacagaagactgtggggcctgctccacctgcctcctgcagctgccccatgatgtggcatcggggctgttctgcaagtgtgaacggagacgctgcctccggattgtggaaaggagccgagggtgtggagtatgccggggctgtcagacccaagaggattgtggccattgccccatctgccttcgccctccccgccctggtctcaggcgccagtggaaatgtgtccagcgacgttgcctacggggtaaacatgcccgccgcaagggaggctgtgactccaagatggctgccaggcggcgccccggagcccagccactgcctccaccacccccatcacagtccccagagcccacagagccgcaccccagagccctggccccctcgccacctgccgagttcatctattactgtgtagacgaggacgagctacagccctacacgaaccgccggcagaaccgcaagtgcggggcctgtgcagcctgcctacggcggaatggactgtggccgctgcgacttctgctgcgacaagcccaaattcgggggcagcaaccagaagcgccagaagtgtcgttggcgccaatgcctgcagtttgccatgaagcggctgctgcccagtgtctggtcagagtctgaggatggggcaggatcgcccccaccttaccgtcgtcgaaagaggcccagctctgcccgacggcaccatcttggccctaccttgaagcccaccttggctacacgcacagcccaaccagaccatacccaggctccaacgaagcaggaagcaggtggtggctttgtgctgcccccgcctggcactgaccttgtgtttttacgggaaggcgcaagcagtcctgtgcaggtgccgggccctgttgcagcttccacagaagccctgttgcaggaggcccagtgctctggcctgagttgggttgtggccttaccccaggtgaagcaagagaaggcggatacccaggacgagtggacaccaggcacagctgtcctgacttctcccgtattggtgcctggctgccctagcaaggcagtagacccaggcctgccttctgtgaagcaagagccacctgacccagaggaggacaaggaggagaacaaggatgattctgcctccaaattggccccagaggaagaggcaggaggggctggcacacccgtgatcacggagattttcagcctgggtggaacccgcttccgagatacagcagtctggttgccaaggtccaaagaccttaaaaaacctggagctagaaagcagtagactggaggcttctacagactgtaggattcaagtctgcagggcaggcactcgggaagggaagatggatgtaaagtgtgggagaccgaggacacagtggagcccacgagcacgagctggaacccacgaggatggcctggaacccatgtcagtctctcaccacctccagcttcgatgatgtgggtgtcctgcagaagaagctggtgcccttcctcacagagttaaatatgcatctggcccaggaattagagaagctgaaaggatgatcctggggaaggtggagcagctgcaggcctggctgcaggcctgactactgcccacaccaacgaggtgatctagcagatacatggcaacgtgtgaactgcaacaacgcctggtgccccagcaccaaccttccaagtgtaaaaacaatgtgctgctgcttcacttccgccctccggttatcaagcaaaatgtctcttgtggcccatcttactggaagagagttccgggaaacatagcctcaccaaggtgacacattacaaagccaccctaccatgaatccgctcccaagggtctcactgctcacctgaggataactcaatataactatgttgctgaaaatgcaaagctgaagaccatggatttcatggtgattccagcaagtacagagattctatgaagcccacccagaaaaaacttgctggtcctggctatttttgtgtcatttattcaagtattgagaacctggcctgtggtaggcactgtacttaatactaggatacagaaatgcaaaagatacggcccatgcaattttattaaatgcatcaatatgtattacaaatggtgaatggatttccaactttatcatggaatttaatgctgaatatatagaattcagaaaattgttgggaggacagcccttttgtgaaccttgtttggggcacagtaggaattggaaataatttagtttctatctctaagctgttctattttaaaattatttttaaatttttattgtcccacttaaaaaaaaacttagtgtttcttttgggagtggtttggtgggaacagtgttgactgcctctgagaaactgggatagtgggtgggaagatcaaatcaaggtcacttctttccaaggaccctgagcgattcacttacctaggccgcgggggcggggggttggctgaaggctgaggctcttggtgctcagcactggccggacaccttcaacctgctggtgggtccgccagggggcgccggggcgagaaagcccgtagttcccagccacagtcacccaccggggccctggaggcaccgctcgtcacccatcacccctggcctggccgccctggggcgtggtctccgtccggcgcaaaccccagtacttgggctagggccagagggaagctgagtccccctcttcaaatagtggtaaaacaggcaaaaccgaaccggggttaaatttcggagctcgcccagggtgagggcggggctcgacgacctaggacgttcgagtgcggccgggtgtcgccaagggtcggtttaccccatcgcctcagaaattccgacgaggccctttgggctgcacaaccttgggaatccccaacgggcggccccgaatctgcgccgattttcccaagccgtacttcgggcccaaggcgttttcattgccgccttcccggaggatgtgtggtgggggtggttccgcccggaccgacgggcgggcccggagcccgttggactcgaagatcaaagaaccgcccctctggacactccaggaaaccgagacgaccacctaatttgtttgttttctgtttcaggccacgtaaactcttagtaaatgcaaatgcgtattttactgaactgcaattgaaagaaccgttatagaaaagaacacaaaatgacagaattattaaaagagaagaaaaacattaa

SEQ ID NO: 309527 - DNA, 3900 bp, Homo sapiens
ccgctgcggagcgccggcccgtaggcgcgggagcctccctattaagggcacgcgacatcgaggcaatagtgcgcaggtgcttagccagaggcggagcccgagaggcaggcagcggacttccggttccgggagcaacgaacagccgcggaggcgacagctaccgcttcagaggaggcggccgcggaggaggaggaaggggaggagggcgaggcgggaggtgcaggagggaccctcgccatgggtccacgggcctagagtggcggaagataccggcctggtgccaaactggctactgctgcttcctgtggcctccatggctgaggactggctggactgcccggccctgggccctggctggaagcgccgcgaagtctttcgcaagtcaggggccacctgtggacgctcagacacctattaccagagccccacaggagacaggatccgaagcaaagttgagctgactcgatacctgggccctgcgtgtgatctcaccctcttcgacttcaaacaaggcatcttgtgctatccagcccccaaggcccatcccgtggcggttgccagcaagaagcgaaagaagccttcaaggccagccaagactcggaaacgtcaggttggaccccagagtggtgaggtcaggaaggaggccccgagggatgagaccaaggctgacactgacacagccccagcttcattccctgctcctgggtgctgtgagaactgtggaatcagcttctcaggggatggcacccaaaggcagcggctcaaaacgttgtgcaaagactgtcgagcacagagaattgccttcaaccgggaacagagaatgtttaagagccgagggtgtggagtatgccggggctgtcagacccaagaggattgtggccattgccccatctgccttcgccctccccgccctggtctcaggcgccagtggaaatgtgtccagcgacgttgcctacggggtaaacatgcccgccgcaagggaggctgtgactccaagatggctgccaggcggcgccccggagcccagccactgcctccaccacccccatcacagtccccagagcccacagagccgcaccccagagccctggccccctcgccacctgccgagttcatctattactgtgtagacgaggacgagctacagccctacacgaaccgccggcagaaccgcaagtgcggggcctgtgcagcctgcctacggcggaatggactgtggccgctgcgacttctgctgcgacaagcccaaattcgggggcagcaaccagaagcgccagaagtgtcgttggcgccaatgcctgcagtttgccatgaagcggctgctgcccagtgtctggtcagagtctgaggatggggcaggatcgcccccaccttaccgtcgtcgaaagaggcccagctctgcccgacggcaccatcttggccctaccttgaagcccaccttggctacacgcacagcccaaccagaccatacccaggctccaacgaagcaggaagcaggtggtggctttgtgctgcccccgcctggcactgaccttgtgtttttacgggaaggcgcaagcagtcctgtgcaggtgccgggccctgttgcagcttccacagaagccctgttgcaggaggcccagtgctctggcctgagttgggttgtggccttaccccaggtgaagcaagagaaggcggatacccaggacgagtggacaccaggcacagctgtcctgacttctcccgtattggtgcctggctgccctagcaaggcagtagacccaggcctgccttctgtgaagcaagagccacctgacccagaggaggacaaggaggagaacaaggatgattctgcctccaaattggccccagaggaagaggcaggaggggctggcacacccgtgatcacggagattttcagcctgggtggaacccgcttccgagatacagcagtctggttgccaaggtccaaagaccttaaaaaacctggagctagaaagcagtagactggaggcttctacagactgtaggattcaagtctgcagggcaggcactcgggaagggaagatggatgtaaagtgtgggagaccgaggacacagtggagcccacgagcacgagctggaacccacgaggatggcctggaacccatgtcagtctctcaccacctccagcttcgatgatgtgggtgtcctgcagaagaagctggtgcccttcctcacagagttaaatatgcatctggcccaggaattagagaagctgaaaggatgatcctggggaaggtggagcagctgcaggcctggctgcaggcctgactactgcccacaccaacgaggtgatctagcagatacatggcaacgtgtgaactgcaacaacgcctggtgccccagcaccaaccttccaagtgtaaaaacaatgtgctgctgcttcacttccgccctccggttatcaagcaaaatgtctcttgtggcccatcttactggaagagagttccgggaaacatagcctcaccaaggtgacacattacaaagccaccctaccatgaatccgctcccaagggtctcactgctcacctgaggataactcaatataactatgttgctgaaaatgcaaagctgaagaccatggatttcatggtgattccagcaagtacagagattctatgaagcccacccagaaaaaacttgctggtcctggctatttttgtgtcatttattcaagtattgagaacctggcctgtggtaggcactgtacttaatactaggatacagaaatgcaaaagatacggcccatgcaattttattaaatgcatcaatatgtattacaaatggtgaatggatttccaactttatcatggaatttaatgctgaatatatagaattcagaaaattgttgggaggacagcccttttgtgaaccttgtttggggcacagtaggaattggaaataatttagtttctatctctaagctgttctattttaaaattatttttaaatttttattgtcccacttaaaaaaaaacttagtgtttcttttgggagtggtttggtgggaacagtgttgactgcctctgagaaactgggatagtgggtgggaagatcaaatcaaggtcacttctttccaaggaccctgagcgattcacttacctaggccgcgggggcggggggttggctgaaggctgaggctcttggtgctcagcactggccggacaccttcaacctgctggtgggtccgccagggggcgccggggcgagaaagcccgtagttcccagccacagtcacccaccggggccctggaggcaccgctcgtcacccatcacccctggcctggccgccctggggcgtggtctccgtccggcgcaaaccccagtacttgggctagggccagagggaagctgagtccccctcttcaaatagtggtaaaacaggcaaaaccgaaccggggttaaatttcggagctcgcccagggtgagggcggggctcgacgacctaggacgttcgagtgcggccgggtgtcgccaagggtcggtttaccccatcgcctcagaaattccgacgaggccctttgggctgcacaaccttgggaatccccaacgggcggccccgaatctgcgccgattttcccaagccgtacttcgggcccaaggcgttttcattgccgccttcccggaggatgtgtggtgggggtggttccgcccggaccgacgggcgggcccggagcccgttggactcgaagatcaaagaaccgcccctctggacactccaggaaaccgagacgaccacctaatttgtttgttttctgtttcaggccacgtaaactcttagtaaatgcaaatgcgtattttactgaactgcaattgaaagaaccgttatagaaaagaacacaaaatgacagaattattaaaagagaagaaaaacattaa

SEQ ID NO: 309528 - DNA, 3878 bp, Homo sapiens
ccgctgcggagcgccggcccgtaggcgcgggagcctccctattaagggcacgcgacatcgaggcaatagtgcgcaggtgcttagccagaggcggagcccgagaggcaggcagcggacttccggttccgggagcaacgaacagccgcggaggcgacagctaccgcttcagaggaggcggccgcggaggaggaggaaggggaggagggcgaggcgggaggtgcaggagggaccctcgccatgggtccacgggcctagagtggcggaagataccggcctggtgccaaactggctactgctgcttcctgtggcctccatggctgaggactggctggactgcccggccctgggccctggctggaagcgccgcgaagtctttcgcaagtcaggggccacctgtggacgctcagacacctattaccagagccccacaggagacaggatccgaagcaaagttgagctgactcgatacctgggccctgcgtgtgatctcaccctcttcgacttcaaacaaggcatcttgtgctatccagcccccaaggcccatcccgtggcggttgccagcaagaagcgaaagaagccttcaaggccagccaagactcggaaacgtcaggttggaccccagagtggtgaggtcaggaaggaggccccgagggatgagaccaaggctgacactgacacagccccagcttcattccctgctcctgggtgctgtgagaactgtggaatcagcttctcaggggatggcacccaaaggcagcggctcaaaacgttgtgcaaagactgtcgagcacagagaattgccttcaaccgggaacagagaatgtttaagcgtgtgggctgtggggagtgtgcagcctgccaggtaacagaagactgtggggcctgctccacctgcctcctgcagctgccccatgatgtggcatcggggctgttctgcaagtgtgaacggagacgctgcctccggattgtggaaaggagccgagggtgtggagtatgccggggctgtcagacccaagaggattgtggccattgccccatctgccttcgccctccccgccctggtctcaggcgccagtggaaatgtgtccagcgacgttgcctacggggtaaacatgcccgccgcaagggaggctgtgactccaagatggctgccaggcggcgccccggagcccagccactgcctccaccacccccatcacagtccccagagcccacagagccgcaccccagagccctggccccctcgccacctgccgagttcatctattactgtgtagacgaggacgagctaaagcggctgctgcccagtgtctggtcagagtctgaggatggggcaggatcgcccccaccttaccgtcgtcgaaagaggcccagctctgcccgacggcaccatcttggccctaccttgaagcccaccttggctacacgcacagcccaaccagaccatacccaggctccaacgaagcaggaagcaggtggtggctttgtgctgcccccgcctggcactgaccttgtgtttttacgggaaggcgcaagcagtcctgtgcaggtgccgggccctgttgcagcttccacagaagccctgttgcaggaggcccagtgctctggcctgagttgggttgtggccttaccccaggtgaagcaagagaaggcggatacccaggacgagtggacaccaggcacagctgtcctgacttctcccgtattggtgcctggctgccctagcaaggcagtagacccaggcctgccttctgtgaagcaagagccacctgacccagaggaggacaaggaggagaacaaggatgattctgcctccaaattggccccagaggaagaggcaggaggggctggcacacccgtgatcacggagattttcagcctgggtggaacccgcttccgagatacagcagtctggttgccaaggtccaaagaccttaaaaaacctggagctagaaagcagtagactggaggcttctacagactgtaggattcaagtctgcagggcaggcactcgggaagggaagatggatgtaaagtgtgggagaccgaggacacagtggagcccacgagcacgagctggaacccacgaggatggcctggaacccatgtcagtctctcaccacctccagcttcgatgatgtgggtgtcctgcagaagaagctggtgcccttcctcacagagttaaatatgcatctggcccaggaattagagaagctgaaaggatgatcctggggaaggtggagcagctgcaggcctggctgcaggcctgactactgcccacaccaacgaggtgatctagcagatacatggcaacgtgtgaactgcaacaacgcctggtgccccagcaccaaccttccaagtgtaaaaacaatgtgctgctgcttcacttccgccctccggttatcaagcaaaatgtctcttgtggcccatcttactggaagagagttccgggaaacatagcctcaccaaggtgacacattacaaagccaccctaccatgaatccgctcccaagggtctcactgctcacctgaggataactcaatataactatgttgctgaaaatgcaaagctgaagaccatggatttcatggtgattccagcaagtacagagattctatgaagcccacccagaaaaaacttgctggtcctggctatttttgtgtcatttattcaagtattgagaacctggcctgtggtaggcactgtacttaatactaggatacagaaatgcaaaagatacggcccatgcaattttattaaatgcatcaatatgtattacaaatggtgaatggatttccaactttatcatggaatttaatgctgaatatatagaattcagaaaattgttgggaggacagcccttttgtgaaccttgtttggggcacagtaggaattggaaataatttagtttctatctctaagctgttctattttaaaattatttttaaatttttattgtcccacttaaaaaaaaacttagtgtttcttttgggagtggtttggtgggaacagtgttgactgcctctgagaaactgggatagtgggtgggaagatcaaatcaaggtcacttctttccaaggaccctgagcgattcacttacctaggccgcgggggcggggggttggctgaaggctgaggctcttggtgctcagcactggccggacaccttcaacctgctggtgggtccgccagggggcgccggggcgagaaagcccgtagttcccagccacagtcacccaccggggccctggaggcaccgctcgtcacccatcacccctggcctggccgccctggggcgtggtctccgtccggcgcaaaccccagtacttgggctagggccagagggaagctgagtccccctcttcaaatagtggtaaaacaggcaaaaccgaaccggggttaaatttcggagctcgcccagggtgagggcggggctcgacgacctaggacgttcgagtgcggccgggtgtcgccaagggtcggtttaccccatcgcctcagaaattccgacgaggccctttgggctgcacaaccttgggaatccccaacgggcggccccgaatctgcgccgattttcccaagccgtacttcgggcccaaggcgttttcattgccgccttcccggaggatgtgtggtgggggtggttccgcccggaccgacgggcgggcccggagcccgttggactcgaagatcaaagaaccgcccctctggacactccaggaaaccgagacgaccacctaatttgtttgttttctgtttcaggccacgtaaactcttagtaaatgcaaatgcgtattttactgaactgcaattgaaagaaccgttatagaaaagaacacaaaatgacagaattattaaaagagaagaaaaacattaa

SEQ ID NO: 309529 - DNA, 3740 bp, Homo sapiens
ccgctgcggagcgccggcccgtaggcgcgggagcctccctattaagggcacgcgacatcgaggcaatagtgcgcaggtgcttagccagaggcggagcccgagaggcaggcagcggacttccggttccgggagcaacgaacagccgcggaggcgacagctaccgcttcagaggaggcggccgcggaggaggaggaaggggaggagggcgaggcgggaggtgcaggagggaccctcgccatgggtccacgggcctagagtggcggaagataccggcctggtgccaaactggctactgctgcttcctgtggcctccatggctgaggactggctggactgcccggccctgggccctggctggaagcgccgcgaagtctttcgcaagtcaggggccacctgtggacgctcagacacctattaccagagccccacaggagacaggatccgaagcaaagttgagctgactcgatacctgggccctgcgtgtgatctcaccctcttcgacttcaaacaaggcatcttgtgctatccagcccccaaggcccatcccgtggcggttgccagcaagaagcgaaagaagccttcaaggccagccaagactcggaaacgtcaggttggaccccagagtggtgaggtcaggaaggaggccccgagggatgagaccaaggctgacactgacacagccccagcttcattccctgctcctgggtgctgtgagaactgtggaatcagcttctcaggggatggcacccaaaggcagcggctcaaaacgttgtgcaaagactgtcgagcacagagaattgccttcaaccgggaacagagaatgtttaagcgtgtgggctgtggggagtgtgcagcctgccaggtaacagaagactgtggggcctgctccacctgcctcctgcagctgccccatgatgtggcatcggggctgttctgcaagtgtgaacggagacgctgcctccggattgtggaaaggagccgagggtgtggagtatgccggggctgtcagacccaagaggattgtggccattgccccatctgccttcgccctccccgccctggtctcaggcgccagtggaaatgtgtccagcgacgttgcctacggggtaaacatgcccgccgcaagggaggctgtgactccaagatggctgccaggcggcgccccggagcccagccactgcctccaccacccccatcacagtccccagagcccacagagccgcaccccagagccctggccccctcgccacctgccgagttcatctattactgtgtagacgaggacgagctaaagcggctgctgcccagtgtctggtcagagtctgaggatggggcaggatcgcccccaccttaccgtcgtcgaaagaggcccagctctgcccgacggcaccatcttggccctaccttgaagcccaccttggctacacgcacagcccaaccagaccatacccaggctccaacgaagcaggaagcaggtggtggctttgtgctgcccccgcctggcactgaccttgtgtttttacgggaaggcgcaagcagtcctgtgcaggtgccgggccctgttgcagcttccacagaagccctgttgcaggcagtagacccaggcctgccttctgtgaagcaagagccacctgacccagaggaggacaaggaggagaacaaggatgattctgcctccaaattggccccagaggaagaggcaggaggggctggcacacccgtgatcacggagattttcagcctgggtggaacccgcttccgagatacagcagtctggttgccaaggtccaaagaccttaaaaaacctggagctagaaagcagtagactggaggcttctacagactgtaggattcaagtctgcagggcaggcactcgggaagggaagatggatgtaaagtgtgggagaccgaggacacagtggagcccacgagcacgagctggaacccacgaggatggcctggaacccatgtcagtctctcaccacctccagcttcgatgatgtgggtgtcctgcagaagaagctggtgcccttcctcacagagttaaatatgcatctggcccaggaattagagaagctgaaaggatgatcctggggaaggtggagcagctgcaggcctggctgcaggcctgactactgcccacaccaacgaggtgatctagcagatacatggcaacgtgtgaactgcaacaacgcctggtgccccagcaccaaccttccaagtgtaaaaacaatgtgctgctgcttcacttccgccctccggttatcaagcaaaatgtctcttgtggcccatcttactggaagagagttccgggaaacatagcctcaccaaggtgacacattacaaagccaccctaccatgaatccgctcccaagggtctcactgctcacctgaggataactcaatataactatgttgctgaaaatgcaaagctgaagaccatggatttcatggtgattccagcaagtacagagattctatgaagcccacccagaaaaaacttgctggtcctggctatttttgtgtcatttattcaagtattgagaacctggcctgtggtaggcactgtacttaatactaggatacagaaatgcaaaagatacggcccatgcaattttattaaatgcatcaatatgtattacaaatggtgaatggatttccaactttatcatggaatttaatgctgaatatatagaattcagaaaattgttgggaggacagcccttttgtgaaccttgtttggggcacagtaggaattggaaataatttagtttctatctctaagctgttctattttaaaattatttttaaatttttattgtcccacttaaaaaaaaacttagtgtttcttttgggagtggtttggtgggaacagtgttgactgcctctgagaaactgggatagtgggtgggaagatcaaatcaaggtcacttctttccaaggaccctgagcgattcacttacctaggccgcgggggcggggggttggctgaaggctgaggctcttggtgctcagcactggccggacaccttcaacctgctggtgggtccgccagggggcgccggggcgagaaagcccgtagttcccagccacagtcacccaccggggccctggaggcaccgctcgtcacccatcacccctggcctggccgccctggggcgtggtctccgtccggcgcaaaccccagtacttgggctagggccagagggaagctgagtccccctcttcaaatagtggtaaaacaggcaaaaccgaaccggggttaaatttcggagctcgcccagggtgagggcggggctcgacgacctaggacgttcgagtgcggccgggtgtcgccaagggtcggtttaccccatcgcctcagaaattccgacgaggccctttgggctgcacaaccttgggaatccccaacgggcggccccgaatctgcgccgattttcccaagccgtacttcgggcccaaggcgttttcattgccgccttcccggaggatgtgtggtgggggtggttccgcccggaccgacgggcgggcccggagcccgttggactcgaagatcaaagaaccgcccctctggacactccaggaaaccgagacgaccacctaatttgtttgttttctgtttcaggccacgtaaactcttagtaaatgcaaatgcgtattttactgaactgcaattgaaagaaccgttatagaaaagaacacaaaatgacagaattattaaaagagaagaaaaacattaa

SEQ ID NO: 309530 - DNA, 1247 bp, Homo sapiens
ccgctgcggagcgccggcccgtaggcgcgggagcctccctattaagggcacgcgacatcgaggcaatagtgcgcaggtgcttagccagaggcggagcccgagaggcaggcagcggacttccggttccgggagcaacgaacagccgcggaggcgacagctaccgcttcagaggaggcggccgcggaggaggaggaaggggaggagggcgaggcgggaggtgcaggagggaccctcgccatgggtccacgggcctagagtggcggaagataccggcctggtgccaaactggctactgctgcttcctgtggcctccatggctgaggactggctggactgcccggccctgggccctggctggaagcgccgcgaagtctttcgcaagtcaggggccacctgtggacgctcagacacctattaccagagccccacaggagacaggatccgaagcaaagttgagctgactcgatacctgggccctgcgtgtgatctcaccctcttcgacttcaaacaaggcatcttgtgctatccagcccccaaggcccatcccgtggcggttgccagcaagaagcgaaagaagccttcaaggccagccaagactcggaaacgtcaggttggaccccagagtggtgaggtcaggaaggaggccccgagggatgagaccaaggctgacactgacacagccccagcttcattccctgctcctgggtgctgtgagaactgtggaatcagcttctcaggggatggcacccaaaggcagcggctcaaaacgttgtgcaaagactgtcgagcacagagaattgccttcaaccgggaacagagaatgtttaagcgtgtgggctgtggggagtgtgcagcctgccaggtaacagaagactgtggggcctgctccacctgcctcctgcagctgccccatgatgtggcatcggggctgttctgcaagtgtgaacggagacgctgcctccggattgtggaaaggagccgagggtgtggagtatgccggggctgtcagacccaagaggattgtggccattgccccatctgccttcgccctccccgccctggtctcaggcgccagtggaaatgtgtccagcgacgttgcctacggggtaaacatgcccgccgcaagggaggctgtgactccaagatggctgccaggcggcgccccggagcccagccactgcctccaccacccccatcacagtccccagagcccacagagccggtgaggccccagtgggtggagggaa

SEQ ID NO: 309531 - DNA, 1269 bp, Homo sapiens
ccgctgcggagcgccggcccgtaggcgcgggagcctccctattaagggcacgcgacatcgaggcaatagtgcgcaggtgcttagccagaggcggagcccgagaggcaggcagcggacttccggttccgggagcaacgaacagccgcggaggcgacagctaccgcttcagaggaggcggccgcggaggaggaggaaggggaggagggcgaggcgggaggtgcaggagggaccctcgccatgggtccacgggcctagagtggcggaagataccggcctggtgccaaactggctactgctgcttcctgtggcctccatggctgaggactggctggactgcccggccctgggccctggctggaagcgccgcgaagtctttcgcaagtcaggggccacctgtggacgctcagacacctattaccagagccccacaggagacaggatccgaagcaaagttgagctgactcgatacctgggccctgcgtgtgatctcaccctcttcgacttcaaacaaggcatcttgtgctatccagcccccaaggcccatcccgtggcggttgccagcaagaagcgaaagaagccttcaaggccagccaagactcggaaacgtcaggttggaccccagagtggtgaggtcaggaaggaggccccgagggatgagaccaaggctgacactgacacagccccagcttcattccctgctcctgggtgctgtgagaactgtggaatcagcttctcaggggatggcacccaaaggcagcggctcaaaacgttgtgcaaagactgtcgagcacagagaattgccttcaaccgggaacagagaatgtttaagagccgagggtgtggagtatgccggggctgtcagacccaagaggattgtggccattgccccatctgccttcgccctccccgccctggtctcaggcgccagtggaaatgtgtccagcgacgttgcctacggtgatgaactactcccttcctgccttcagtaacaacattacaggaagagaggagagaaaggtaggagttaaagatccagtcatttgtttccatctaaagtgccctataagccgggcatcgtggcgcaagcctgtagtcccagctactcgggaggctggggcaggagaatcacttgagcccaggagttggaggccgcagtgagctgtgatcatgccactgcattccagcctgggcgacagagtgagacccagactcagctgaaaaataataatattattaaaagaatttaaaataaagtgttccatagatgtg

SEQ ID NO: 309532 - DNA, 1075 bp, Homo sapiens
gtaaattgcgtccttaagagggcatacacattagttgtacttattatatgtcagtttgacgtaggtactgatttgttgcatgtgctcacaagtgttctatgctcacccccactttagaatgggagtatcacagtgtcattcttaattggcttttaggtattaccaccttgctcttgactggaaatgcaactgtggttaccacctgtgctgcaggtccgtcctggttccctgatttgtgtttcctgttctgcctggatcctgattctcagaaaccagttactggacttctgatccacatcctgaccctggtccactgtgaccctcagactcttaattatgctccaccaggtcgtgccactgccccactagtccatttgatctgcccccatcctaggatatcctgagtctaagccctggtttctgccaatggcaaataggaagattttattaacaggttttaaaaaattattattattactggttatttggtttgacaaggcacttaggctccctgagctttgccttagctggaaaataaggatagtattacttgctattctatcaaccctgtaagatatttgcggccacgcgcggtagcgcaccctgtaattccaacactttgggaggccggcgggaggggcagtggggaggatcgcttgaacccaggagcaggagttccagcctgagcaacatagcgggaccccctgtctcttcaaaatttgtttttaaattagcagggcgtggtggcgcaggctctgtagtcccagatactctggaggctgaggcccaggaggacgaggctgcagggagccatgatcacgccacggcactccaccctgggcgacagagcgagaccttgtctcagaaaaaatctgtgaggttaaaaggctgtgtgtgtgaaaatatcttggaaattgtaaagaactacacaaatataaggttttcctgtgattattaccgtcatcaagattaacctacagatagtgcaaaatttaagcttcccaaaaaatgttcgctaacctttttcatacttttagaccattacaagatataaatagcaaagtcaactggaatt

SEQ ID NO: 309533 - DNA, 560 bp, Homo sapiens
ccgctgcggagcgccggcccgtaggcgcgggagcctccctattaagggcacgcgacatcgaggcaatagtgcgcaggtgcttagccagaggcggagcccgagaggcaggcagcggacttccggttccgggagcaacgaacagccgcggaggcgacagctaccgcttcagaggaggcggccgcggaggaggaggaaggggaggagggcgaggcgggaggtgcaggagggaccctcgccatgggtccacgggcctagagtggcggaagataccggcctggtgccaaactggctactgctgcttcctgtggcctccatggctgaggactggctggactgcccggccctgggccctggctggaagcgccgcgaagtctttcgcaagtcaggggccacctgtggacgctcagacacctattaccagaggtactgggtgggtagtgggcagagtcaggagtggggtagagcctgattctggtaaaatcaaatggtgtggttaaatttatggatgaagtttaaattatgcacatacagttaatccttattagcggattttatgtttg

SEQ ID NO: 309534 - DNA, 5697 bp, Homo sapiens
ccgctgcggagcgccggcccgtaggcgcgggagcctccctattaagggcacgcgacatcgaggcaatagtgcgcaggtgcttagccagaggcggagcccgagaggcaggcagcggacttccggttccgggagcaacgaacagccgcggaggcgacagctaccgcttcagaggaggcggccgcggaggaggaggaaggggaggagggcgaggcgggaggtgcaggagggaccctcgccatgggtccacgggcctagagtggcggaagataccggcctggtgccaaactggctactgctgcttcctgtggcctccatggctgaggactggctggactgcccggccctgggccctggctggaagcgccgcgaagtctttcgcaagtcaggggccacctgtggacgctcagacacctattaccagagccccacaggagacaggatccgaagcaaagttgagctgactcgatacctgggccctgcgtgtgatctcaccctcttcgacttcaaacaaggcatcttgtgctatccagcccccaaggcccatcccgtggcggttgccagcaagaagcgaaagaagccttcaaggccagccaagactcggaaacgtcaggttggaccccagagtggtgaggtcaggaaggaggccccgagggatgagaccaaggctgacactgacacagccccagcttcattccctgctcctgggtgctgtgagaactgtggaatcagcttctcaggggatggcacccaaaggcagcggctcaaaacgttgtgcaaagactgtcgagcacagagaattgccttcaaccgggaacagagaatgtttaagcgtgtgggctgtggggagtgtgcagcctgccaggtaacagaagactgtggggcctgctccacctgcctcctgcagctgccccatgatgtggcatcggggctgttctgcaagtgtgaacggagacgctgcctccggattgtggaaaggagccgagggtgtggagtatgccggggctgtcagacccaagaggattgtggccattgccccatctgccttcgccctccccgccctggtctcaggcgccagtggaaatgtgtccagcgacgttgcctacggggtaaacatgcccgccgcaagggaggctgtgactccaagatggctgccaggcggcgccccggagcccagccactgcctccaccacccccatcacagtccccagagcccacagagccgcaccccagagccctggccccctcgccacctgccgagttcatctattactgtgtagacgaggacgagctacagccctacacgaaccgccggcagaaccgcaagtgcggggcctgtgcagcctgcctacggcggaatggactgtggccgctgcgacttctgctgcgacaagcccaaattcgggggcagcaaccagaagcgccagaagtgtcgttggcgccaatgcctgcagtttgccatgaagcggctgctgcccagtgtctggtcagagtctgaggatggggcaggatcgcccccaccttaccgtcgtcgaaagaggcccagctctgcccgacggcaccatcttggccctaccttgaagcccaccttggctacacgcacagcccaaccagaccatacccaggctccaacgaagcaggaagcaggtggtggctttgtgctgcccccgcctggcactgaccttgtgtttttacgggaaggcgcaagcagtcctgtgcaggtgccgggccctgttgcagcttccacagaagccctgttgcaggaggcccagtgctctggcctgagttgggttgtggccttaccccaggtgaagcaagagaaggcggatacccaggacgagtggacaccaggcacagctgtcctgacttctcccgtattggtgcctggctgccctagcaaggcagtagacccaggcctgccttctgtgaagcaagagccacctgacccagaggaggacaaggaggagaacaaggatgattctgcctccaaattggccccagaggaagaggcaggaggggctggcacacccgtgatcacggagattttcagcctgggtggaacccgcttccgagatacagcagtctggttgccaaggtccaaagaccttaaaaaacctggagctagaaagcagtagactggaggcttctacagactgtaggattcaaggtgatatttgcagactggctttatgagagacaacactgatctactaggggctggaccctagattggttgccagggcttgtgtgtgaatcaaccctaggaggaaaaacctactaccaaaccagaagagcaggcctaagagtactttgagcttctagaagaagtaagcgggaaaggaagagaaagagtagaaagttggtgcatcttctcctccccaagagcctgagtataagaagttggattttaagggtgggggagctgggttggagaaaggtaatataattaaagccaccacaaaacaacctaaacaagccatgttcatgagtaattgtaagtggcttctggatgagacctggcagtgtctctacatacttcctcagggagatagcaattgaaaatgtaattgaataaataaggaaaggaactgctatttggtgtgttcctctgtggacccagtttatttaatccttaaaataatatttttgggaagacattgattttgtccatttatgtggatgggaaaactgagactcattaatttgtccaatgtcgaacagctggtgttagtagagcctagactcaaacccagcttttaaagcccttgttctttactccactaaactgtaacctgtaatcctgtatgcactaacaggagttttcggtgaccttgaaaacacagattactataattactataataaatcccttacattcctgtctctagcatggtttagggagtgccaaggctcaatgtagatggggtcaccttgtcagagcatctgttcatacagaaactgggtttcctgcagaccccaggtgctgcataggattcctcaaaccctacaggatatatctccccactggctgctgtccattttgcttgttaccctgactccccctcttcagccagagcagtctttgtaactaaagctgccagcctggctcatctttcctgacaacgtgcatctcctgccctgtgatcacctttgtgcttggctcctgccctcagcctgaatgtgttctaggaggctgaattcctgcttcgagtcctgcccaagagccagtcttggctcagccctacctcactctctcccaattcttcattcataaagtgccaaaaagattagacctgtaatttgttagccagctttacagggccaggactgagtgagtgcctccttaaactttgtatcctgtgtgcctcccttgccttaccctagtcccagccctgcagctttaagtaattcagacatggattagccatttcccagttctgtctcatacagtccagcctctgccaccttccccaccccttcctttattccatcctaactagttcagccctagtcaagactggatagactgatactgctttgtttcccccaggaaccaaccacccaaccccagtattctggtaattttgacaatgatctatatgaaatttatttgattgacatttagactcatgagttaagcttctgctgaccatttatgttagggtacaatcagaggagcagaaccactaagataaagattatgtatatatgtattttaagggatttattatagggatctgaccgcatgccattgtgggagctggttaaacagtctctgtaaggctgttgtctttgcatctaatgctggagcttgaagtctgcagggcaggcactcgggaagggaagatggatgtaaagtgtgggagaccgaggacacagtggagcccacgagcacgagctggaacccacgaggatggcctggaacccatgtcagtctctcaccacctccagcttcgatgatgtgggtgtcctgcagaagaagctggtgcccttcctcacagagttaaatatgcatctggcccaggaattagagaagctgaaaggatgatcctggggaaggtggagcagctgcaggcctggctgcaggcctgactactgcccacaccaacgaggtgatctagcagatacatggcaacgtgtgaactgcaacaacgcctggtgccccagcaccaaccttccaagtgtaaaaacaatgtgctgctgcttcacttccgccctccggttatcaagcaaaatgtctcttgtggcccatcttactggaagagagttccgggaaacatagcctcaccaaggtgacacattacaaagccaccctaccatgaatccgctcccaagggtctcactgctcacctgaggataactcaatataactatgttgctgaaaatgcaaagctgaagaccatggatttcatggtgattccagcaagtacagagattctatgaagcccacccagaaaaaacttgctggtcctggctatttttgtgtcatttattcaagtattgagaacctggcctgtggtaggcactgtacttaatactaggatacagaaatgcaaaagatacggcccatgcaattttattaaatgcatcaatatgtattacaaatggtgaatggatttccaactttatcatggaatttaatgctgaatatatagaattcagaaaattgttgggaggacagcccttttgtgaaccttgtttggggcacagtaggaattggaaataatttagtttctatctctaagctgttctattttaaaattatttttaaatttttattgtcccacttaaaaaaaaacttagtgtttcttttgggagtggtttggtgggaacagtgttgactgcctctgagaaactgggatagtgggtgggaagatcaaatcaaggtcacttctttccaaggaccctgagcgattcacttacctaggccgcgggggcggggggttggctgaaggctgaggctcttggtgctcagcactggccggacaccttcaacctgctggtgggtccgccagggggcgccggggcgagaaagcccgtagttcccagccacagtcacccaccggggccctggaggcaccgctcgtcacccatcacccctggcctggccgccctggggcgtggtctccgtccggcgcaaaccccagtacttgggctagggccagagggaagctgagtccccctcttcaaatagtggtaaaacaggcaaaaccgaaccggggttaaatttcggagctcgcccagggtgagggcggggctcgacgacctaggacgttcgagtgcggccgggtgtcgccaagggtcggtttaccccatcgcctcagaaattccgacgaggccctttgggctgcacaaccttgggaatccccaacgggcggccccgaatctgcgccgattttcccaagccgtacttcgggcccaaggcgttttcattgccgccttcccggaggatgtgtggtgggggtggttccgcccggaccgacgggcgggcccggagcccgttggactcgaagatcaaagaaccgcccctctggacactccaggaaaccgagacgaccacctaatttgtttgttttctgtttcaggccacgtaaactcttagtaaatgcaaatgcgtattttactgaactgcaattgaaagaaccgttatagaaaagaacacaaaatgacagaattattaaaagagaagaaaaacattaa

SEQ ID NO: 309535 - DNA, 5528 bp, Homo sapiens
ccgctgcggagcgccggcccgtaggcgcgggagcctccctattaagggcacgcgacatcgaggcaatagtgcgcaggtgcttagccagaggcggagcccgagaggcaggcagcggacttccggttccgggagcaacgaacagccgcggaggcgacagctaccgcttcagaggaggcggccgcggaggaggaggaaggggaggagggcgaggcgggaggtgcaggagggaccctcgccatgggtccacgggcctagagtggcggaagataccggcctggtgccaaactggctactgctgcttcctgtggcctccatggctgaggactggctggactgcccggccctgggccctggctggaagcgccgcgaagtctttcgcaagtcaggggccacctgtggacgctcagacacctattaccagagccccacaggagacaggatccgaagcaaagttgagctgactcgatacctgggccctgcgtgtgatctcaccctcttcgacttcaaacaaggcatcttgtgctatccagcccccaaggcccatcccgtggcggttgccagcaagaagcgaaagaagccttcaaggccagccaagactcggaaacgtcaggttggaccccagagtggtgaggtcaggaaggaggccccgagggatgagaccaaggctgacactgacacagccccagcttcattccctgctcctgggtgctgtgagaactgtggaatcagcttctcaggggatggcacccaaaggcagcggctcaaaacgttgtgcaaagactgtcgagcacagagaattgccttcaaccgggaacagagaatgtttaagcgtgtgggctgtggggagtgtgcagcctgccaggtaacagaagactgtggggcctgctccacctgcctcctgcagctgccccatgatgtggcatcggggctgttctgcaagtgtgaacggagacgctgcctccggattgtggaaaggagccgagggtgtggagtatgccggggctgtcagacccaagaggattgtggccattgccccatctgccttcgccctccccgccctggtctcaggcgccagtggaaatgtgtccagcgacgttgcctacggggtaaacatgcccgccgcaagggaggctgtgactccaagatggctgccaggcggcgccccggagcccagccactgcctccaccacccccatcacagtccccagagcccacagagccgcaccccagagccctggccccctcgccacctgccgagttcatctattactgtgtagacgaggacgagctaaagcggctgctgcccagtgtctggtcagagtctgaggatggggcaggatcgcccccaccttaccgtcgtcgaaagaggcccagctctgcccgacggcaccatcttggccctaccttgaagcccaccttggctacacgcacagcccaaccagaccatacccaggctccaacgaagcaggaagcaggtggtggctttgtgctgcccccgcctggcactgaccttgtgtttttacgggaaggcgcaagcagtcctgtgcaggtgccgggccctgttgcagcttccacagaagccctgttgcaggaggcccagtgctctggcctgagttgggttgtggccttaccccaggtgaagcaagagaaggcggatacccaggacgagtggacaccaggcacagctgtcctgacttctcccgtattggtgcctggctgccctagcaaggcagtagacccaggcctgccttctgtgaagcaagagccacctgacccagaggaggacaaggaggagaacaaggatgattctgcctccaaattggccccagaggaagaggcaggaggggctggcacacccgtgatcacggagattttcagcctgggtggaacccgcttccgagatacagcagtctggttgccaaggtccaaagaccttaaaaaacctggagctagaaagcagtagactggaggcttctacagactgtaggattcaaggtgatatttgcagactggctttatgagagacaacactgatctactaggggctggaccctagattggttgccagggcttgtgtgtgaatcaaccctaggaggaaaaacctactaccaaaccagaagagcaggcctaagagtactttgagcttctagaagaagtaagcgggaaaggaagagaaagagtagaaagttggtgcatcttctcctccccaagagcctgagtataagaagttggattttaagggtgggggagctgggttggagaaaggtaatataattaaagccaccacaaaacaacctaaacaagccatgttcatgagtaattgtaagtggcttctggatgagacctggcagtgtctctacatacttcctcagggagatagcaattgaaaatgtaattgaataaataaggaaaggaactgctatttggtgtgttcctctgtggacccagtttatttaatccttaaaataatatttttgggaagacattgattttgtccatttatgtggatgggaaaactgagactcattaatttgtccaatgtcgaacagctggtgttagtagagcctagactcaaacccagcttttaaagcccttgttctttactccactaaactgtaacctgtaatcctgtatgcactaacaggagttttcggtgaccttgaaaacacagattactataattactataataaatcccttacattcctgtctctagcatggtttagggagtgccaaggctcaatgtagatggggtcaccttgtcagagcatctgttcatacagaaactgggtttcctgcagaccccaggtgctgcataggattcctcaaaccctacaggatatatctccccactggctgctgtccattttgcttgttaccctgactccccctcttcagccagagcagtctttgtaactaaagctgccagcctggctcatctttcctgacaacgtgcatctcctgccctgtgatcacctttgtgcttggctcctgccctcagcctgaatgtgttctaggaggctgaattcctgcttcgagtcctgcccaagagccagtcttggctcagccctacctcactctctcccaattcttcattcataaagtgccaaaaagattagacctgtaatttgttagccagctttacagggccaggactgagtgagtgcctccttaaactttgtatcctgtgtgcctcccttgccttaccctagtcccagccctgcagctttaagtaattcagacatggattagccatttcccagttctgtctcatacagtccagcctctgccaccttccccaccccttcctttattccatcctaactagttcagccctagtcaagactggatagactgatactgctttgtttcccccaggaaccaaccacccaaccccagtattctggtaattttgacaatgatctatatgaaatttatttgattgacatttagactcatgagttaagcttctgctgaccatttatgttagggtacaatcagaggagcagaaccactaagataaagattatgtatatatgtattttaagggatttattatagggatctgaccgcatgccattgtgggagctggttaaacagtctctgtaaggctgttgtctttgcatctaatgctggagcttgaagtctgcagggcaggcactcgggaagggaagatggatgtaaagtgtgggagaccgaggacacagtggagcccacgagcacgagctggaacccacgaggatggcctggaacccatgtcagtctctcaccacctccagcttcgatgatgtgggtgtcctgcagaagaagctggtgcccttcctcacagagttaaatatgcatctggcccaggaattagagaagctgaaaggatgatcctggggaaggtggagcagctgcaggcctggctgcaggcctgactactgcccacaccaacgaggtgatctagcagatacatggcaacgtgtgaactgcaacaacgcctggtgccccagcaccaaccttccaagtgtaaaaacaatgtgctgctgcttcacttccgccctccggttatcaagcaaaatgtctcttgtggcccatcttactggaagagagttccgggaaacatagcctcaccaaggtgacacattacaaagccaccctaccatgaatccgctcccaagggtctcactgctcacctgaggataactcaatataactatgttgctgaaaatgcaaagctgaagaccatggatttcatggtgattccagcaagtacagagattctatgaagcccacccagaaaaaacttgctggtcctggctatttttgtgtcatttattcaagtattgagaacctggcctgtggtaggcactgtacttaatactaggatacagaaatgcaaaagatacggcccatgcaattttattaaatgcatcaatatgtattacaaatggtgaatggatttccaactttatcatggaatttaatgctgaatatatagaattcagaaaattgttgggaggacagcccttttgtgaaccttgtttggggcacagtaggaattggaaataatttagtttctatctctaagctgttctattttaaaattatttttaaatttttattgtcccacttaaaaaaaaacttagtgtttcttttgggagtggtttggtgggaacagtgttgactgcctctgagaaactgggatagtgggtgggaagatcaaatcaaggtcacttctttccaaggaccctgagcgattcacttacctaggccgcgggggcggggggttggctgaaggctgaggctcttggtgctcagcactggccggacaccttcaacctgctggtgggtccgccagggggcgccggggcgagaaagcccgtagttcccagccacagtcacccaccggggccctggaggcaccgctcgtcacccatcacccctggcctggccgccctggggcgtggtctccgtccggcgcaaaccccagtacttgggctagggccagagggaagctgagtccccctcttcaaatagtggtaaaacaggcaaaaccgaaccggggttaaatttcggagctcgcccagggtgagggcggggctcgacgacctaggacgttcgagtgcggccgggtgtcgccaagggtcggtttaccccatcgcctcagaaattccgacgaggccctttgggctgcacaaccttgggaatccccaacgggcggccccgaatctgcgccgattttcccaagccgtacttcgggcccaaggcgttttcattgccgccttcccggaggatgtgtggtgggggtggttccgcccggaccgacgggcgggcccggagcccgttggactcgaagatcaaagaaccgcccctctggacactccaggaaaccgagacgaccacctaatttgtttgttttctgtttcaggccacgtaaactcttagtaaatgcaaatgcgtattttactgaactgcaattgaaagaaccgttatagaaaagaacacaaaatgacagaattattaaaagagaagaaaaacattaa

SEQ ID NO: 309536 - DNA, 5390 bp, Homo sapiens
ccgctgcggagcgccggcccgtaggcgcgggagcctccctattaagggcacgcgacatcgaggcaatagtgcgcaggtgcttagccagaggcggagcccgagaggcaggcagcggacttccggttccgggagcaacgaacagccgcggaggcgacagctaccgcttcagaggaggcggccgcggaggaggaggaaggggaggagggcgaggcgggaggtgcaggagggaccctcgccatgggtccacgggcctagagtggcggaagataccggcctggtgccaaactggctactgctgcttcctgtggcctccatggctgaggactggctggactgcccggccctgggccctggctggaagcgccgcgaagtctttcgcaagtcaggggccacctgtggacgctcagacacctattaccagagccccacaggagacaggatccgaagcaaagttgagctgactcgatacctgggccctgcgtgtgatctcaccctcttcgacttcaaacaaggcatcttgtgctatccagcccccaaggcccatcccgtggcggttgccagcaagaagcgaaagaagccttcaaggccagccaagactcggaaacgtcaggttggaccccagagtggtgaggtcaggaaggaggccccgagggatgagaccaaggctgacactgacacagccccagcttcattccctgctcctgggtgctgtgagaactgtggaatcagcttctcaggggatggcacccaaaggcagcggctcaaaacgttgtgcaaagactgtcgagcacagagaattgccttcaaccgggaacagagaatgtttaagcgtgtgggctgtggggagtgtgcagcctgccaggtaacagaagactgtggggcctgctccacctgcctcctgcagctgccccatgatgtggcatcggggctgttctgcaagtgtgaacggagacgctgcctccggattgtggaaaggagccgagggtgtggagtatgccggggctgtcagacccaagaggattgtggccattgccccatctgccttcgccctccccgccctggtctcaggcgccagtggaaatgtgtccagcgacgttgcctacggggtaaacatgcccgccgcaagggaggctgtgactccaagatggctgccaggcggcgccccggagcccagccactgcctccaccacccccatcacagtccccagagcccacagagccgcaccccagagccctggccccctcgccacctgccgagttcatctattactgtgtagacgaggacgagctaaagcggctgctgcccagtgtctggtcagagtctgaggatggggcaggatcgcccccaccttaccgtcgtcgaaagaggcccagctctgcccgacggcaccatcttggccctaccttgaagcccaccttggctacacgcacagcccaaccagaccatacccaggctccaacgaagcaggaagcaggtggtggctttgtgctgcccccgcctggcactgaccttgtgtttttacgggaaggcgcaagcagtcctgtgcaggtgccgggccctgttgcagcttccacagaagccctgttgcaggcagtagacccaggcctgccttctgtgaagcaagagccacctgacccagaggaggacaaggaggagaacaaggatgattctgcctccaaattggccccagaggaagaggcaggaggggctggcacacccgtgatcacggagattttcagcctgggtggaacccgcttccgagatacagcagtctggttgccaaggtccaaagaccttaaaaaacctggagctagaaagcagtagactggaggcttctacagactgtaggattcaaggtgatatttgcagactggctttatgagagacaacactgatctactaggggctggaccctagattggttgccagggcttgtgtgtgaatcaaccctaggaggaaaaacctactaccaaaccagaagagcaggcctaagagtactttgagcttctagaagaagtaagcgggaaaggaagagaaagagtagaaagttggtgcatcttctcctccccaagagcctgagtataagaagttggattttaagggtgggggagctgggttggagaaaggtaatataattaaagccaccacaaaacaacctaaacaagccatgttcatgagtaattgtaagtggcttctggatgagacctggcagtgtctctacatacttcctcagggagatagcaattgaaaatgtaattgaataaataaggaaaggaactgctatttggtgtgttcctctgtggacccagtttatttaatccttaaaataatatttttgggaagacattgattttgtccatttatgtggatgggaaaactgagactcattaatttgtccaatgtcgaacagctggtgttagtagagcctagactcaaacccagcttttaaagcccttgttctttactccactaaactgtaacctgtaatcctgtatgcactaacaggagttttcggtgaccttgaaaacacagattactataattactataataaatcccttacattcctgtctctagcatggtttagggagtgccaaggctcaatgtagatggggtcaccttgtcagagcatctgttcatacagaaactgggtttcctgcagaccccaggtgctgcataggattcctcaaaccctacaggatatatctccccactggctgctgtccattttgcttgttaccctgactccccctcttcagccagagcagtctttgtaactaaagctgccagcctggctcatctttcctgacaacgtgcatctcctgccctgtgatcacctttgtgcttggctcctgccctcagcctgaatgtgttctaggaggctgaattcctgcttcgagtcctgcccaagagccagtcttggctcagccctacctcactctctcccaattcttcattcataaagtgccaaaaagattagacctgtaatttgttagccagctttacagggccaggactgagtgagtgcctccttaaactttgtatcctgtgtgcctcccttgccttaccctagtcccagccctgcagctttaagtaattcagacatggattagccatttcccagttctgtctcatacagtccagcctctgccaccttccccaccccttcctttattccatcctaactagttcagccctagtcaagactggatagactgatactgctttgtttcccccaggaaccaaccacccaaccccagtattctggtaattttgacaatgatctatatgaaatttatttgattgacatttagactcatgagttaagcttctgctgaccatttatgttagggtacaatcagaggagcagaaccactaagataaagattatgtatatatgtattttaagggatttattatagggatctgaccgcatgccattgtgggagctggttaaacagtctctgtaaggctgttgtctttgcatctaatgctggagcttgaagtctgcagggcaggcactcgggaagggaagatggatgtaaagtgtgggagaccgaggacacagtggagcccacgagcacgagctggaacccacgaggatggcctggaacccatgtcagtctctcaccacctccagcttcgatgatgtgggtgtcctgcagaagaagctggtgcccttcctcacagagttaaatatgcatctggcccaggaattagagaagctgaaaggatgatcctggggaaggtggagcagctgcaggcctggctgcaggcctgactactgcccacaccaacgaggtgatctagcagatacatggcaacgtgtgaactgcaacaacgcctggtgccccagcaccaaccttccaagtgtaaaaacaatgtgctgctgcttcacttccgccctccggttatcaagcaaaatgtctcttgtggcccatcttactggaagagagttccgggaaacatagcctcaccaaggtgacacattacaaagccaccctaccatgaatccgctcccaagggtctcactgctcacctgaggataactcaatataactatgttgctgaaaatgcaaagctgaagaccatggatttcatggtgattccagcaagtacagagattctatgaagcccacccagaaaaaacttgctggtcctggctatttttgtgtcatttattcaagtattgagaacctggcctgtggtaggcactgtacttaatactaggatacagaaatgcaaaagatacggcccatgcaattttattaaatgcatcaatatgtattacaaatggtgaatggatttccaactttatcatggaatttaatgctgaatatatagaattcagaaaattgttgggaggacagcccttttgtgaaccttgtttggggcacagtaggaattggaaataatttagtttctatctctaagctgttctattttaaaattatttttaaatttttattgtcccacttaaaaaaaaacttagtgtttcttttgggagtggtttggtgggaacagtgttgactgcctctgagaaactgggatagtgggtgggaagatcaaatcaaggtcacttctttccaaggaccctgagcgattcacttacctaggccgcgggggcggggggttggctgaaggctgaggctcttggtgctcagcactggccggacaccttcaacctgctggtgggtccgccagggggcgccggggcgagaaagcccgtagttcccagccacagtcacccaccggggccctggaggcaccgctcgtcacccatcacccctggcctggccgccctggggcgtggtctccgtccggcgcaaaccccagtacttgggctagggccagagggaagctgagtccccctcttcaaatagtggtaaaacaggcaaaaccgaaccggggttaaatttcggagctcgcccagggtgagggcggggctcgacgacctaggacgttcgagtgcggccgggtgtcgccaagggtcggtttaccccatcgcctcagaaattccgacgaggccctttgggctgcacaaccttgggaatccccaacgggcggccccgaatctgcgccgattttcccaagccgtacttcgggcccaaggcgttttcattgccgccttcccggaggatgtgtggtgggggtggttccgcccggaccgacgggcgggcccggagcccgttggactcgaagatcaaagaaccgcccctctggacactccaggaaaccgagacgaccacctaatttgtttgttttctgtttcaggccacgtaaactcttagtaaatgcaaatgcgtattttactgaactgcaattgaaagaaccgttatagaaaagaacacaaaatgacagaattattaaaagagaagaaaaacattaa

SEQ ID NO: 309537 - DNA, 5693 bp, Homo sapiens
ccgctgcggagcgccggcccgtaggcgcgggagcctccctattaagggcacgcgacatcgaggcaatagtgcgcaggtgcttagccagaggcggagcccgagaggcaggcagcggacttccggttccgggagcaacgaacagccgcggaggcgacagctaccgcttcagaggaggcggccgcggaggaggaggaaggggaggagggcgaggcgggaggtgcaggagggaccctcgccatgggtccacgggcctagagtggcggaagataccggcctggtgccaaactggctactgctgcttcctgtggcctccatggctgaggactggctggactgcccggccctgggccctggctggaagcgccgcgaagtctttcgcaagtcaggggccacctgtggacgctcagacacctattaccagagccccacaggagacaggatccgaagcaaagttgagctgactcgatacctgggccctgcgtgtgatctcaccctcttcgacttcaaacaaggcatcttgtgctatccagcccccaaggcccatcccgtggcggttgccagcaagaagcgaaagaagccttcaaggccagccaagactcggaaacgtcaggttggaccccagagtggtgaggtcaggaaggaggccccgagggatgagaccaaggctgacactgacacagccccagcttcattccctgctcctgggtgctgtgagaactgtggaatcagcttctcaggggatggcacccaaaggcagcggctcaaaacgttgtgcaaagactgtcgagcacagagaattgccttcaaccgggaacagagaatgtttaagcgtgtgggctgtggggagtgtgcagcctgccaggtaacagaagactgtggggcctgctccacctgcctcctgcagctgccccatgatgtggcatcggggctgttctgcaagtgtgaacggagacgctgcctccggattgtggaaaggagccgagggtgtggagtatgccggggctgtcagacccaagaggattgtggccattgccccatctgccttcgccctccccgccctggtctcaggcgccagtggaaatgtgtccagcgacgttgcctacggggtaaacatgcccgccgcaagggaggctgtgactccaagatggctgccaggcggcgccccggagcccagccactgcctccaccacccccatcacagtccccagagcccacagagccgcaccccagagccctggccccctcgccacctgccgagttcatctattactgtgtagacgaggacgagctacagccctacacgaaccgccggcagaaccgcaagtgcggggcctgtgcagcctgcctacggcggaatggactgtggccgctgcgacttctgctgcgacaagcccaaattcgggggcagcaaccagaagcgccagaagtgtcgttggcgccaatgcctgcagtttgccatgaagcggctgctgcccagtgtctggtcagagtctgaggatggggcaggatcgcccccaccttaccgtcgtcgaaagaggcccagctctgcccgacggcaccatcttggccctaccttgaagcccaccttggctacacgcacagcccaaccagaccatacccaggctccaacgaagcaggaagcaggtggtggctttgtgctgcccccgcctggcactgaccttgtgtttttacgggaaggcgcaagcagtcctgtgcaggtgccgggccctgttgcagcttccacagaagccctgttgcaggaggcccagtgctctggcctgagttgggttgtggccttaccccaggtgaagcaagagaaggcggatacccaggacgagtggacaccaggcacagctgtcctgacttctcccgtattggtgcctggctgccctagcaaggcagtagacccaggcctgccttctgtgaagcaagagccacctgacccagaggaggacaaggaggagaacaaggatgattctgcctccaaattggccccagaggaagaggcaggaggggctggcacacccgtgcggcggttttccgcctgggtggcacccgcttccgggataccgccgtctggttgcccgggtccaaagaccttaaaaaacctggagctagaaagcagtagactggaggcttctacagactgtaggattcaaggtgatatttgcagactggctttatgagagacaacactgatctactaggggctggaccctagattggttgccagggcttgtgtgtgaatcaaccctaggaggaaaaacctactaccaaaccagaagagcaggcctaagagtactttgagcttctagaagaagtaagcgggaaaggaagagaaagagtagaaagttggtgcatcttctcctccccaagagcctgagtataagaagttggattttaagggtgggggagctgggttggagaaaggtaatataattaaagccaccacaaaacaacctaaacaagccatgttcatgagtaattgtaagtggcttctggatgagacctggcagtgtctctacatacttcctcagggagatagcaattgaaaatgtaattgaataaataaggaaaggaactgctatttggtgtgttcctctgtggacccagtttatttaatccttaaaataatatttttgggaagacattgattttgtccatttatgtggatgggaaaactgagactcattaatttgtccaatgtcgaacagctggtgttagtagagcctagactcaaacccagcttttaaagcccttgttctttactccactaaactgtaacctgtaatcctgtatgcactaacaggagttttcggtgaccttgaaaacacagattactataattactataataaatcccttacattcctgtctctagcatggtttagggagtgccaaggctcaatgtagatggggtcaccttgtcagagcatctgttcatacagaaactgggtttcctgcagaccccaggtgctgcataggattcctcaaaccctacaggatatatctccccactggctgctgtccattttgcttgttaccctgactccccctcttcagccagagcagtctttgtaactaaagctgccagcctggctcatctttcctgacaacgtgcatctcctgccctgtgatcacctttgtgcttggctcctgccctcagcctgaatgtgttctaggaggctgaattcctgcttcgagtcctgcccaagagccagtcttggctcagccctacctcactctctcccaattcttcattcataaagtgccaaaaagattagacctgtaatttgttagccagctttacagggccaggactgagtgagtgcctccttaaactttgtatcctgtgtgcctcccttgccttaccctagtcccagccctgcagctttaagtaattcagacatggattagccatttcccagttctgtctcatacagtccagcctctgccaccttccccaccccttcctttattccatcctaactagttcagccctagtcaagactggatagactgatactgctttgtttcccccaggaaccaaccacccaaccccagtattctggtaattttgacaatgatctatatgaaatttatttgattgacatttagactcatgagttaagcttctgctgaccatttatgttagggtacaatcagaggagcagaaccactaagataaagattatgtatatatgtattttaagggatttattatagggatctgaccgcatgccattgtgggagctggttaaacagtctctgtaaggctgttgtctttgcatctaatgctggagcttgaagtctgcagggcaggcactcgggaagggaagatggatgtaaagtgtgggagaccgaggacacagtggagcccacgagcacgagctggaacccacgaggatggcctggaacccatgtcagtctctcaccacctccagcttcgatgatgtgggtgtcctgcagaagaagctggtgcccttcctcacagagttaaatatgcatctggcccaggaattagagaagctgaaaggatgatcctggggaaggtggagcagctgcaggcctggctgcaggcctgactactgcccacaccaacgaggtgatctagcagatacatggcaacgtgtgaactgcaacaacgcctggtgccccagcaccaaccttccaagtgtaaaaacaatgtgctgctgcttcacttccgccctccggttatcaagcaaaatgtctcttgtggcccatcttactggaagagagttccgggaaacatagcctcaccaaggtgacacattacaaagccaccctaccatgaatccgctcccaagggtctcactgctcacctgaggataactcaatataactatgttgctgaaaatgcaaagctgaagaccatggatttcatggtgattccagcaagtacagagattctatgaagcccacccagaaaaaacttgctggtcctggctatttttgtgtcatttattcaagtattgagaacctggcctgtggtaggcactgtacttaatactaggatacagaaatgcaaaagatacggcccatgcaattttattaaatgcatcaatatgtattacaaatggtgaatggatttccaactttatcatggaatttaatgctgaatatatagaattcagaaaattgttgggaggacagcccttttgtgaaccttgtttggggcacagtaggaattggaaataatttagtttctatctctaagctgttctattttaaaattatttttaaatttttattgtcccacttaaaaaaaaacttagtgtttcttttgggagtggtttggtgggaacagtgttgactgcctctgagaaactgggatagtgggtgggaagatcaaatcaaggtcacttctttccaaggaccctgagcgattcacttacctaggccgcgggggcggggggttggctgaaggctgaggctcttggtgctcagcactggccggacaccttcaacctgctggtgggtccgccagggggcgccggggcgagaaagcccgtagttcccagccacagtcacccaccggggccctggaggcaccgctcgtcacccatcacccctggcctggccgccctggggcgtggtctccgtccggcgcaaaccccagtacttgggctagggccagagggaagctgagtccccctcttcaaatagtggtaaaacaggcaaaaccgaaccggggttaaatttcggagctcgcccagggtgagggcggggctcgacgacctaggacgttcgagtgcggccgggtgtcgccaagggtcggtttaccccatcgcctcagaaattccgacgaggccctttgggctgcacaaccttgggaatccccaacgggcggccccgaatctgcgccgattttcccaagccgtacttcgggcccaaggcgttttcattgccgccttcccggaggatgtgtggtgggggtggttccgcccggaccgacgggcgggcccggagcccgttggactcgaagatcaaagaaccgcccctctggacactccaggaaaccgagacgaccacctaatttgtttgttttctgtttcaggccacgtaaactcttagtaaatgcaaatgcgtattttactgaactgcaattgaaagaaccgttatagaaaagaacacaaaatgacagaattattaaaagagaagaaaaacattaa

SEQ ID NO: 309538 - DNA, 5803 bp, Homo sapiens
ccgctgcggagcgccggcccgtaggcgcgggagcctccctattaagggcacgcgacatcgaggcaatagtgcgcaggtgcttagccagaggcggagcccgagaggcaggcagcggacttccggttccgggagcaacgaacagccgcggaggcgacagctaccgcttcagaggaggcggccgcggaggaggaggaaggggaggagggcgaggcgggaggtgcaggagggaccctcgccatgggtccacgggcctagagtggcggaagataccggcctggtgccaaactggctactgctgcttcctgtggcctccatggctgaggactggctggactgcccggccctgggccctggctggaagcgccgcgaagtctttcgcaagtcaggggccacctgtggacgctcagacacctattaccagagccccacaggagacaggatccgaagcaaagttgagctgactcgatacctgggccctgcgtgtgatctcaccctcttcgacttcaaacaaggcatcttgtgctatccagcccccaaggcccatcccgtggcggttgccagcaagaagcgaaagaagccttcaaggccagccaagactcggaaacgtcaggttggaccccagagtggtgaggtcaggaaggaggccccgagggatgagaccaaggctgacactgacacagccccagcttcattccctgctcctgggtgctgtgagaactgtggaatcagcttctcaggggatggcacccaaaggcagcggctcaaaacgttgtgcaaagactgtcgagcacagagaattgccttcaaccgggaacagagaatgtttaagcgtgtgggctgtggggagtgtgcagcctgccaggtaacagaagactgtggggcctgctccacctgcctcctgcagctgccccatgatgtggcatcggggctgttctgcaagtgtgaacggagacgctgcctccggattgtggaaagggtgagttgggcaagtggaaagagcccaaggctcacctcggcccctggcccccatgggcttggccccatgcttcatgcctctgctcccacctgccccccgccaacagagccgagggtgtggagtatgccggggctgtcagacccaagaggattgtggccattgccccatctgccttcgccctccccgccctggtctcaggcgccagtggaaatgtgtccagcgacgttgcctacggggtaaacatgcccgccgcaagggaggctgtgactccaagatggctgccaggcggcgccccggagcccagccactgcctccaccacccccatcacagtccccagagcccacagagccgcaccccagagccctggccccctcgccacctgccgagttcatctattactgtgtagacgaggacgagctacagccctacacgaaccgccggcagaaccgcaagtgcggggcctgtgcagcctgcctacggcggaatggactgtggccgctgcgacttctgctgcgacaagcccaaattcgggggcagcaaccagaagcgccagaagtgtcgttggcgccaatgcctgcagtttgccatgaagcggctgctgcccagtgtctggtcagagtctgaggatggggcaggatcgcccccaccttaccgtcgtcgaaagaggcccagctctgcccgacggcaccatcttggccctaccttgaagcccaccttggctacacgcacagcccaaccagaccatacccaggctccaacgaagcaggaagcaggtggtggctttgtgctgcccccgcctggcactgaccttgtgtttttacgggaaggcgcaagcagtcctgtgcaggtgccgggccctgttgcagcttccacagaagccctgttgcaggaggcccagtgctctggcctgagttgggttgtggccttaccccaggtgaagcaagagaaggcggatacccaggacgagtggacaccaggcacagctgtcctgacttctcccgtattggtgcctggctgccctagcaaggcagtagacccaggcctgccttctgtgaagcaagagccacctgacccagaggaggacaaggaggagaacaaggatgattctgcctccaaattggccccagaggaagaggcaggaggggctggcacacccgtgatcacggagattttcagcctgggtggaacccgcttccgagatacagcagtctggttgccaaggtccaaagaccttaaaaaacctggagctagaaagcagtagactggaggcttctacagactgtaggattcaaggtgatatttgcagactggctttatgagagacaacactgatctactaggggctggaccctagattggttgccagggcttgtgtgtgaatcaaccctaggaggaaaaacctactaccaaaccagaagagcaggcctaagagtactttgagcttctagaagaagtaagcgggaaaggaagagaaagagtagaaagttggtgcatcttctcctccccaagagcctgagtataagaagttggattttaagggtgggggagctgggttggagaaaggtaatataattaaagccaccacaaaacaacctaaacaagccatgttcatgagtaattgtaagtggcttctggatgagacctggcagtgtctctacatacttcctcagggagatagcaattgaaaatgtaattgaataaataaggaaaggaactgctatttggtgtgttcctctgtggacccagtttatttaatccttaaaataatatttttgggaagacattgattttgtccatttatgtggatgggaaaactgagactcattaatttgtccaatgtcgaacagctggtgttagtagagcctagactcaaacccagcttttaaagcccttgttctttactccactaaactgtaacctgtaatcctgtatgcactaacaggagttttcggtgaccttgaaaacacagattactataattactataataaatcccttacattcctgtctctagcatggtttagggagtgccaaggctcaatgtagatggggtcaccttgtcagagcatctgttcatacagaaactgggtttcctgcagaccccaggtgctgcataggattcctcaaaccctacaggatatatctccccactggctgctgtccattttgcttgttaccctgactccccctcttcagccagagcagtctttgtaactaaagctgccagcctggctcatctttcctgacaacgtgcatctcctgccctgtgatcacctttgtgcttggctcctgccctcagcctgaatgtgttctaggaggctgaattcctgcttcgagtcctgcccaagagccagtcttggctcagccctacctcactctctcccaattcttcattcataaagtgccaaaaagattagacctgtaatttgttagccagctttacagggccaggactgagtgagtgcctccttaaactttgtatcctgtgtgcctcccttgccttaccctagtcccagccctgcagctttaagtaattcagacatggattagccatttcccagttctgtctcatacagtccagcctctgccaccttccccaccccttcctttattccatcctaactagttcagccctagtcaagactggatagactgatactgctttgtttcccccaggaaccaaccacccaaccccagtattctggtaattttgacaatgatctatatgaaatttatttgattgacatttagactcatgagttaagcttctgctgaccatttatgttagggtacaatcagaggagcagaaccactaagataaagattatgtatatatgtattttaagggatttattatagggatctgaccgcatgccattgtgggagctggttaaacagtctctgtaaggctgttgtctttgcatctaatgctggagcttgaagtctgcagggcaggcactcgggaagggaagatggatgtaaagtgtgggagaccgaggacacagtggagcccacgagcacgagctggaacccacgaggatggcctggaacccatgtcagtctctcaccacctccagcttcgatgatgtgggtgtcctgcagaagaagctggtgcccttcctcacagagttaaatatgcatctggcccaggaattagagaagctgaaaggatgatcctggggaaggtggagcagctgcaggcctggctgcaggcctgactactgcccacaccaacgaggtgatctagcagatacatggcaacgtgtgaactgcaacaacgcctggtgccccagcaccaaccttccaagtgtaaaaacaatgtgctgctgcttcacttccgccctccggttatcaagcaaaatgtctcttgtggcccatcttactggaagagagttccgggaaacatagcctcaccaaggtgacacattacaaagccaccctaccatgaatccgctcccaagggtctcactgctcacctgaggataactcaatataactatgttgctgaaaatgcaaagctgaagaccatggatttcatggtgattccagcaagtacagagattctatgaagcccacccagaaaaaacttgctggtcctggctatttttgtgtcatttattcaagtattgagaacctggcctgtggtaggcactgtacttaatactaggatacagaaatgcaaaagatacggcccatgcaattttattaaatgcatcaatatgtattacaaatggtgaatggatttccaactttatcatggaatttaatgctgaatatatagaattcagaaaattgttgggaggacagcccttttgtgaaccttgtttggggcacagtaggaattggaaataatttagtttctatctctaagctgttctattttaaaattatttttaaatttttattgtcccacttaaaaaaaaacttagtgtttcttttgggagtggtttggtgggaacagtgttgactgcctctgagaaactgggatagtgggtgggaagatcaaatcaaggtcacttctttccaaggaccctgagcgattcacttacctaggccgcgggggcggggggttggctgaaggctgaggctcttggtgctcagcactggccggacaccttcaacctgctggtgggtccgccagggggcgccggggcgagaaagcccgtagttcccagccacagtcacccaccggggccctggaggcaccgctcgtcacccatcacccctggcctggccgccctggggcgtggtctccgtccggcgcaaaccccagtacttgggctagggccagagggaagctgagtccccctcttcaaatagtggtaaaacaggcaaaaccgaaccggggttaaatttcggagctcgcccagggtgagggcggggctcgacgacctaggacgttcgagtgcggccgggtgtcgccaagggtcggtttaccccatcgcctcagaaattccgacgaggccctttgggctgcacaaccttgggaatccccaacgggcggccccgaatctgcgccgattttcccaagccgtacttcgggcccaaggcgttttcattgccgccttcccggaggatgtgtggtgggggtggttccgcccggaccgacgggcgggcccggagcccgttggactcgaagatcaaagaaccgcccctctggacactccaggaaaccgagacgaccacctaatttgtttgttttctgtttcaggccacgtaaactcttagtaaatgcaaatgcgtattttactgaactgcaattgaaagaaccgttatagaaaagaacacaaaatgacagaattattaaaagagaagaaaaacattaa

SEQ ID NO: 309539 - DNA, 5559 bp, Homo sapiens
ccgctgcggagcgccggcccgtaggcgcgggagcctccctattaagggcacgcgacatcgaggcaatagtgcgcaggtgcttagccagaggcggagcccgagaggcaggcagcggacttccggttccgggagcaacgaacagccgcggaggcgacagctaccgcttcagaggaggcggccgcggaggaggaggaaggggaggagggcgaggcgggaggtgcaggagggaccctcgccatgggtccacgggcctagagtggcggaagataccggcctggtgccaaactggctactgctgcttcctgtggcctccatggctgaggactggctggactgcccggccctgggccctggctggaagcgccgcgaagtctttcgcaagtcaggggccacctgtggacgctcagacacctattaccagagccccacaggagacaggatccgaagcaaagttgagctgactcgatacctgggccctgcgtgtgatctcaccctcttcgacttcaaacaaggcatcttgtgctatccagcccccaaggcccatcccgtggcggttgccagcaagaagcgaaagaagccttcaaggccagccaagactcggaaacgtcaggttggaccccagagtggtgaggtcaggaaggaggccccgagggatgagaccaaggctgacactgacacagccccagcttcattccctgctcctgggtgctgtgagaactgtggaatcagcttctcaggggatggcacccaaaggcagcggctcaaaacgttgtgcaaagactgtcgagcacagagaattgccttcaaccgggaacagagaatgtttaagcgtgtgggctgtggggagtgtgcagcctgccaggtaacagaagactgtggggcctgctccacctgcctcctgcagctgccccatgatgtggcatcggggctgttctgcaagtgtgaacggagacgctgcctccggattgtggaaaggagccgagggtgtggagtatgccggggctgtcagacccaagaggattgtggccattgccccatctgccttcgccctccccgccctggtctcaggcgccagtggaaatgtgtccagcgacgttgcctacggggtaaacatgcccgccgcaagggaggctgtgactccaagatggctgccaggcggcgccccggagcccagccactgcctccaccacccccatcacagtccccagagcccacagagccgcaccccagagccctggccccctcgccacctgccgagttcatctattactgtgtagacgaggacgagctacagccctacacgaaccgccggcagaaccgcaagtgcggggcctgtgcagcctgcctacggcggaatggactgtggccgctgcgacttctgctgcgacaagcccaaattcgggggcagcaaccagaagcgccagaagtgtcgttggcgccaatgcctgcagtttgccatgaagcggctgctgcccagtgtctggtcagagtctgaggatggggcaggatcgcccccaccttaccgtcgtcgaaagaggcccagctctgcccgacggcaccatcttggccctaccttgaagcccaccttggctacacgcacagcccaaccagaccatacccaggctccaacgaagcaggaagcaggtggtggctttgtgctgcccccgcctggcactgaccttgtgtttttacgggaaggcgcaagcagtcctgtgcaggtgccgggccctgttgcagcttccacagaagccctgttgcaggcagtagacccaggcctgccttctgtgaagcaagagccacctgacccagaggaggacaaggaggagaacaaggatgattctgcctccaaattggccccagaggaagaggcaggaggggctggcacacccgtgatcacggagattttcagcctgggtggaacccgcttccgagatacagcagtctggttgccaaggtccaaagaccttaaaaaacctggagctagaaagcagtagactggaggcttctacagactgtaggattcaaggtgatatttgcagactggctttatgagagacaacactgatctactaggggctggaccctagattggttgccagggcttgtgtgtgaatcaaccctaggaggaaaaacctactaccaaaccagaagagcaggcctaagagtactttgagcttctagaagaagtaagcgggaaaggaagagaaagagtagaaagttggtgcatcttctcctccccaagagcctgagtataagaagttggattttaagggtgggggagctgggttggagaaaggtaatataattaaagccaccacaaaacaacctaaacaagccatgttcatgagtaattgtaagtggcttctggatgagacctggcagtgtctctacatacttcctcagggagatagcaattgaaaatgtaattgaataaataaggaaaggaactgctatttggtgtgttcctctgtggacccagtttatttaatccttaaaataatatttttgggaagacattgattttgtccatttatgtggatgggaaaactgagactcattaatttgtccaatgtcgaacagctggtgttagtagagcctagactcaaacccagcttttaaagcccttgttctttactccactaaactgtaacctgtaatcctgtatgcactaacaggagttttcggtgaccttgaaaacacagattactataattactataataaatcccttacattcctgtctctagcatggtttagggagtgccaaggctcaatgtagatggggtcaccttgtcagagcatctgttcatacagaaactgggtttcctgcagaccccaggtgctgcataggattcctcaaaccctacaggatatatctccccactggctgctgtccattttgcttgttaccctgactccccctcttcagccagagcagtctttgtaactaaagctgccagcctggctcatctttcctgacaacgtgcatctcctgccctgtgatcacctttgtgcttggctcctgccctcagcctgaatgtgttctaggaggctgaattcctgcttcgagtcctgcccaagagccagtcttggctcagccctacctcactctctcccaattcttcattcataaagtgccaaaaagattagacctgtaatttgttagccagctttacagggccaggactgagtgagtgcctccttaaactttgtatcctgtgtgcctcccttgccttaccctagtcccagccctgcagctttaagtaattcagacatggattagccatttcccagttctgtctcatacagtccagcctctgccaccttccccaccccttcctttattccatcctaactagttcagccctagtcaagactggatagactgatactgctttgtttcccccaggaaccaaccacccaaccccagtattctggtaattttgacaatgatctatatgaaatttatttgattgacatttagactcatgagttaagcttctgctgaccatttatgttagggtacaatcagaggagcagaaccactaagataaagattatgtatatatgtattttaagggatttattatagggatctgaccgcatgccattgtgggagctggttaaacagtctctgtaaggctgttgtctttgcatctaatgctggagcttgaagtctgcagggcaggcactcgggaagggaagatggatgtaaagtgtgggagaccgaggacacagtggagcccacgagcacgagctggaacccacgaggatggcctggaacccatgtcagtctctcaccacctccagcttcgatgatgtgggtgtcctgcagaagaagctggtgcccttcctcacagagttaaatatgcatctggcccaggaattagagaagctgaaaggatgatcctggggaaggtggagcagctgcaggcctggctgcaggcctgactactgcccacaccaacgaggtgatctagcagatacatggcaacgtgtgaactgcaacaacgcctggtgccccagcaccaaccttccaagtgtaaaaacaatgtgctgctgcttcacttccgccctccggttatcaagcaaaatgtctcttgtggcccatcttactggaagagagttccgggaaacatagcctcaccaaggtgacacattacaaagccaccctaccatgaatccgctcccaagggtctcactgctcacctgaggataactcaatataactatgttgctgaaaatgcaaagctgaagaccatggatttcatggtgattccagcaagtacagagattctatgaagcccacccagaaaaaacttgctggtcctggctatttttgtgtcatttattcaagtattgagaacctggcctgtggtaggcactgtacttaatactaggatacagaaatgcaaaagatacggcccatgcaattttattaaatgcatcaatatgtattacaaatggtgaatggatttccaactttatcatggaatttaatgctgaatatatagaattcagaaaattgttgggaggacagcccttttgtgaaccttgtttggggcacagtaggaattggaaataatttagtttctatctctaagctgttctattttaaaattatttttaaatttttattgtcccacttaaaaaaaaacttagtgtttcttttgggagtggtttggtgggaacagtgttgactgcctctgagaaactgggatagtgggtgggaagatcaaatcaaggtcacttctttccaaggaccctgagcgattcacttacctaggccgcgggggcggggggttggctgaaggctgaggctcttggtgctcagcactggccggacaccttcaacctgctggtgggtccgccagggggcgccggggcgagaaagcccgtagttcccagccacagtcacccaccggggccctggaggcaccgctcgtcacccatcacccctggcctggccgccctggggcgtggtctccgtccggcgcaaaccccagtacttgggctagggccagagggaagctgagtccccctcttcaaatagtggtaaaacaggcaaaaccgaaccggggttaaatttcggagctcgcccagggtgagggcggggctcgacgacctaggacgttcgagtgcggccgggtgtcgccaagggtcggtttaccccatcgcctcagaaattccgacgaggccctttgggctgcacaaccttgggaatccccaacgggcggccccgaatctgcgccgattttcccaagccgtacttcgggcccaaggcgttttcattgccgccttcccggaggatgtgtggtgggggtggttccgcccggaccgacgggcgggcccggagcccgttggactcgaagatcaaagaaccgcccctctggacactccaggaaaccgagacgaccacctaatttgtttgttttctgtttcaggccacgtaaactcttagtaaatgcaaatgcgtattttactgaactgcaattgaaagaaccgttatagaaaagaacacaaaatgacagaattattaaaagagaagaaaaacattaa

SEQ ID NO: 309540 - DNA, 3768 bp, Homo sapiens
ccgctgcggagcgccggcccgtaggcgcgggagcctccctattaagggcacgcgacatcgaggcaatagtgcgcaggtgcttagccagaggcggagcccgagaggcaggcagcggacttccggttccgggagcaacgaacagccgcggaggcgacagctaccgcttcagaggaggcggccgcggaggaggaggaaggggaggagggcgaggcgggaggtgcaggagggaccctcgccatgggtccacgggcctagagtggcggaagataccggcctggtgccaaactggctactgctgcttcctgtggcctccatggctgaggactggctggactgcccggccctgggccctggctggaagcgccgcgaagtctttcgcaagtcaggggccacctgtggacgctcagacacctattaccagagccccacaggagacaggatccgaagcaaagttgagctgactcgatacctgggccctgcgtgtgatctcaccctcttcgacttcaaacaaggcatcttgtgctatccagcccccaaggcccatcccgtggcggttgccagcaagaagcgaaagaagccttcaaggccagccaagactcggaaacgtcaggttggaccccagagtggtgaggtcaggaaggaggccccgagggatgagaccaaggctgacactgacacagccccagcttcattccctgctcctgggtgctgtgagaactgtggaatcagcttctcaggggatggcacccaaaggcagcggctcaaaacgttgtgcaaagactgtcgagcacagagaattgccttcaaccgggaacagagaatgtttaagcgtgtgggctgtggggagtgtgcagcctgccaggtaacagaagactgtggggcctgctccacctgcctcctgcagctgccccatgatgtggcatcggggctgttctgcaagtgtgaacggagacgctgcctccggattgtggaaaggagccgagggtgtggagtatgccggggctgtcagacccaagaggattgtggccattgccccatctgccttcgccctccccgccctggtctcaggcgccagtggaaatgtgtccagcgacgttgcctacggggtaaacatgcccgccgcaagggaggctgtgactccaagatggctgccaggcggcgccccggagcccagccactgcctccaccacccccatcacagtccccagagcccacagagccgcagccctacacgaaccgccggcagaaccgcaagtgcggggcctgtgcagcctgcctacggcggaatggactgtggccgctgcgacttctgctgcgacaagcccaaattcgggggcagcaaccagaagcgccagaagtgtcgttggcgccaatgcctgcagtttgccatgaagcggctgctgcccagtgtctggtcagagtctgaggatggggcaggatcgcccccaccttaccgtcgtcgaaagaggcccagctctgcccgacggcaccatcttggccctaccttgaagcccaccttggctacacgcacagcccaaccagaccatacccaggctccaacgaagcaggaagcaggtggtggctttgtgctgcccccgcctggcactgaccttgtgtttttacgggaaggcgcaagcagtcctgtgcaggtgccgggccctgttgcagcttccacagaagccctgttgcaggcagtagacccaggcctgccttctgtgaagcaagagccacctgacccagaggaggacaaggaggagaacaaggatgattctgcctccaaattggccccagaggaagaggcaggaggggctggcacacccgtgatcacggagattttcagcctgggtggaacccgcttccgagatacagcagtctggttgccaagtctgcagggcaggcactcgggaagggaagatggatgtaaagtgtgggagaccgaggacacagtggagcccacgagcacgagctggaacccacgaggatggcctggaacccatgtcagtctctcaccacctccagcttcgatgatgtgggtgtcctgcagaagaagctggtgcccttcctcacagagttaaatatgcatctggcccaggaattagagaagctgaaaggatgatcctggggaaggtggagcagctgcaggcctggctgcaggcctgactactgcccacaccaacgaggtgatctagcagatacatggcaacgtgtgaactgcaacaacgcctggtgccccagcaccaaccttccaagtgtaaaaacaatgtgctgctgcttcacttccgccctccggttatcaagcaaaatgtctcttgtggcccatcttactggaagagagttccgggaaacatagcctcaccaaggtgacacattacaaagccaccctaccatgaatccgctcccaagggtctcactgctcacctgaggataactcaatataactatgttgctgaaaatgcaaagctgaagaccatggatttcatggtgattccagcaagtacagagattctatgaagcccacccagaaaaaacttgctggtcctggctatttttgtgtcatttattcaagtattgagaacctggcctgtggtaggcactgtacttaatactaggatacagaaatgcaaaagatacggcccatgcaattttattaaatgcatcaatatgtattacaaatggtgaatggatttccaactttatcatggaatttaatgctgaatatatagaattcagaaaattgttgggaggacagcccttttgtgaaccttgtttggggcacagtaggaattggaaataatttagtttctatctctaagctgttctattttaaaattatttttaaatttttattgtcccacttaaaaaaaaacttagtgtttcttttgggagtggtttggtgggaacagtgttgactgcctctgagaaactgggatagtgggtgggaagatcaaatcaaggtcacttctttccaaggaccctgagcgattcacttacctaggccgcgggggcggggggttggctgaaggctgaggctcttggtgctcagcactggccggacaccttcaacctgctggtgggtccgccagggggcgccggggcgagaaagcccgtagttcccagccacagtcacccaccggggccctggaggcaccgctcgtcacccatcacccctggcctggccgccctggggcgtggtctccgtccggcgcaaaccccagtacttgggctagggccagagggaagctgagtccccctcttcaaatagtggtaaaacaggcaaaaccgaaccggggttaaatttcggagctcgcccagggtgagggcggggctcgacgacctaggacgttcgagtgcggccgggtgtcgccaagggtcggtttaccccatcgcctcagaaattccgacgaggccctttgggctgcacaaccttgggaatccccaacgggcggccccgaatctgcgccgattttcccaagccgtacttcgggcccaaggcgttttcattgccgccttcccggaggatgtgtggtgggggtggttccgcccggaccgacgggcgggcccggagcccgttggactcgaagatcaaagaaccgcccctctggacactccaggaaaccgagacgaccacctaatttgtttgttttctgtttcaggccacgtaaactcttagtaaatgcaaatgcgtattttactgaactgcaattgaaagaaccgttatagaaaagaacacaaaatgacagaattattaaaagagaagaaaaacattaa

SEQ ID NO: 309541 - DNA, 5603 bp, Homo sapiens
ccgctgcggagcgccggcccgtaggcgcgggagcctccctattaagggcacgcgacatcgaggcaatagtgcgcaggtgcttagccagaggcggagcccgagaggcaggcagcggacttccggttccgggagcaacgaacagccgcggaggcgacagctaccgcttcagaggaggcggccgcggaggaggaggaaggggaggagggcgaggcgggaggtgcaggagggaccctcgccatgggtccacgggcctagagtggcggaagataccggcctggtgccaaactggctactgctgcttcctgtggcctccatggctgaggactggctggactgcccggccctgggccctggctggaagcgccgcgaagtctttcgcaagtcaggggccacctgtggacgctcagacacctattaccagagccccacaggagacaggatccgaagcaaagttgagctgactcgatacctgggccctgcgtgtgatctcaccctcttcgacttcaaacaaggcatcttgtgctatccagcccccaaggcccatcccgtggcggttgccagcaagaagcgaaagaagccttcaaggccagccaagactcggaaacgtcaggttggaccccagagtggtgaggtcaggaaggaggccccgagggatgagaccaaggctgacactgacacagccccagcttcattccctgctcctgggtgctgtgagaactgtggaatcagcttctcaggggatggcacccaaaggcagcggctcaaaacgttgtgcaaagactgtcgagcacagagaattgccttcaaccgggaacagagaatgtttaagcgtgtgggctgtggggagtgtgcagcctgccaggtaacagaagactgtggggcctgctccacctgcctcctgcagctgccccatgatgtggcatcggggctgttctgcaagtgtgaacggagacgctgcctccggattgtggaaaggagccgagggtgtggagtatgccggggctgtcagacccaagaggattgtggccattgccccatctgccttcgccctccccgccctggtctcaggcgccagtggaaatgtgtccagcgacgttgcctacggcaccttgctcaccgcctgcgtcgccgtcatcagagatgtcagcgacgcactcccctggctgtggctcccccaactggtaaacatgcccgccgcaagggaggctgtgactccaagatggctgccaggcggcgccccggagcccagccactgcctccaccacccccatcacagtccccagagcccacagagccgcaccccagagccctggccccctcgccacctgccgagttcatctattactgtgtagacgaggacgagctaaagcggctgctgcccagtgtctggtcagagtctgaggatggggcaggatcgcccccaccttaccgtcgtcgaaagaggcccagctctgcccgacggcaccatcttggccctaccttgaagcccaccttggctacacgcacagcccaaccagaccatacccaggctccaacgaagcaggaagcaggtggtggctttgtgctgcccccgcctggcactgaccttgtgtttttacgggaaggcgcaagcagtcctgtgcaggtgccgggccctgttgcagcttccacagaagccctgttgcaggaggcccagtgctctggcctgagttgggttgtggccttaccccaggtgaagcaagagaaggcggatacccaggacgagtggacaccaggcacagctgtcctgacttctcccgtattggtgcctggctgccctagcaaggcagtagacccaggcctgccttctgtgaagcaagagccacctgacccagaggaggacaaggaggagaacaaggatgattctgcctccaaattggccccagaggaagaggcaggaggggctggcacacccgtgatcacggagattttcagcctgggtggaacccgcttccgagatacagcagtctggttgccaaggtccaaagaccttaaaaaacctggagctagaaagcagtagactggaggcttctacagactgtaggattcaaggtgatatttgcagactggctttatgagagacaacactgatctactaggggctggaccctagattggttgccagggcttgtgtgtgaatcaaccctaggaggaaaaacctactaccaaaccagaagagcaggcctaagagtactttgagcttctagaagaagtaagcgggaaaggaagagaaagagtagaaagttggtgcatcttctcctccccaagagcctgagtataagaagttggattttaagggtgggggagctgggttggagaaaggtaatataattaaagccaccacaaaacaacctaaacaagccatgttcatgagtaattgtaagtggcttctggatgagacctggcagtgtctctacatacttcctcagggagatagcaattgaaaatgtaattgaataaataaggaaaggaactgctatttggtgtgttcctctgtggacccagtttatttaatccttaaaataatatttttgggaagacattgattttgtccatttatgtggatgggaaaactgagactcattaatttgtccaatgtcgaacagctggtgttagtagagcctagactcaaacccagcttttaaagcccttgttctttactccactaaactgtaacctgtaatcctgtatgcactaacaggagttttcggtgaccttgaaaacacagattactataattactataataaatcccttacattcctgtctctagcatggtttagggagtgccaaggctcaatgtagatggggtcaccttgtcagagcatctgttcatacagaaactgggtttcctgcagaccccaggtgctgcataggattcctcaaaccctacaggatatatctccccactggctgctgtccattttgcttgttaccctgactccccctcttcagccagagcagtctttgtaactaaagctgccagcctggctcatctttcctgacaacgtgcatctcctgccctgtgatcacctttgtgcttggctcctgccctcagcctgaatgtgttctaggaggctgaattcctgcttcgagtcctgcccaagagccagtcttggctcagccctacctcactctctcccaattcttcattcataaagtgccaaaaagattagacctgtaatttgttagccagctttacagggccaggactgagtgagtgcctccttaaactttgtatcctgtgtgcctcccttgccttaccctagtcccagccctgcagctttaagtaattcagacatggattagccatttcccagttctgtctcatacagtccagcctctgccaccttccccaccccttcctttattccatcctaactagttcagccctagtcaagactggatagactgatactgctttgtttcccccaggaaccaaccacccaaccccagtattctggtaattttgacaatgatctatatgaaatttatttgattgacatttagactcatgagttaagcttctgctgaccatttatgttagggtacaatcagaggagcagaaccactaagataaagattatgtatatatgtattttaagggatttattatagggatctgaccgcatgccattgtgggagctggttaaacagtctctgtaaggctgttgtctttgcatctaatgctggagcttgaagtctgcagggcaggcactcgggaagggaagatggatgtaaagtgtgggagaccgaggacacagtggagcccacgagcacgagctggaacccacgaggatggcctggaacccatgtcagtctctcaccacctccagcttcgatgatgtgggtgtcctgcagaagaagctggtgcccttcctcacagagttaaatatgcatctggcccaggaattagagaagctgaaaggatgatcctggggaaggtggagcagctgcaggcctggctgcaggcctgactactgcccacaccaacgaggtgatctagcagatacatggcaacgtgtgaactgcaacaacgcctggtgccccagcaccaaccttccaagtgtaaaaacaatgtgctgctgcttcacttccgccctccggttatcaagcaaaatgtctcttgtggcccatcttactggaagagagttccgggaaacatagcctcaccaaggtgacacattacaaagccaccctaccatgaatccgctcccaagggtctcactgctcacctgaggataactcaatataactatgttgctgaaaatgcaaagctgaagaccatggatttcatggtgattccagcaagtacagagattctatgaagcccacccagaaaaaacttgctggtcctggctatttttgtgtcatttattcaagtattgagaacctggcctgtggtaggcactgtacttaatactaggatacagaaatgcaaaagatacggcccatgcaattttattaaatgcatcaatatgtattacaaatggtgaatggatttccaactttatcatggaatttaatgctgaatatatagaattcagaaaattgttgggaggacagcccttttgtgaaccttgtttggggcacagtaggaattggaaataatttagtttctatctctaagctgttctattttaaaattatttttaaatttttattgtcccacttaaaaaaaaacttagtgtttcttttgggagtggtttggtgggaacagtgttgactgcctctgagaaactgggatagtgggtgggaagatcaaatcaaggtcacttctttccaaggaccctgagcgattcacttacctaggccgcgggggcggggggttggctgaaggctgaggctcttggtgctcagcactggccggacaccttcaacctgctggtgggtccgccagggggcgccggggcgagaaagcccgtagttcccagccacagtcacccaccggggccctggaggcaccgctcgtcacccatcacccctggcctggccgccctggggcgtggtctccgtccggcgcaaaccccagtacttgggctagggccagagggaagctgagtccccctcttcaaatagtggtaaaacaggcaaaaccgaaccggggttaaatttcggagctcgcccagggtgagggcggggctcgacgacctaggacgttcgagtgcggccgggtgtcgccaagggtcggtttaccccatcgcctcagaaattccgacgaggccctttgggctgcacaaccttgggaatccccaacgggcggccccgaatctgcgccgattttcccaagccgtacttcgggcccaaggcgttttcattgccgccttcccggaggatgtgtggtgggggtggttccgcccggaccgacgggcgggcccggagcccgttggactcgaagatcaaagaaccgcccctctggacactccaggaaaccgagacgaccacctaatttgtttgttttctgtttcaggccacgtaaactcttagtaaatgcaaatgcgtattttactgaactgcaattgaaagaaccgttatagaaaagaacacaaaatgacagaattattaaaagagaagaaaaacattaa

SEQ ID NO: 309542 - DNA, 5656 bp, Homo sapiens
ccgctgcggagcgccggcccgtaggcgcgggagcctccctattaagggcacgcgacatcgaggcaatagtgcgcaggtgcttagccagaggcggagcccgagaggcaggcagcggacttccggttccgggagcaacgaacagccgcggaggcgacagctaccgcttcagaggaggcggccgcggaggaggaggaaggggaggagggcgaggcgggaggtgcaggagggaccctcgccatgggtccacgggcctagagtggcggaagataccggcctggtgccaaactggctactgctgcttcctgtggcctccatggctgaggactggctggactgcccggccctgggccctggctggaagcgccgcgaagtctttcgcaagtcaggggccacctgtggacgctcagacacctattaccagagccccacaggagacaggatccgaagcaaagttgagctgactcgatacctgggccctgcgtgtgatctcaccctcttcgacttcaaacaaggcatcttgtgctatccagcccccaaggcccatcccgtggcggttgccagcaagaagcgaaagaagccttcaaggccagccaagactcggaaacgtcaggttggaccccagagtggtgaggtcaggaaggaggccccgagggatgagaccaaggctgacactgacacagccccagcttcattccctgctcctgggtgctgtgagaactgtggaatcagcttctcaggggatggcacccaaaggcagcggctcaaaacgttgtgcaaagactgtcgagcgtgtgggctgtggggagtgtgcagcctgccaggtaacagaagactgtggggcctgctccacctgcctcctgcagctgccccatgatgtggcatcggggctgttctgcaagtgtgaacggagacgctgcctccggattgtggaaaggagccgagggtgtggagtatgccggggctgtcagacccaagaggattgtggccattgccccatctgccttcgccctccccgccctggtctcaggcgccagtggaaatgtgtccagcgacgttgcctacggggtaaacatgcccgccgcaagggaggctgtgactccaagatggctgccaggcggcgccccggagcccagccactgcctccaccacccccatcacagtccccagagcccacagagccgcaccccagagccctggccccctcgccacctgccgagttcatctattactgtgtagacgaggacgagctacagccctacacgaaccgccggcagaaccgcaagtgcggggcctgtgcagcctgcctacggcggaatggactgtggccgctgcgacttctgctgcgacaagcccaaattcgggggcagcaaccagaagcgccagaagtgtcgttggcgccaatgcctgcagtttgccatgaagcggctgctgcccagtgtctggtcagagtctgaggatggggcaggatcgcccccaccttaccgtcgtcgaaagaggcccagctctgcccgacggcaccatcttggccctaccttgaagcccaccttggctacacgcacagcccaaccagaccatacccaggctccaacgaagcaggaagcaggtggtggctttgtgctgcccccgcctggcactgaccttgtgtttttacgggaaggcgcaagcagtcctgtgcaggtgccgggccctgttgcagcttccacagaagccctgttgcaggaggcccagtgctctggcctgagttgggttgtggccttaccccaggtgaagcaagagaaggcggatacccaggacgagtggacaccaggcacagctgtcctgacttctcccgtattggtgcctggctgccctagcaaggcagtagacccaggcctgccttctgtgaagcaagagccacctgacccagaggaggacaaggaggagaacaaggatgattctgcctccaaattggccccagaggaagaggcaggaggggctggcacacccgtgatcacggagattttcagcctgggtggaacccgcttccgagatacagcagtctggttgccaaggtccaaagaccttaaaaaacctggagctagaaagcagtagactggaggcttctacagactgtaggattcaaggtgatatttgcagactggctttatgagagacaacactgatctactaggggctggaccctagattggttgccagggcttgtgtgtgaatcaaccctaggaggaaaaacctactaccaaaccagaagagcaggcctaagagtactttgagcttctagaagaagtaagcgggaaaggaagagaaagagtagaaagttggtgcatcttctcctccccaagagcctgagtataagaagttggattttaagggtgggggagctgggttggagaaaggtaatataattaaagccaccacaaaacaacctaaacaagccatgttcatgagtaattgtaagtggcttctggatgagacctggcagtgtctctacatacttcctcagggagatagcaattgaaaatgtaattgaataaataaggaaaggaactgctatttggtgtgttcctctgtggacccagtttatttaatccttaaaataatatttttgggaagacattgattttgtccatttatgtggatgggaaaactgagactcattaatttgtccaatgtcgaacagctggtgttagtagagcctagactcaaacccagcttttaaagcccttgttctttactccactaaactgtaacctgtaatcctgtatgcactaacaggagttttcggtgaccttgaaaacacagattactataattactataataaatcccttacattcctgtctctagcatggtttagggagtgccaaggctcaatgtagatggggtcaccttgtcagagcatctgttcatacagaaactgggtttcctgcagaccccaggtgctgcataggattcctcaaaccctacaggatatatctccccactggctgctgtccattttgcttgttaccctgactccccctcttcagccagagcagtctttgtaactaaagctgccagcctggctcatctttcctgacaacgtgcatctcctgccctgtgatcacctttgtgcttggctcctgccctcagcctgaatgtgttctaggaggctgaattcctgcttcgagtcctgcccaagagccagtcttggctcagccctacctcactctctcccaattcttcattcataaagtgccaaaaagattagacctgtaatttgttagccagctttacagggccaggactgagtgagtgcctccttaaactttgtatcctgtgtgcctcccttgccttaccctagtcccagccctgcagctttaagtaattcagacatggattagccatttcccagttctgtctcatacagtccagcctctgccaccttccccaccccttcctttattccatcctaactagttcagccctagtcaagactggatagactgatactgctttgtttcccccaggaaccaaccacccaaccccagtattctggtaattttgacaatgatctatatgaaatttatttgattgacatttagactcatgagttaagcttctgctgaccatttatgttagggtacaatcagaggagcagaaccactaagataaagattatgtatatatgtattttaagggatttattatagggatctgaccgcatgccattgtgggagctggttaaacagtctctgtaaggctgttgtctttgcatctaatgctggagcttgaagtctgcagggcaggcactcgggaagggaagatggatgtaaagtgtgggagaccgaggacacagtggagcccacgagcacgagctggaacccacgaggatggcctggaacccatgtcagtctctcaccacctccagcttcgatgatgtgggtgtcctgcagaagaagctggtgcccttcctcacagagttaaatatgcatctggcccaggaattagagaagctgaaaggatgatcctggggaaggtggagcagctgcaggcctggctgcaggcctgactactgcccacaccaacgaggtgatctagcagatacatggcaacgtgtgaactgcaacaacgcctggtgccccagcaccaaccttccaagtgtaaaaacaatgtgctgctgcttcacttccgccctccggttatcaagcaaaatgtctcttgtggcccatcttactggaagagagttccgggaaacatagcctcaccaaggtgacacattacaaagccaccctaccatgaatccgctcccaagggtctcactgctcacctgaggataactcaatataactatgttgctgaaaatgcaaagctgaagaccatggatttcatggtgattccagcaagtacagagattctatgaagcccacccagaaaaaacttgctggtcctggctatttttgtgtcatttattcaagtattgagaacctggcctgtggtaggcactgtacttaatactaggatacagaaatgcaaaagatacggcccatgcaattttattaaatgcatcaatatgtattacaaatggtgaatggatttccaactttatcatggaatttaatgctgaatatatagaattcagaaaattgttgggaggacagcccttttgtgaaccttgtttggggcacagtaggaattggaaataatttagtttctatctctaagctgttctattttaaaattatttttaaatttttattgtcccacttaaaaaaaaacttagtgtttcttttgggagtggtttggtgggaacagtgttgactgcctctgagaaactgggatagtgggtgggaagatcaaatcaaggtcacttctttccaaggaccctgagcgattcacttacctaggccgcgggggcggggggttggctgaaggctgaggctcttggtgctcagcactggccggacaccttcaacctgctggtgggtccgccagggggcgccggggcgagaaagcccgtagttcccagccacagtcacccaccggggccctggaggcaccgctcgtcacccatcacccctggcctggccgccctggggcgtggtctccgtccggcgcaaaccccagtacttgggctagggccagagggaagctgagtccccctcttcaaatagtggtaaaacaggcaaaaccgaaccggggttaaatttcggagctcgcccagggtgagggcggggctcgacgacctaggacgttcgagtgcggccgggtgtcgccaagggtcggtttaccccatcgcctcagaaattccgacgaggccctttgggctgcacaaccttgggaatccccaacgggcggccccgaatctgcgccgattttcccaagccgtacttcgggcccaaggcgttttcattgccgccttcccggaggatgtgtggtgggggtggttccgcccggaccgacgggcgggcccggagcccgttggactcgaagatcaaagaaccgcccctctggacactccaggaaaccgagacgaccacctaatttgtttgttttctgtttcaggccacgtaaactcttagtaaatgcaaatgcgtattttactgaactgcaattgaaagaaccgttatagaaaagaacacaaaatgacagaattattaaaagagaagaaaaacattaa

SEQ ID NO: 309543 - DNA, 4600 bp, Homo sapiens
ccgctgcggagcgccggcccgtaggcgcgggagcctccctattaagggcacgcgacatcgaggcaatagtgcgcaggtgcttagccagaggcggagcccgagaggcaggcagcggacttccggttccgggagcaacgaacagccgcggaggcgacagctaccgcttcagaggaggcggccgcggaggaggaggaaggggaggagggcgaggcgggaggtgcaggagggaccctcgccatgggtccacgggcctagagtggcggaagataccggcctggtgccaaactggctactgctgcttcctgtggcctccatggctgaggactggctggactgcccggccctgggccctggctggaagcgccgcgaagtctttcgcaagtcaggggccacctgtggacgctcagacacctattaccagagccccacaggagacaggatccgaagcaaagttgagctgactcgatacctgggccctgcgtgtgatctcaccctcttcgacttcaaacaaggcatcttgtgctatccagcccccaaggcccatcccgtggcggttgccagcaagaagcgaaagaagccttcaaggccagccaagactcggaaacgtcaggttggaccccagagtggtgaggtcaggaaggaggccccgagggatgagaccaaggctgacactgacacagccccagcttcattccctgctcctgggtgctgtgagaactgtggaatcagcttctcaggggatggcacccaaaggcagcggctcaaaacgttgtgcaaagactgtcgagcacagagaattgccttcaaccgggaacagagaatgtttaagcgtgtgggctgtggggagtgtgcagcctgccaggtaacagaagactgtggggcctgctccacctgcctcctgcagctgccccatgatgtggcatcggggctgttctgcaagtgtgaacggagacgctgcctccggattgtggaaaggagccgagggtgtggagtatgccggggctgtcagacccaagaggattgtggccattgccccatctgccttcgccctccccgccctggtctcaggcgccagtggaaatgtgtccagcgacgttgcctacggggtaaacatgcccgccgcaagggaggctgtgactccaagatggctgccaggcggcgccccggagcccagccactgcctccaccacccccatcacagtccccagagcccacagagccgcaccccagagccctggccccctcgccacctgccgagttcatctattactgtgtagacgaggacgagctacagccctacacgaaccgccggcagaaccgcaagtgcggggcctgtgcagcctgcctacggcggaatggactgtggccgctgcgacttctgctgcgacaagcccaaattcgggggcagcaaccagaagcgccagaagtgtcgttggcgccaatgcctgcagtttgccatgaagcggctgctgcccagtgtctggtcagagtctgaggatggggcaggatcgcccccaccttaccgtcgtcgaaagaggcccagctctgcccgacggcaccatcttggccctaccttgaagcccaccttggctacacgcacagcccaaccagaccatacccaggctccaacgaagcaggaagcaggtggtggctttgtgctgcccccgcctggcactgaccttgtgtttttacgggaaggcgcaagcagtcctgtgcaggtgccgggccctgttgcagcttccacagaagccctgttgcaggaggcccagtgctctggcctgagttgggttgtggccttaccccaggtgaagcaagagaaggcggatacccaggacgagtggacaccaggcacagctgtcctgacttctcccgtattggtgcctggctgccctagcaaggcagtagacccaggcctgccttctgtgaagcaagagccacctgacccagaggaggacaaggaggagaacaaggatgattctgcctccaaattggccccagaggaagaggcaggaggggctggcacacccgtgatcacggagattttcagcctgggtggaacccgcttccgagatacagcagtctggttgccaaggtccaaagaccttaaaaaacctggagctagaaagcagtagactggaggcttctacagactgtaggattcaaggtgatatttgcagactggctttatgagagacaacactgatctactaggggctggaccctagattggttgccagggcttgtgtgtgaatcaaccctaggaggaaaaacctactaccaaaccagaagagcaggcctaagagtactttgagcttctagaagaagtaagcgggaaaggaagagaaagagtagaaagttggtgcatcttctcctccccaagagcctgagtataagaagttggattttaagggtgggggagctgggttggagaaaggtaatataattaaagccaccacaaaacaacctaaacaagccatgttcatgagtaattgtaagtggcttctggatgagacctggcagtgtctctacatacttcctcagggagatagcaattgaaaatgtaattgaataaataaggaaaggaactgctatttggtgtgttcctctgtggacccagtttatttaatccttaaaataatatttttgggaagacattgattttgtccatttatgtggatgggaaaactgagactcattaatttgtccaatgtcgaacagctggtgttagtagagcctagactcaaacccagcttttaaagcccttgttctttactccactaaactgtaacctgtaatcctgtatgcactaacaggagttttcggtgaccttgaaaacacagattactataattactataataaatcccttacattcctgtctctagcatggtttagggagtgccaaggctcaatgtagatggggtcaccttgtcagagcatctgttcatacagaaactgggtttcctgcagaccccaggtgctgcataggattcctcaaaccctacaggatatatctccccactggctgctgtccattttgcttgttaccctgactccccctcttcagccagagcagtctttgtaactaaagctgccagcctggctcatctttcctgacaacgtgcatctcctgccctgtgatcacctttgtgcttggctcctgccctcagcctgaatgtgttctaggaggctgaattcctgcttcgagtcctgcccaagagccagtcttggctcagccctacctcactctctcccaattcttcattcataaagtgccaaaaagattagacctgtaatttgttagccagctttacagggccaggactgagtgagtgcctccttaaactttgtatcctgtgtgcctcccttgccttaccctagtcccagccctgcagctttaagtaattcagacatggattagccatttcccagttctgtctcatacagtccagcctctgccaccttccccaccccttcctttattccatcctaactagttcagccctagtcaagactggatagactgatactgctttgtttcccccaggaaccaaccacccaaccccagtattctggtaattttgacaatgatctatatgaaatttatttgattgacatttagactcatgagttaagcttctgctgaccatttatgttagggtacaatcagaggagcagaaccactaagataaagattatgtatatatgtattttaagggatttattatagggatctgaccgcatgccattgtgggagctggttaaacagtctctgtaaggctgttgtctttgcatctaatgctggagcttgaagtctgcagggcaggcactcgggaagggaagatggatgtaaagtgtgggagaccgaggacacagtggagcccacgagcacgagctggaacccacgaggatggcctggaacccatgtcagtctctcaccacctccagcttcgatgatgtgggtgtcctgcagaagaagctggtgcccttcctcacagagttaaatatgcatctggcccaggaattagagaagctgaaaggatgatcctggggaaggtggagcagctgcaggcctggctgcaggcctgactactgcccacaccaacgaggtgatctagcagatacatggcaacgtgtgaactgcaacaacgcctggtgccccagcaccaaccttccaagtgtaaaaacaatgtgctgctgcttcacttccgccctccggttatcaagcaaaatgtctcttgtggcccatcttactggaagagagttccgggaaacatagcctcaccaaggtgacacattacaaagccaccctaccatgaatccgctcccaagggtctcactgctcacctgaggataactcaatataactatgttgctgaaaatgcaaagctgaagaccatggatttcatggtgattccagcaagtacagagattctatgaagcccacccagaaaaaacttgctggtcctggctatttttgtgtcatttattcaagtattgagaacctggcctgtggtaggcactgtacttaatactaggatacagaaatgcaaaagatacggcccatgcaattttattaaatgcatcaatatgtattaca

SEQ ID NO: 309544 - DNA, 4660 bp, Homo sapiens
ccgctgcggagcgccggcccgtaggcgcgggagcctccctattaagggcacgcgacatcgaggcaatagtgcgcaggtgcttagccagaggcggagcccgagaggcaggcagcggacttccggttccgggagcaacgaacagccgcggaggcgacagctaccgcttcagaggaggcggccgcggaggaggaggaaggggaggagggcgaggcgggaggtgcaggagggaccctcgccatgggtccacgggcctagagtggcggaagataccggcctggtgccaaactggctactgctgcttcctgtggcctccatggctgaggactggctggactgcccggccctgggccctggctggaagcgccgcgaagtctttcgcaagtcaggggccacctgtggacgctcagacacctattaccagagccccacaggagacaggatccgaagcaaagttgagctgactcgatacctgggccctgcgtgtgatctcaccctcttcgacttcaaacaaggcatcttgtgctatccagcccccaaggcccatcccgtggcggttgccagcaagaagcgaaagaagccttcaaggccagccaagactcggaaacgtcaggttggaccccagagtggtgaggtcaggaaggaggccccgagggatgagaccaaggctgacactgacacagccccagcttcattccctgctcctgggtgctgtgagaactgtggaatcagcttctcaggggatggcacccaaaggcagcggctcaaaacgttgtgcaaagactgtcgagcacagagaattgccttcaaccgggaacagagaatgtttaagcgtgtgggctgtggggagtgtgcagcctgccaggtaacagaagactgtggggcctgctccacctgcctcctgcagctgccccatgatgtggcatcggggctgttctgcaagtgtgaacggagacgctgcctccggattgtggaaaggagccgagggtgtggagtatgccggggctgtcagacccaagaggattgtggccattgccccatctgccttcgccctccccgccctggtctcaggcgccagtggaaatgtgtccagcgacgttgcctacggggtaaacatgcccgccgcaagggaggctgtgactccaagatggctgccaggcggcgccccggagcccagccactgcctccaccacccccatcacagtccccagagcccacagagccgcaccccagagccctggccccctcgccacctgccgagttcatctattactgtgtagacgaggacgagctacagccctacacgaaccgccggcagaaccgcaagtgcggggcctgtgcagcctgcctacggcggaatggactgtggccgctgcgacttctgctgcgacaagcccaaattcgggggcagcaaccagaagcgccagaagtgtcgttggcgccaatgcctgcagtttgccatgaagcggctgctgcccagtgtctggtcagagtctgaggatggggcaggatcgcccccaccttaccgtcgtcgaaagaggcccagctctgcccgacggcaccatcttggccctaccttgaagcccaccttggctacacgcacagcccaaccagaccatacccaggctccaacgaagcaggaagcaggtggtggctttgtgctgcccccgcctggcactgaccttgtgtttttacgggaaggcgcaagcagtcctgtgcaggtgccgggccctgttgcagcttccacagaagccctgttgcaggaggcccagtgctctggcctgagttgggttgtggccttaccccaggtgaagcaagagaaggcggatacccaggacgagtggacaccaggcacagctgtcctgacttctcccgtattggtgcctggctgccctagcaaggcagtagacccaggcctgccttctgtgaagcaagagccacctgacccagaggaggacaaggaggagaacaaggatgattctgcctccaaattggccccagaggaagaggcaggaggggctggcacacccgtgatcacggagattttcagcctgggtggaacccgcttccgagatacagcagtctggttgccaaggtccaaagaccttaaaaaacctggagctagaaagcagtagactggaggcttctacagactgtaggattcaaggtgatatttgcagactggctttatgagagacaacactgatctactaggggctggaccctagattggttgccagggcttgtgtgtgaatcaaccctaggaggaaaaacctactaccaaaccagaagagcaggcctaagagtactttgagcttctagaagaagtaagcgggaaaggaagagaaagagtagaaagttggtgcatcttctcctccccaagagcctgagtataagaagttggattttaagggtgggggagctgggttggagaaaggtaatataattaaagccaccacaaaacaacctaaacaagccatgttcatgagtaattgtaagtggcttctggatgagacctggcagtgtctctacatacttcctcagggagatagcaattgaaaatgtaattgaataaataaggaaaggaactgctatttggtgtgttcctctgtggacccagtttatttaatccttaaaataatatttttgggaagacattgattttgtccatttatgtggatgggaaaactgagactcattaatttgtccaatgtcgaacagctggtgttagtagagcctagactcaaacccagcttttaaagcccttgttctttactccactaaactgtaacctgtaatcctgtatgcactaacaggagttttcggtgaccttgaaaacacagattactataattactataataaatcccttacattcctgtctctagcatggtttagggagtgccaaggctcaatgtagatggggtcaccttgtcagagcatctgttcatacagaaactgggtttcctgcagaccccaggtgctgcataggattcctcaaaccctacaggatatatctccccactggctgctgtccattttgcttgttaccctgactccccctcttcagccagagcagtctttgtaactaaagctgccagcctggctcatctttcctgacaacgtgcatctcctgccctgtgatcacctttgtgcttggctcctgccctcagcctgaatgtgttctaggaggctgaattcctgcttcgagtcctgcccaagagccagtcttggctcagccctacctcactctctcccaattcttcattcataaagtgccaaaaagattagacctgtaatttgttagccagctttacagggccaggactgagtgagtgcctccttaaactttgtatcctgtgtgcctcccttgccttaccctagtcccagccctgcagctttaagtaattcagacatggattagccatttcccagttctgtctcatacagtccagcctctgccaccttccccaccccttcctttattccatcctaactagttcagccctagtcaagactggatagactgatactgctttgtttcccccaggaaccaaccacccaaccccagtattctggtaattttgacaatgatctatatgaaatttatttgattgacatttagactcatgagttaagcttctgctgaccatttatgttagggtacaatcagaggagcagaaccactaagataaagattatgtatatatgtattttaagggatttattatagggatctgaccgcatgccattgtgggagctggttaaacagtctctgtaaggctgttgtctttgcatctaatgctggagcttgaagtctgcagggcaggcactcgggaagggaagatggatgtaaagtgtgggagaccgaggacacagtggagcccacgagcacgagctggaacccacgaggatggcctggaacccatgtcagtctctcaccacctccagcttcgatgatgtgggtgtcctgcagaagaagctggtgcccttcctcacagagttaaatatgcatctggcccaggaattagagaagctgaaaggatgatcctggggaaggtggagcagctgcaggcctggctgcaggcctgactactgcccacaccaacgaggtgatctagcagatacatggcaacgtgtgaactgcaacaacgcctggtgccccagcaccaaccttccaagtgtaaaaacaatgtgctgctgcttcacttccgccctccggttatcaagcaaaatgtctcttgtggcccatcttactggaagagagttccgggaaacatagcctcaccaaggtgacacattacaaagccaccctaccatgaatccgctcccaagggtctcactgctcacctgaggataactcaatataactatgttgctgaaaatgcaaagctgaagaccatggatttcatggtgattccagcaagtacagagattctatgaagcccacccagaaaaaacttgctggtcctggctatttttgtgtcatttattcaagtattgagaacctggcctgtggtaggcactgtacttaatactaggatacagaaatgcaaaagatacggcccatgcaattttattaaatgcatcaatatgtattacaaatggtgaatggatttccaactttatcatggaatttaatgctgaatatatagaattcaga

SEQ ID NO: 309545 - DNA, 3975 bp, Homo sapiens
ccgctgcggagcgccggcccgtaggcgcgggagcctccctattaagggcacgcgacatcgaggcaatagtgcgcaggtgcttagccagaggcggagcccgagaggcaggcagcggacttccggttccgggagcaacgaacagccgcggaggcgacagctaccgcttcagaggaggcggccgcggaggaggaggaaggggaggagggcgaggcgggaggtgcaggagggaccctcgccatgggtccacgggcctagagtggcggaagataccggcctggtgccaaactggctactgctgcttcctgtggcctccatggctgaggactggctggactgcccggccctgggccctggctggaagcgccgcgaagtctttcgcaagtcaggggccacctgtggacgctcagacacctattaccagagccccacaggagacaggatccgaagcaaagttgagctgactcgatacctgggccctgcgtgtgatctcaccctcttcgacttcaaacaaggcatcttgtgctatccagcccccaaggcccatcccgtggcggttgccagcaagaagcgaaagaagccttcaaggccagccaagactcggaaacgtcaggttggaccccagagtggtgaggtcaggaaggaggccccgagggatgagaccaaggctgacactgacacagccccagcttcattccctgctcctgggtgctgtgagaactgtggaatcagcttctcaggggatggcacccaaaggcagcggctcaaaacgttgtgcaaagactgtcgagcacagagaattgccttcaaccgggaacagagaatgtttaagcgtgtgggctgtggggagtgtgcagcctgccaggtaacagaagactgtggggcctgctccacctgcctcctgcagctgccccatgatgtggcatcggggctgttctgcaagtgtgaacggagacgctgcctccggattgtggaaaggagccgagggtgtggagtatgccggggctgtcagacccaagaggattgtggccattgccccatctgccttcgccctccccgccctggtctcaggcgccagtggaaatgtgtccagcgacgttgcctacggggtaaacatgcccgccgcaagggaggctgtgactccaagatggctgccaggcggcgccccggagcccagccactgcctccaccacccccatcacagtccccagagcccacagagccgcaccccagagccctggccccctcgccacctgccgagttcatctattactgtgtagacgaggacgagctacagccctacacgaaccgccggcagaaccgcaagtgcggggcctgtgcagcctgcctacggcggaatggactgtggccgctgcgacttctgctgcgacaagcccaaattcgggggcagcaaccagaagcgccagaagtgtcgttggcgccaatgcctgcagtttgccatgaagcggctgctgcccagtgtctggtcagagtctgaggatggggcaggatcgcccccaccttaccgtcgtcgaaagaggcccagctctgcccgacggcaccatcttggccctaccttgaagcccaccttggctacacgcacagcccaaccagaccatacccaggctccaacgaagcaggaagcaggtggtggctttgtgctgcccccgcctggcactgaccttgtgtttttacgggaaggcgcaagcagtcctgtgcaggtgccgggccctgttgcagcttccacagaagccctgttgcaggaggcccagtgctctggcctgagttgggttgtggccttaccccaggtgaagcaagagaaggcggatacccaggacgagtggacaccaggcacagctgtcctgacttctcccgtattggtgcctggctgccctagcaaggcagtagacccaggcctgccttctgtgaagcaagagccacctgacccagaggaggacaaggaggagaacaaggatgattctgcctccaaattggccccagaggaagaggcaggaggggctggcacacccgtgatcacggagattttcagcctgggtggaacccgcttccgagatacagcagtctggttgccaagtctgcagggcaggcactcgggaagggaagatggatgtaaagtgtgggagaccgaggacacagtggagcccacgagcacgagctggaacccacgaggatggcctggaacccatgtcagtctctcaccacctccagcttcgatgatgtgggtgtcctgcagaagaagctggtgcccttcctcacagagttaaatatgcatctggcccaggaattagagaagctgaaaggatgatcctggggaaggtggagcagctgcaggcctggctgcaggcctgactactgcccacaccaacgaggtgatctagcagatacatggcaacgtgtgaactgcaacaacgcctggtgccccagcaccaaccttccaagtgtaaaaacaatgtgctgctgcttcacttccgccctccggttatcaagcaaaatgtctcttgtggcccatcttactggaagagagttccgggaaacatagcctcaccaaggtgacacattacaaagccaccctaccatgaatccgctcccaagggtctcactgctcacctgaggataactcaatataactatgttgctgaaaatgcaaagctgaagaccatggatttcatggtgattccagcaagtacagagattctatgaagcccacccagaaaaaacttgctggtcctggctatttttgtgtcatttattcaagtattgagaacctggcctgtggtaggcactgtacttaatactaggatacagaaatgcaaaagatacggcccatgcaattttattaaatgcatcaatatgtattacaaatggtgaatggatttccaactttatcatggaatttaatgctgaatatatagaattcagaaaattgttgggaggacagcccttttgtgaaccttgtttggggcacagtaggaattggaaataatttagtttctatctctaagctgttctattttaaaattatttttaaatttttattgtcccacttaaaaaaaaacttagtgtttcttttgggagtggtttggtgggaacagtgttgactgcctctgagaaactgggatagtgggtgggaagatcaaatcaaggtcacttctttccaaggaccctgagcgattcacttacctaggccgcgggggcggggggttggctgaaggctgaggctcttggtgctcagcactggccggacaccttcaacctgctggtgggtccgccagggggcgccggggcgagaaagcccgtagttcccagccacagtcacccaccggggccctggaggcaccgctcgtcacccatcacccctggcctggccgccctggggcgtggtctccgtccggcgcaaaccccagtacttgggctagggccagagggaagctgagtccccctcttcaaatagtggtaaaacaggcaaaaccgaaccggggttaaatttcggagctcgcccagggtgagggcggggctcgacgacctaggacgttcgagtgcggccgggtgtcgccaagggtcggtttaccccatcgcctcagaaattccgacgaggccctttgggctgcacaaccttgggaatccccaacgggcggccccgaatctgcgccgattttcccaagccgtacttcgggcccaaggcgttttcattgccgccttcccggaggatgtgtggtgggggtggttccgcccggaccgacgggcgggcccggagcccgttggactcgaagatcaaagaaccgcccctctggacactccaggaaaccgagacgaccacctaatttgtttgttttctgtttcaggccacgtaaactcttagtaaatgcaaatgcgtattttactgaactgcaattgaaagaaccgttatagaaaagaacacaaaatgacagaattattaaaagagaagaaaaacattaa

SEQ ID NO: 309546 - DNA, 4488 bp, Homo sapiens
ccgctgcggagcgccggcccgtaggcgcgggagcctccctattaagggcacgcgacatcgaggcaatagtgcgcaggtgcttagccagaggcggagcccgagaggcaggcagcggacttccggttccgggagcaacgaacagccgcggaggcgacagctaccgcttcagaggaggcggccgcggaggaggaggaaggggaggagggcgaggcgggaggtgcaggagggaccctcgccatgggtccacgggcctagagtggcggaagataccggcctggtgccaaactggctactgctgcttcctgtggcctccatggctgaggactggctggactgcccggccctgggccctggctggaagcgccgcgaagtctttcgcaagtcaggggccacctgtggacgctcagacacctattaccagagccccacaggagacaggatccgaagcaaagttgagctgactcgatacctgggccctgcgtgtgatctcaccctcttcgacttcaaacaaggcatcttgtgctatccagcccccaaggcccatcccgtggcggttgccagcaagaagcgaaagaagccttcaaggccagccaagactcggaaacgtcaggttggaccccagagtggtgaggtcaggaaggaggccccgagggatgagaccaaggctgacactgacacagccccagcttcattccctgctcctgggtgctgtgagaactgtggaatcagcttctcaggggatggcacccaaaggcagcggctcaaaacgttgtgcaaagactgtcgagcacagagaattgccttcaaccgggaacagagaatgtttaagcgtgtgggctgtggggagtgtgcagcctgccaggtaacagaagactgtggggcctgctccacctgcctcctgcagctgccccatgatgtggcatcggggctgttctgcaagtgtgaacggagacgctgcctccggattgtggaaaggagccgagggtgtggagtatgccggggctgtcagacccaagaggattgtggccattgccccatctgccttcgccctccccgccctggtctcaggcgccagtggaaatgtgtccagcgacgttgcctacggggtaaacatgcccgccgcaagggaggctgtgactccaagatggctgccaggcggcgccccggagcccagccactgcctccaccacccccatcacagtccccagagcccacagagccgcaccccagagccctggccccctcgccacctgccgagttcatctattactgtgtagacgaggacgagctacagccctacacgaaccgccggcagaaccgcaagtgcggggcctgtgcagcctgcctacggcggaatggactgtggccgctgcgacttctgctgcgacaagcccaaattcgggggcagcaaccagaagcgccagaagtgtcgttggcgccaatgcctgcagtttgccatgaagcggctgctgcccagtgtctggtcagagtctgaggatggggcaggatcgcccccaccttaccgtcgtcgaaagaggcccagctctgcccgacggcaccatcttggccctaccttgaagcccaccttggctacacgcacagcccaaccagaccatacccaggctccaacgaagcaggaagcaggtggtggctttgtgctgcccccgcctggcactgaccttgtgtttttacgggaaggcgcaagcagtcctgtgcaggtgccgggccctgttgcagcttccacagaagccctgttgcaggaggcccagtgctctggcctgagttgggttgtggccttaccccaggtgaagcaagagaaggcggatacccaggacgagtggacaccaggcacagctgtcctgacttctcccgtattggtgcctggctgccctagcaaggcagtagacccaggcctgccttctgtgaagcaagagccacctgacccagaggaggacaaggaggagaacaaggatgattctgcctccaaattggccccagaggaagaggcaggaggggctggcacacccgtgatcacggagattttcagcctgggtggaacccgcttccgagatacagcagtctggttgccaaggtccaaagaccttaaaaaacctggagctagaaagcagtagactggaggcttctacagactgtaggattcaaggtgatatttgcagactggctttatgagagacaacactgatctactaggggctggaccctagattggttgccagggcttgtgtgtgaatcaaccctaggaggaaaaacctactaccaaaccagaagagcaggcctaagagtactttgagcttctagaagaagtaagcgggaaaggaagagaaagagtagaaagttggtgcatcttctcctccccaagagcctgagtataagaagttggattttaagggtgggggagctgggttggagaaaggtaatataattaaagccaccacaaaacaacctaaacaagccatgttcatgagtaattgtaagtggcttctggatgagacctggcagtgtctctacatacttcctcagggagatagcaattgaaaatgtaattgaataaataaggaaaggaactgctatttggtgtgttcctctgtggacccagtttatttaatccttaaaataatatttttgggaagacattgattttgtccatttatgtggatgggaaaactgagactcattaatttgtccaatgtcgaacagctggtgttagtagagcctagactcaaacccagcttttaaagcccttgttctttactccactaaactgtaacctgtaatcctgtatgcactaacaggagttttcggtgaccttgaaaacacagattactataattactataataaatcccttacattcctgtctctagcatggtttagggagtgccaaggctcaatgtagatggggtcaccttgtcagagcatctgttcatacagaaactgggtttcctgcagaccccaggtgctgcataggattcctcaaaccctacaggatatatctccccactggctgctgtccattttgcttgttaccctgactccccctcttcagccagagcagtctttgtaactaaagctgccagcctggctcatctttcctgacaacgtgcatctcctgccctgtgatcacctttgtgcttggctcctgccctcagcctgaatgtgttctaggaggctgaattcctgcttcgagtcctgcccaagagccagtcttggctcagccctacctcactctctcccaattcttcattcataaagtgccaaaaagattagacctgtaatttgttagccagctttacagggccaggactgagtgagtgcctccttaaactttgtatcctgtgtgcctcccttgccttaccctagtcccagccctgcagctttaagtaattcagacatggattagccatttcccagttctgtctcatacagtccagcctctgccaccttccccaccccttcctttattccatcctaactagttcagccctagtcaagactggatagactgatactgctttgtttcccccaggaaccaaccacccaaccccagtattctggtaattttgacaatgatctatatgaaatttatttgattgacatttagactcatgagttaagcttctgctgaccatttatgttagggtacaatcagaggagcagaaccactaagataaagattatgtatatatgtattttaagggatttattatagggatctgaccgcatgccattgtgggagctggttaaacagtctctgtaaggctgttgtctttgcatctaatgctggagcttgaagtctgcagggcaggcactcgggaagggaagatggatgtaaagtgtgggagaccgaggacacagtggagcccacgagcacgagctggaacccacgaggatggcctggaacccatgtcagtctctcaccacctccagcttcgatgatgtgggtgtcctgcagaagaagctggtgcccttcctcacagagttaaatatgcatctggcccaggaattagagaagctgaaaggatgatcctggggaaggtggagcagctgcaggcctggctgcaggcctgactactgcccacaccaacgaggtgatctagcagatacatggcaacgtgtgaactgcaacaacgcctggtgccccagcaccaaccttccaagtgtaaaaacaatgtgctgctgcttcacttccgccctccggttatcaagcaaaatgtctcttgtggcccatcttactggaagagagttccgggaaacatagcctcaccaaggtgacacattacaaagccaccctaccatgaatccgctcccaagggtctcactgctcacctgaggataactcaatataactatgttgctgaaaatgcaaagctgaagaccatggatttcatggtgattccagcaagtacagagattctatgaagcccacccagaagcctcgtgtaggcactgtactttactaggatacgg

SEQ ID NO: 309547 - DNA, 3741 bp, Homo sapiens
aagatataaaaaaagataaaggataattaaggggaagtggatggaggacacagaatagtaggaaatggttttgtaatgctccattgcgcacatagcaaacctcattcaacatacagacctgctcccttttccctaggtccaaagaccttaaaaaacctggagctagaaagcagtagactggaggcttctacagactgtaggattcaaggtgatatttgcagactggctttatgagagacaacactgatctactaggggctggaccctagattggttgccagggcttgtgtgtgaatcaaccctaggaggaaaaacctactaccaaaccagaagagcaggcctaagagtactttgagcttctagaagaagtaagcgggaaaggaagagaaagagtagaaagttggtgcatcttctcctccccaagagcctgagtataagaagttggattttaagggtgggggagctgggttggagaaaggtaatataattaaagccaccacaaaacaacctaaacaagccatgttcatgagtaattgtaagtggcttctggatgagacctggcagtgtctctacatacttcctcagggagatagcaattgaaaatgtaattgaataaataaggaaaggaactgctatttggtgtgttcctctgtggacccagtttatttaatccttaaaataatatttttgggaagacattgattttgtccatttatgtggatgggaaaactgagactcattaatttgtccaatgtcgaacagctggtgttagtagagcctagactcaaacccagcttttaaagcccttgttctttactccactaaactgtaacctgtaatcctgtatgcactaacaggagttttcggtgaccttgaaaacacagattactataattactataataaatcccttacattcctgtctctagcatggtttagggagtgccaaggctcaatgtagatggggtcaccttgtcagagcatctgttcatacagaaactgggtttcctgcagaccccaggtgctgcataggattcctcaaaccctacaggatatatctccccactggctgctgtccattttgcttgttaccctgactccccctcttcagccagagcagtctttgtaactaaagctgccagcctggctcatctttcctgacaacgtgcatctcctgccctgtgatcacctttgtgcttggctcctgccctcagcctgaatgtgttctaggaggctgaattcctgcttcgagtcctgcccaagagccagtcttggctcagccctacctcactctctcccaattcttcattcataaagtgccaaaaagattagacctgtaatttgttagccagctttacagggccaggactgagtgagtgcctccttaaactttgtatcctgtgtgcctcccttgccttaccctagtcccagccctgcagctttaagtaattcagacatggattagccatttcccagttctgtctcatacagtccagcctctgccaccttccccaccccttcctttattccatcctaactagttcagccctagtcaagactggatagactgatactgctttgtttcccccaggaaccaaccacccaaccccagtattctggtaattttgacaatgatctatatgaaatttatttgattgacatttagactcatgagttaagcttctgctgaccatttatgttagggtacaatcagaggagcagaaccactaagataaagattatgtatatatgtattttaagggatttattatagggatctgaccgcatgccattgtgggagctggttaaacagtctctgtaaggctgttgtctttgcatctaatgctggagcttgaagtctgcagggcaggcactcgggaagggaagatggatgtaaagtgtgggagaccgaggacacagtggagcccacgagcacgagctggaacccacgaggatggcctggaacccatgtcagtctctcaccacctccagcttcgatgatgtgggtgtcctgcagaagaagctggtgcccttcctcacagagttaaatatgcatctggcccaggaattagagaagctgaaaggatgatcctggggaaggtggagcagctgcaggcctggctgcaggcctgactactgcccacaccaacgaggtgatctagcagatacatggcaacgtgtgaactgcaacaacgcctggtgccccagcaccaaccttccaagtgtaaaaacaatgtgctgctgcttcacttccgccctccggttatcaagcaaaatgtctcttgtggcccatcttactggaagagagttccgggaaacatagcctcaccaaggtgacacattacaaagccaccctaccatgaatccgctcccaagggtctcactgctcacctgaggataactcaatataactatgttgctgaaaatgcaaagctgaagaccatggatttcatggtgattccagcaagtacagagattctatgaagcccacccagaaaaaacttgctggtcctggctatttttgtgtcatttattcaagtattgagaacctggcctgtggtaggcactgtacttaatactaggatacagaaatgcaaaagatacggcccatgcaattttattaaatgcatcaatatgtattacaaatggtgaatggatttccaactttatcatggaatttaatgctgaatatatagaattcagaaaattgttgggaggacagcccttttgtgaaccttgtttggggcacagtaggaattggaaataatttagtttctatctctaagctgttctattttaaaattatttttaaatttttattgtcccacttaaaaaaaaacttagtgtttcttttgggagtggtttggtgggaacagtgttgactgcctctgagaaactgggatagtgggtgggaagatcaaatcaaggtcacttctttccaaggaccctgagcgattcacttacctaggccgcgggggcggggggttggctgaaggctgaggctcttggtgctcagcactggccggacaccttcaacctgctggtgggtccgccagggggcgccggggcgagaaagcccgtagttcccagccacagtcacccaccggggccctggaggcaccgctcgtcacccatcacccctggcctggccgccctggggcgtggtctccgtccggcgcaaaccccagtacttgggctagggccagagggaagctgagtccccctcttcaaatagtggtaaaacaggcaaaaccgaaccggggttaaatttcggagctcgcccagggtgagggcggggctcgacgacctaggacgttcgagtgcggccgggtgtcgccaagggtcggtttaccccatcgcctcagaaattccgacgaggccctttgggctgcacaaccttgggaatccccaacgggcggccccgaatctgcgccgattttcccaagccgtacttcgggcccaaggcgttttcattgccgccttcccggaggatgtgtggtgggggtggttccgcccggaccgacgggcgggcccggagcccgttggactcgaagatcaaagaaccgcccctctggacactccaggaaaccgagacgaccacctaatttgtttgttttctgtttcaggccacgtaaactcttagtaaatgcaaatgcgtattttactgaactgcaattgaaagaaccgttatagaaaagaacacaaaatgacagaattattaaaagagaagaaaaacattaa

SEQ ID NO: 309548 - DNA, 3011 bp, Homo sapiens
ccgctgcggagcgccggcccgtaggcgcgggagcctccctattaagggcacgcgacatcgaggcaatagtgcgcaggtgcttagccagaggcggagcccgagaggcaggcagcggacttccggttccgggagcaacgaacagccgcggaggcgacagctaccgcttcagaggaggcggccgcggaggaggaggaaggggaggagggcgaggcgggaggtgcaggagggaccctcgccatgggtccacgggcctagagtggcggaagataccggcctggtgccaaactggctactgctgcttcctgtggcctccatggctgaggactggctggactgcccggccctgggccctggctggaagcgccgcgaagtctttcgcaagtcaggggccacctgtggacgctcagacacctattaccagagccccacaggagacaggatccgaagcaaagttgagctgactcgatacctgggccctgcgtgtgatctcaccctcttcgacttcaaacaaggcatcttgtgctatccagcccccaaggcccatcccgtggcggttgccagcaagaagcgaaagaagccttcaaggccagccaagactcggaaacgtcaggttggaccccagagtggtgaggtcaggaaggaggccccgagggatgagaccaaggctgacactgacacagccccagcttcattccctgctcctgggtgctgtgagaactgtggaatcagcttctcaggggatggcacccaaaggcagcggctcaaaacgttgtgcaaagactgtcgagcacagagaattgccttcaaccgggaacagagaatgtttaagcgtgtgggctgtggggagtgtgcagcctgccaggtaacagaagactgtggggcctgctccacctgcctcctgcagctgccccatgatgtggcatcggggctgttctgcaagtgtgaacggagacgctgcctccggattgtggaaaggagccgagggtgtggagtatgccggggctgtcagacccaagaggattgtggccattgccccatctgccttcgccctccccgccctggtctcaggcgccagtggaaatgtgtccagcgacgttgcctacggggtaaacatgcccgccgcaagggaggctgtgactccaagatggctgccaggcggcgccccggagcccagccactgcctccaccacccccatcacagtccccagagcccacagagccgcaccccagagccctggccccctcgccacctgccgagttcatctattactgtgtagacgaggacgagctacagccctacacgaaccgccggcagaaccgcaagtgcggggcctgtgcagcctgcctacggcggaatggactgtggccgctgcgacttctgctgcgacaagcccaaattcgggggcagcaaccagaagcgccagaagtgtcgttggcgccaatgcctgcagtttgccatgaagcggctgctgcccagtgtctggtcagagtctgaggatggggcaggatcgcccccaccttaccgtcgtcgaaagaggcccagctctgcccgacggcaccatcttggccctaccttgaagcccaccttggctacacgcacagcccaaccagaccatacccaggctccaacgaagcaggaagcaggtggtggctttgtgctgcccccgcctggcactgaccttgtgtttttacgggaaggcgcaagcagtcctgtgcaggtgccgggccctgttgcagcttccacagaagccctgttgcaggaggcccagtgctctggcctgagttgggttgtggccttaccccaggtgaagcaagagaaggcggatacccaggacgagtggacaccaggcacagctgtcctgacttctcccgtattggtgcctggctgccctagcaaggcagtagacccaggcctgccttctgtgaagcaagagccacctgacccagaggaggacaaggaggagaacaaggatgattctgcctccaaattggccccagaggaagaggcaggaggggctggcacacccgtgatcacggagattttcagcctgggtggaacccgcttccgagatacagcagtctggttgccaaggtattaccaccttgctcttgactggaaatgcaactgtggttaccacctgtgctgcaggtccgtcctggttccctgatttgtgtttcctgttctgcctggatcctgattctcagaaaccagttactggacttctgatccacatcctgaccctggtccactgtgaccctcagactcttaattatgctccaccaggtcgtgccactgccccactagtccatttgatctgcccccatcctaggatatcctgagtctaagccctggtttctgccaatggcaaataggaagattttattaacaggttttaaaaaattattattattactggttatttggtttgacaaggcacttaggctccctgagctttgccttagctggaaaataaggatagtattacttgctattctatcaaccctgtaagatatttgcggccacgcgcggtagcgcaccctgtaattccaacactttgggaggccggcgggaggggcagtggggaggatcgcttgaacccaggagcaggagttccagcctgagcaacatagcgggaccccctgtctcttcaaaatttgtttttaaattagcagggcgtggtggcgcaggctctgtagtcccagatactctggaggctgaggcccaggaggacgaggctgcagggagccatgatcacgccacggcactccaccctgggcgacagagcgagaccttgtctcagaaaaaatctgtgaggttaaaaggctgtgtgtgtgaaaatatcttggaaattgtaaagaactacacaaatataaggttttcctgtgattattaccgtcatcaagattaacctacagatagtgcaaaatttaagcttcccaaaaaatgttcgctaacctttttcatacttttagaccattacaagatataaatagcaaagtcaactggaatt

SEQ ID NO: 309549 - DNA, 1860 bp, Homo sapiens
ccgctgcggagcgccggcccgtaggcgcgggagcctccctattaagggcacgcgacatcgaggcaatagtgcgcaggtgcttagccagaggcggagcccgagaggcaggcagcggacttccggttccgggagcaacgaacagccgcggaggcgacagctaccgcttcagaggaggcggccgcggaggaggaggaaggggaggagggcgaggcgggaggtgcaggagggaccctcgccatgggtccacgggcctagagtggcggaagataccggcctggtgccaaactggctactgctgcttcctgtggcctccatggctgaggactggctggactgcccggccctgggccctggctggaagcgccgcgaagtctttcgcaagtcaggggccacctgtggacgctcagacacctattaccagagccccacaggagacaggatccgaagcaaagttgagctgactcgatacctgggccctgcgtgtgatctcaccctcttcgacttcaaacaaggcatcttgtgctatccagcccccaaggcccatcccgtggcggttgccagcaagaagcgaaagaagccttcaaggccagccaagactcggaaacgtcaggttggaccccagagtggtgaggtcaggaaggaggccccgagggatgagaccaaggctgacactgacacagccccagcttcattccctgctcctgggtgctgtgagaactgtggaatcagcttctcaggggatggcacccaaaggcagcggctcaaaacgttgtgcaaagactgtcgagcacagagaattgccttcaaccgggaacagagaatgtttaagcgtgtgggctgtggggagtgtgcagcctgccaggtaacagaagactgtggggcctgctccacctgcctcctgcagctgccccatgatgtggcatcggggctgttctgcaagtgtgaacggagacgctgcctccggattgtggaaaggagccgagggtgtggagtatgccggggctgtcagacccaagaggattgtggccattgccccatctgccttcgccctccccgccctggtctcaggcgccagtggaaatgtgtccagcgacgttgcctacggggtaaacatgcccgccgcaagggaggctgtgactccaagatggctgccaggcggcgccccggagcccagccactgcctccaccacccccatcacagtccccagagcccacagagccgcaccccagagccctggccccctcgccacctgccgagttcatctattactgtgtagacgaggacgagctacagccctacacgaaccgccggcagaaccgcaagtgcggggcctgtgcagcctgcctacggcggaatggactgtggccgctgcgacttctgctgcgacaagcccaaattcgggggcagcaaccagaagcgccagaagtgtcgttggcgccaatgcctgcagtttgccatgaagcggctgctgcccagtgtctggtcagagtctgaggatggggcaggatcgcccccaccttaccgtcgtcgaaagaggcccagctctgcccgacggcaccatcttggccctaccttgaagcccaccttggctacacgcacagcccaaccagaccatacccaggctccaacgaagcaggaagcaggtggtggctttgtgctgcccccgcctggcactgaccttgtgtttttacgggaaggcgcaagcagtcctgtgcaggtgccgggccctgttgcagcttccacagaagccctgttgcaggcagtagacccaggcctgccttctgtgaagcaagagccacctgacccagagaggggcggagcagcagagaggggcggagcagcagagaggggcggagcag

SEQ ID NO: 309550 - DNA, 941 bp, Homo sapiens
ccgctgcggagcgccggcccgtaggcgcgggagcctccctattaagggcacgcgacatcgaggcaatagtgcgcaggtgcttagccagaggcggagcccgagaggcaggcagcggacttccggttccgggagcaacgaacagccgcggaggcgacagctaccgcttcagaggaggcggccgcggaggaggaggaaggggaggagggcgaggcgggaggtgcaggagggaccctcgccatgggtccacgggcctagagtggcggaagataccggcctggtgccaaactggctactgctgcttcctgtggcctccatggctgaggactggctggactgcccggccctgggccctggctggaagcgccgcgaagtctttcgcaagtcaggggccacctgtggacgctcagacacctattaccagagccccacaggagacaggatccgaagcaaagttgagctgactcgatacctgggccctgcgtgtgatctcaccctcttcgacttcaaacaaggcatcttgtgctatccagcccccaaggcccatcccgtggcggttgccagcaagaagcgaaagaagccttcaaggccagccaagactcggaaacgtcaggttggaccccagagtggtgaggtcaggaaggaggccccgagggatgagaccaaggctgacactgacacagccccagcttcattccctgctcctgggtgctgtgagaactgtggaatcagcttctcaggggatggcacccaaaggcagcggctcaaaacgttgtgcaaagactgtcgagcacagagaattgccttcaaccgggaacagagaatgtttaaggtaagcacaacctgcttcctcttcacaactctgcagtgggagcaggatgtgatggagctggtagagtctgaagggatgatgatgggtccacaggatgaagagtcattttata

SEQ ID NO: 309551 - DNA, 2450 bp, Homo sapiens
aggaggaaggggagggaaaaggggaggaggaggaggatgtgagactgggttagagaaatgaaagaaagcaaggctttctgttgacattcagtgcagtctacctgcagcacagcacactccctttgggcaaggacctgagacccttgtgctaagtcaagaggctcaatgggctgcagaagaactagagaaggaccaagcaaagccatgatatttccatggaaatgtcagagcacccagagggacttatggaacatcttcaagttgtgggggtggacaatgctctgttgtgatttcctggcacatcatggaaccgactgctggacttaccattattctgaaaaacccatgaactggcaaagggctagaagattctgccgagacaattacacagatttagttgccatacaaaacaaggcggaaattgagtatctggagaagactctgcctttcagtcgttcttactactggataggaatccggaagataggaggaatatggacgtgggtgggaaccaacaaatctcttactgaagaagcagagaactggggagatggtgagcccaacaacaagaagaacaaggaggactgcgtggagatctatatcaagagaaacaaagatgcaggcaaatggaacgatgacgcctgccacaaactaaaggcagccctctgttacacagcttcttgccagccctggtcatgcagtggccatggagaatgtgtagaaatcatcaataattacacctgcaactgtgatgtggggtactatgggccccagtgtcagtttgtgattcagtgtgagcctttggaggccccagagctgggtaccatggactgtactcaccctttgggaaacttcagcttcagctcacagtgtgccttcagctgctctgaaggaacaaacttaactgggattgaagaaaccacctgtggaccatttggaaactggtcatctccagaaccaacctgtcaagtgattcagtgtgagcctctatcagcaccagatttggggatcatgaactgtagccatcccctggccagcttcagctttacctctgcatgtaccttcatctgctcagaaggaactgagttaattgggaagaagaaaaccatttgtgaatcatctggaatctggtcaaatcctagtccaatatgtcaaaaattggacaaaagtttctcaatgattaaggagggtgattataaccccctcttcattccagtggcagtcatggttactgcattctctgggttggcatttatcatttggctggcaaggagattaaaaaaaggcaagaaatccaagagaagtatgaatgacccatattaaatcgcccttggtgaaagaaaattcttggaatactaaaaatcatgagatcctttaaatccttccatgaaacgttttgtgtggtggcacctcctacgtcaaacatgaagtgtgtttccttcagtgcatctgggaagatttctacctgaccaacagttccttcagcttccatttcgcccctcatttatccctcaacccccagcccacaggtgtttatacagctcagctttttgtcttttctgaggagaaacaaataagaccataaagggaaaggattcatgtggaatataaagatggctgactttgctctttcttgactcttgttttcagtttcaattcagtgctgtacttgatgacagacacttctaaatgaagtgcaaatttgatacatatgtgaatatggactcagttttcttgcagatcaaatttcacgtcgtcttctgtatactgtggaggtacactcttatagaaagttcaaaaagtctacgctctcctttctttctaactccagtgaagtaatggggtcctgctcaagttgaaagagtcctatttgcactgtagcctcgccgtctgtgaattggaccatcctatttaactggcttcagcctccccaccttcttcagccacctctctttttcagttggctgacttccacacctagcatctcatgagtgccaagcaaaaggagagaagagagaaatagcctgcgctgttttttagtttgggggttttgctgtttccttttatgagacccattcctatttcttatagtcaatgtttcttttatcacgatattattagtaagaaaacatcactgaaatgctagctgcaagtgacatctctttgatgtcatatggaagagttaaaacaggtggagaaattccttgattcacaatgaaatgctctcctttcccctgcccccagaccttttatccacttacctagattctacatattctttaaatttcatctcaggcctccctcaaccccaccacttcttttataactagtcctttactaatccaacccatgatgagctcctcttcctggcttcttactgaaaggttaccctgtaacatgcaattttgcatttgaataaagcctgctttttaagtgttaaaaaaaaaaaa

SEQ ID NO: 309552 - DNA, 2336 bp, Homo sapiens
aggaggaaggggagggaaaaggggaggaggaggaggatgtgagactgggttagagaaatgaaagaaagcaaggctttctgttgacattcagtgcagtctacctgcagcacagcacactccctttgggcaaggacctgagacccttgtgctaagtcaagaggctcaatgggctgcagaagaactagagaaggaccaagcaaagccatgatatttccatggaaatgtcagagcacccagagggacttatggaacatcttcaagttgtgggggtggacaatgctctgttgtgatttcctggcacatcatggaaccgactgctggacttaccattattctgaaaaacccatgaactggcaaagggctagaagattctgccgagacaattacacagatttagttgccatacaaaacaaggcggaaattgagtatctggagaagactctgcctttcagtcgttcttactactggataggaatccggaagataggaggaatatggacgtgggtgggaaccaacaaatctcttactgaagaagcagagaactggggagatggtgagcccaacaacaagaagaacaaggaggactgcgtggagatctatatcaagagaaacaaagatgcaggcaaatggaacgatgacgcctgccacaaactaaaggcagccctctgttacacagcttcttgccagccctggtcatgcagtggccatggagaatgtgtagaaatcatcaataattacacctgcaactgtgatgtggggtactatgggccccagtgtcagtttgtgattcagtgtgagcctttggaggccccagagctgggtaccatggactgtactcaccctttgggaaacttcagcttcagctcacagtgtgccttcagctgctctgaaggaacaaacttaactgggattgaagaaaccacctgtggaccatttggaaactggtcatctccagaaccaacctgtcaagtgattcagtgtgagcctctatcagcaccagatttggggatcatgaactgtagccatcccctggccagcttcagctttacctctgcatgtaccttcatctgctcagaaggaactgagttaattgggaagaagaaaaccatttgtgaatcatctggaatctggtcaaatcctagtccaatatgtcaaaaattggacaaaagtttctcaatgattaaggagggtgattataaccccctcttcattccagtggcagtcatggttactgcattctctgggttggcatttatcatttggctggcaaggagattaaaaaaaggcaagaaatccaagagaagtatgaatgacccatattaaatcgcccttggtgaaagaaaattcttggaatactaaaaatcatgagatcctttaaatccttccatgaaacgttttgtgtggtggcacctcctacgtcaaacatgaagtgtgtttccttcagtgcatctgggaagatttctacctgaccaacagttccttcagcttccatttcgcccctcatttatccctcaacccccagcccacaggtgtttatacagctcagctttttgtcttttctgaggagaaacaaataagaccataaagggaaaggattcatgtggaatataaagatggctgactttgctctttcttgactcttgttttcagtttcaattcagtgctgtacttgatgacagacacttctaaatgaagtgcaaatttgatacatatgtgaatatggactcagttttcttgcagatcaaatttcacgtcgtcttctgtatactgtggaggtacactcttatagaaagttcaaaaagtctacgctctcctttctttctaactccagtgaagtaatggggtcctgctcaagttgaaagagtcctatttgcactgtagcctcgccgtctgtgaattggaccatcctatttaactggcttcagcctccccaccttcttcagccacctctctttttcagttggctgacttccacacctagcatctcatgagtgccaagcaaaaggagagaagagagaaatagcctgcgctgttttttagtttgggggttttgctgtttccttttatgagacccattcctatttcttatagtcaatgtttcttttatcacgatattattagtaagaaaacatcactgaaatgctagctgcaagtgacatctctttgatgtcatatggaagagttaaaacaggtggagaaattccttgattcacaatgaaatgctctcctttcccctgcccccagaccttttatccacttacctagattctacatattctttaaatttcatctcaggcctccctcaaccccacggggccgccagcacactggaattc

SEQ ID NO: 309553 - DNA, 838 bp, Homo sapiens
gttttgtcttttttttttttttctttttcattgaagtgattcagtgtgagcctctatcagcaccagatttggggatcatgaactgtagccatcccctggccagcttcagctttacctctgcatgtaccttcatctgctcagaaggaactgagttaattgggaagaagaaaaccatttgtgaatcatctggaatctggtcaaatcctagtccaatatgtcaaagtgagtaagtttgtcctggaaaactgaaatcttaacgatggagctgatggatgagcagatatgaggaaagacatacataaacatttacatgttgttttgctaagaatatgtggcctagaaataaatttgtatgcttaactcactgtaaaatctttggctggtctttcctcctcctttaatgacaatcatttcctttttttgttctcacctcttgccatcttaactcctaaaatctgaactcactgatttactttttacccattcttctattccactacaatctaacatctctgttagcccattgaaatgcctgtaaaaggtcactaatgaccacctacttccccaaataatggatactcctgaatcatcactaagctaatgcctccaaaatctatctgtatatgagaagaatcatgtcttgttcatctttgtataccctccacctgacacagtgcctggcaataggtgctaaagcaaatgcatgttaagctagcatgtgaaagaatagctacctgtgtctgctcctgagactatctgcatggatgacaaaagtctttaaatggtaggatctacagaagctgtcagaaatgctgatctctgtgtgctgcgtgcccag

SEQ ID NO: 309554 - DNA, 510 bp, Homo sapiens
gttccagtcattgaacaagtccatggagctaaatacaacgatgaccattcttgccaacatttttaggtgcattttcaggaactctatgaaccacaaatctgggcattgagattctgtaggcattagactagcaaggctggtccagtctttgcctatgctgtagactcatcaggggccttcccatgccagtttcctcatctgtcaaatggcatcaaatgggctactactgggagatgtaaggaggaaaaaagtcaaatatcatgagatagactaaggaaataatgctggtggtctcatgctatgtgccttactgatttctctttcagaattggacaaaagtttctcaatgattaaggagggtgattataaccccctcttcattccagtggcagtcatggttactgcattctctgggttggcatttatcatttggctggcaaggagattaaaaaaaggtatgtgagtttaacttcacatgaaaagaacacaactttaaagtgaaaaagaaaa

SEQ ID NO: 309555 - DNA, 2396 bp, Homo sapiens
aggaggaaggggagggaaaaggggaggaggaggaggatgtgagactgggttagagaaatgaaagaaagcaaggctttctgttgacattcagtgcagtctacctgcagcacagcacactccctttgggcaaggacctgagacccttgtgctaagtcaagaggctcaatgggctgcagaagaactagagaaggaccaagcaaagccatgatatttccatggaaatgtcagagcacccagagggacttatggaacatcttcaagttgtgggggtggacaatgctctgttgtgatttcctggcacatcatggaaccgactgctggacttaccattattctgaaaaacccatgaactggcaaagggctagaagattctgccgagacaattacacagatttagttgccatacaaaacaaggcggaaattgagtatctggagaagactctgcctttcagtcgttcttactactggataggaatccggaagataggaggaatatggacgtgggtgggaaccaacaaatctcttactgaagaagcagagaactggggagatggtgagcccaacaacaagaagaacaaggaggactgcgtggagatctatatcaagagaaacaaagatgcaggcaaatggaacgatgacgcctgccacaaactaaaggcagccctctgttacacagcttcttgccagccctggtcatgcagtggccatggagaatgtgtagaaatcatcaataattacacctgcaactgtgatgtggggtactatgggccccagtgtcagtttgtgattcagtgtgagcctttggaggccccagagctgggtaccatggactgtactcaccctttgggaaacttcagcttcagctcacagtgtgccttcagctgctctgaaggaacaaacttaactgggattgaagaaaccacctgtggaccatttggaaactggtcatctccagaaccaacctgtcaagtgattcagtgtgagcctctatcagcaccagatttggggatcatgaactgtagccatcccctggccagcttcagctttacctctgcatgtaccttcatctgctcagaaggaactgagttaattgggaagaagaaaaccatttgtgaatcatctggaatctggtcaaatcctagtccaatatgtcaaaaattggacaaaagtttctcaatgattaaggagggtgattataaccccctcttcattccagtggcagtcatggttactgcattctctgggttggcatttatcatttggctggcaaggagattaaaaaaaggcaagaaatccaagagaagtatgaatgacccatattaaatcgcccttggtgaaagaaaattcttggaatactaaaaatcatgagatcctttaaatccttccatgaaacgttttgtgtggtggcacctcctacgtcaaacatgaagtgtgtttccttcagtgcatctgggaagatttctacctgaccaacagttccttcagcttccatttcgcccctcatttatccctcaacccccagcccacaggtgtttatacagctcagctttttgtcttttctgaggagaaacaaataagaccataaagggaaaggattcatgtggaatataaagatggctgactttgctctttcttgactcttgttttcagtttcaattcagtgctgtacttgatgacagacacttctaaatgaagtgcaaatttgatacatatgtgaatatggactcagttttcttgcagatcaaatttcacgtcgtcttctgtatactgtggaggtacactcttatagaaagttcaaaaattgaaagagtcctatttgcactgtagcctcgccgtctgtgaattggaccatcctatttaactggcttcagcctccccaccttcttcagccacctctctttttcagttggctgacttccacacctagcatctcatgagtgccaagcaaaaggagagaagagagaaatagcctgcgctgttttttagtttgggggttttgctgtttccttttatgagacccattcctatttcttatagtcaatgtttcttttatcacgatattattagtaagaaaacatcactgaaatgctagctgcaagtgacatctctttgatgtcatatggaagagttaaaacaggtggagaaattccttgattcacaatgaaatgctctcctttcccctgcccccagaccttttatccacttacctagattctacatattctttaaatttcatctcaggcctccctcaaccccaccacttcttttataactagtcctttactaatccaacccatgatgagctcctcttcctggcttcttactgaaaggttaccctgtaacatgcaattttgcatttgaataaagcctgctttttaagtgttaaaaaaaaaaaa

SEQ ID NO: 309556 - DNA, 1961 bp, Homo sapiens
  misc_feature (22)..(22): n is a, c, g, or t
  misc_feature (43)..(43): n is a, c, g, or t
  misc_feature (50)..(50): n is a, c, g, or t
  misc_feature (86)..(86): n is a, c, g, or t
  misc_feature (97)..(97): n is a, c, g, or t
  misc_feature (107)..(107): n is a, c, g, or t
  misc_feature (120)..(120): n is a, c, g, or t
ccaggaggaaccagggggggantggggtggaaattttattttncaagggnaaacaaaggatgccaggccaaaatgggaaggatgangccctgccaanaaaactaaangcagcccttttgnaacaaaagcttcttgccagccctggtcatgcagtggccatggagaatgtgtagaaatcatcaataattacacctgcaactgtgatgtggggtactatgggccccagtgtcagtttgtgattcagtgtgagcctttggaggccccagagctgggtaccatggactgtactcaccctttgggaaacttcagcttcagctcacagtgtgccttcagctgctctgaaggaacaaacttaactgggattgaagaaaccacctgtggaccatttggaaactggtcatctccagaaccaacctgtcaaggagaataacaactgaaaaacaaaaacacaatctcttgatcttttcaagtttgaaataagtgattcagtgtgagcctctatcagcaccagatttggggatcatgaactgtagccatcccctggccagcttcagctttacctctgcatgtaccttcatctgctcagaaggaactgagttaattgggaagaagaaaaccatttgtgaatcatctggaatctggtcaaatcctagtccaatatgtcaaaaattggacaaaagtttctcaatgattaaggagggtgattataaccccctcttcattccagtggcagtcatggttactgcattctctgggttggcatttatcatttggctggcaaggagattaaaaaaaggcaagaaatccaagagaagtatgaatgacccatattaaatcgcccttggtgaaagaaaattcttggaatactaaaaatcatgagatcctttaaatccttccatgaaacgttttgtgtggtggcacctcctacgtcaaacatgaagtgtgtttccttcagtgcatctgggaagatttctacctgaccaacagttccttcagcttccatttcgcccctcatttatccctcaacccccagcccacaggtgtttatacagctcagctttttgtcttttctgaggagaaacaaataagaccataaagggaaaggattcatgtggaatataaagatggctgactttgctctttcttgactcttgttttcagtttcaattcagtgctgtacttgatgacagacacttctaaatgaagtgcaaatttgatacatatgtgaatatggactcagttttcttgcagatcaaatttcacgtcgtcttctgtatactgtggaggtacactcttatagaaagttcaaaaagtctacgctctcctttctttctaactccagtgaagtaatggggtcctgctcaagttgaaagagtcctatttgcactgtagcctcgccgtctgtgaattggaccatcctatttaactggcttcagcctccccaccttcttcagccacctctctttttcagttggctgacttccacacctagcatctcatgagtgccaagcaaaaggagagaagagagaaatagcctgcgctgttttttagtttgggggttttgctgtttccttttatgagacccattcctatttcttatagtcaatgtttcttttatcacgatattattagtaagaaaacatcactgaaatgctagctgcaagtgacatctctttgatgtcatatggaagagttaaaacaggtggagaaattccttgattcacaatgaaatgctctcctttcccctgcccccagaccttttatccacttacctagattctacatattctttaaatttcatctcaggcctccctcaaccccaccacttcttttataactagtcctttactaatccaacccatgatgagctcctcttcctggcttcttactgaaaggttaccctgtaacatgcaattttgcatttgaataaagcctgctttttaagtgttaaaaaaaaaaaa

SEQ ID NO: 309557 - DNA, 1319 bp, Homo sapiens
gcagcaaccattaataaatgccacctcctacgtcaaacatgaagtgtgtttccttcagtgcatctgggaagatttctacctgagttaattgggaagaagaaaaccatttgtgaatcatctggaatctggtcaaatcctagtccaatatgtcaaagcaagaaatccaagagaagtatgaatgacccatattaaatcgcccttggtgaaagaaaattcttggaatactaaaaatcatgagatcctttaaatccttccatgaaacgttttgtgtggtggcacctcctacgtcaaacatgaagtgtgtttccttcagtgcatctgggaagatttctacctgaccaacagttccttcagcttccatttcgcccctcatttatccctcaacccccagcccacaggtgtttatacagctcagctttttgtcttttctgaggagaaacaaataagaccataaagggaaaggattcatgtggaatataaagatggctgactttgctctttcttgactcttgttttcagtttcaattcagtgctgtacttgatgacagacacttctaaatgaagtgcaaatttgatacatatgtgaatatggactcagttttcttgcagatcaaatttcacgtcgtcttctgtatactgtggaggtacactcttatagaaagttcaaaaagtctacgctctcctttctttctaactccagtgaagtaatggggtcctgctcaagttgaaagagtcctatttgcactgtagcctcgccgtctgtgaattggaccatcctatttaactggcttcagcctccccaccttcttcagccacctctctttttcagttggctgacttccacacctagcatctcatgagtgccaagcaaaaggagagaagagagaaatagcctgcgctgttttttagtttgggggttttgctgtttccttttatgagacccattcctatttcttatagtcaatgtttcttttatcacgatattattagtaagaaaacatcactgaaatgctagctgcaagtgacatctctttgatgtcatatggaagagttaaaacaggtggagaaattccttgattcacaatgaaatgctctcctttcccctgcccccagaccttttatccacttacctagattctacatattctttaaatttcatctcaggcctccctcaaccccaccacttcttttataactagtcctttactaatccaacccatgatgagctcctcttcctggcttcttactgaaaggttaccctgtaacatgcaattttgcatttgaataaagcctgctttttaagtgttaaaaaaaaaaaa

SEQ ID NO: 309558 - DNA, 1772 bp, Homo sapiens
aggaggaaggggagggaaaaggggaggaggaggaggatgtgagactgggttagagaaatgaaagaaagcaaggctttctgttgacattcagtgcagtctacctgcagcacagcacactccctttgggcaaggacctgagacccttgtgctaagtcaagaggctcaatgggctgcagaagaactagagaaggaccaagcaaagccatgatatttccatggaaatgtcagagcacccagagggacttatggaacatcttcaagttgtgggggtggacaatgctctgttgtgatttcctggcacatcatggaaccgactgctggacttaccattattctgaaaaacccatgaactggcaaagggctagaagattctgccgagacaattacacagatttagttgccatacaaaacaaggcggaaattgagtatctggagaagactctgcctttcagtcgttcttactactggataggaatccggaagataggaggaatatggacgtgggtgggaaccaacaaatctcttactgaagaagcagagaactggggagatggtgagcccaacaacaagaagaacaaggaggactgcgtggagatctatatcaagagaaacaaagatgcaggcaaatggaacgatgacgcctgccacaaactaaaggcagccctctgttacacagcttcttgccagccctggtcatgcagtggccatggagaatgtgtagaaatcatcaataattacacctgcaactgtgatgtggggtactatgggccccagtgtcagtttgtgattcagtgtgagcctttggaggccccagagctgggtaccatggactgtactcaccctttgggaaacttcagcttcagctcacagtgtgccttcagctgctctgaaggaacaaacttaactgggattgaagaaaccacctgtggaccatttggaaactggtcatctccagaaccaacctgtcaagtgattcagtgtgagcctctatcagcaccagatttggggatcatgaactgtagccatcccctggccagcttcagctttacctctgcatgtaccttcatctgctcagaaggaactgagttaattgggaagaagaaaaccatttgtgaatcatctggaatctggtcaaatcctagtccaatatgtcaaagtgagtaagtttgtcctggaaaactgaaatcttaacgatggagctgatggatgagcagatatgaggaaagacatacataaacatttacatgttgttttgctaagaatatgtggcctagaaataaatttgtatgcttaactcactgtaaaatctttggctggtctttcctcctcctttaatgacaatcatttcctttttttgttctcacctcttgccatcttaactcctaaaatctgaactcactgatttactttttacccattcttctattccactacaatctaacatctctgttagcccattgaaatgcctgtaaaaggtcactaatgaccacctacttccccaaataatggatactcctgaatcatcactaagctaatgcctccaaaatctatctgtatatgagaagaatcatgtcttgttcatctttgtataccctccacctgacacagtgcctggcaataggtgctaaagcaaatgcatgttaagctagcatgtgaaagaatagctacctgtgtctgctcctgagactatctgcatggatgacaaaagtctttaaatggtaggatctacagaagctgtcagaaatgctgatctctgtgtgctgcgtgcccag

SEQ ID NO: 309559 - DNA, 1289 bp, Homo sapiens
aggaggaaggggagggaaaaggggaggaggaggaggatgtgagactgggttagagaaatgaaagaaagcaaggctttctgttgacattcagtgcagtctacctgcagcacagcacactccctttgggcaaggacctgagacccttgtgctaagtcaagaggctcaatgggctgcagaagaactagagaaggaccaagcaaagccatgatatttccatggaaatgtcagagcacccagagggacttatggaacatcttcaagttgtgggggtggacaatgctctgttgtgatttcctggcacatcatggaaccgactgctggacttaccattattctgaaaaacccatgaactggcaaagggctagaagattctgccgagacaattacacagatttagttgccatacaaaacaaggcggaaattgagtatctggagaagactctgcctttcagtcgttcttactactggataggaatccggaagataggaggaatatggacgtgggtgggaaccaacaaatctcttactgaagaagcagagaactggggagatggtgagcccaacaacaagaagaacaaggaggactgcgtggagatctatatcaagagaaacaaagatgcaggcaaatggaacgatgacgcctgccacaaactaaaggcagccctctgttacacagcttcttgccagccctggtcatgcagtggccatggagaatgtgtagaaatcatcaataattacacctgcaactgtgatgtggggtactatgggccccagtgtcagtttgtgattcagtgtgagcctttggaggccccagagctgggtaccatggactgtactcaccctttgggaaacttcagcttcagctcacagtgtgccttcagctgctctgaaggaacaaacttaactgggattgaagaaaccacctgtggaccatttggaaactggtcatctccagaaccaacctgtcaagtgattcagtgtgagcctctatcagcaccagatttggggatcatgaactgtagccatcccctggccagcttcagctttacctctgcatgtaccttcatctgctcagaaggaactgagttaattgggaagaagaaaaccatttgtgaatcatctggaatctggtcaaatcctagtccaatatgtcaaaaattggacaaaagtttctcaatgattaaggagggtgattataaccccctcttcattccagtggcagtcatggttactgcattctctgggttgcatcacatggcgacgggatcctctaggtcgaggacacagcg

SEQ ID NO: 309560 - DNA, 1103 bp, Homo sapiens
aggaggaaggggagggaaaaggggaggaggaggaggatgtgagactgggttagagaaatgaaagaaagcaaggctttctgttgacattcagtgcagtctacctgcagcacagcacactccctttgggcaaggacctgagacccttgtgctaagtcaagaggctcaatgggctgcagaagaactagagaaggaccaagcaaagccatgatatttccatggaaatgtcagagcacccagagggacttatggaacatcttcaagttgtgggggtggacaatgctctgttgtgatttcctggcacatcatggaaccgactgctggacttaccattattctgaaaaacccatgaactggcaaagggctagaagattctgccgagacaattacacagatttagttgccatacaaaacaaggcggaaattgagtatctggagaagactctgcctttcagtcgttcttactactggataggaatccggaagataggaggaatatggacgtgggtgggaaccaacaaatctcttactgaagaagcagagaactggggagatggtgagcccaacaacaagaagaacaaggaggactgcgtggagatctatatcaagagaaacaaagatgcaggcaaatggaacgatgacgcctgccacaaactaaaggcagccctctgttacacagcttcttgccagccctggtcatgcagtggccatggagaatgtgtagaaatcatcaataattacacctgcaactgtgatgtggggtactatgggccccagtgtcagtttgtgattcagtgtgagcctctatcagcaccagatttggggatcatgaactgtagccatcccctggccagcttcagctttacctctgcatgtaccttcatctgctcagaaggaactgagttaattgggaagaagaaaaccatttgtgaatcatctggaatctggtcaaatcctagtccaatatgtcaaaaattggacaaaagtttctcaatgattaaggagggtgattataaccccctcttcattccagtggcagtcatggttactgcattctctgggttgcatcacatggcgacgggatcctctaggtcgaggacacagcg

SEQ ID NO: 309561 - DNA, 1909 bp, Homo sapiens
gctttatttaggttttacctgtttgtttcaaagagcaaaaataactccatagaacacttatttatagcgctgttaacaagagctccgaggaagaaataatttcaactatgtttccctagataatataagcaaatatccaaaagagtaaatacatattccagggcagaatcatacatcgctaaaggtcttcagggtttacaataagtaatgtgggcatgtaaaaatttatccccaatggtcaatgaacattactacggattaactctacatcacattgaaatttagtcctcaactctcttcctacaaaacagaatccacagtagttggccttccctgtgctattccatcagcctacagacctggtacctggatttttgcccgagatgattcctaccaccttactactgacgaagacacccattccagtggaccactgtgacccaggaggcattcagccatcatgatgtggcctttacctccactcctgtcttgttctacccagattcagcacagccctttatagtgaagtcagagtcctcaagccaaatagctaaagctgttttatcacaacaaaggcctagtttgttccatgagtgtgcatttcatttcttcagttaaagccttcagagacacacaataaatttggaccaggggattttttagttattaatgctctctgaagaaaggcaacatctttttgagagcagcattggaccacaccccacaatctcaaatgattgaaattcatgaacatctaggatcccatgaaggtcactggaccctgttttttctacttcaaatcctgtagtagcctactgaatgagaaaacatattctgacccattgggatcaaatcaaaggcacagtgaactcctcatagcatcttctttggaattactcaggaaccagaactttttacacaaatgtaagaaattctaccaaggagtccccttacctaacagcatctcacaaggctgcaccagattccagaaaaggcttctcttgatacatcaagcattttgtgaccgacttattcttagatcattggttttccaaaggctttgtggccatgaagccctttgagtgaaaactgtgcagaagcccagagtaaaagtgaagctgctctggatgaagtagtgaagcaagagtaggggcctgaatcctgctacaactatcttcctttaccaccgtggtgacacctaaggggacttccttacaacaccttgaactcttccgaacacagtttgaaaaccactgccccagacagcaatatgtttgacctgaatggcattccaatcttttctgtacctccactcagcacagttcatgttcagtagatgctgaacattcttagaaatactgtgtgtgaacttagaaaagtgcaagaagacaggcatgtctttgaccccaggaatgatcatttgctgaagatggtgtcaagtgaacctagattaacagccctccactccagatggatatccagtgattcctagaatgggatatagccagagaacaattctatgcaccctacactgacagactcccttaagcaacaccagatgctctactggtacttgaagtacatgactttgaagtcttgaccctccatgaatacctgaattatcagcaagcgggttttgaagctggtgcctcattgaggccatattagagcaacttgtacatttgacctcttgttatcagccatggtactctacttcgtgtgcaagagataactatgaaagccaaattcaaatactggcaacatttcctaaaggggctcaatatctatcattcgtcttcttttccaaactacacatcactgtatgactcaaccagtagcagttatattgccccttggtttttattcagtttaactactgtttccaagataaatgagctaataagcttta

SEQ ID NO: 309562 - DNA, 8079 bp, Homo sapiens
gcgcaagttgcagcttcaccacctcccaagtgaaaaagctcctaggcactcacgatttcttttttcaaagccggaccaaacccagttcagggtggtggtcagattacctcacacttggcccacataaacacctcacaaatgacccgcccacagcacctcgggcaggccgcgccccgcccccacgtccctcagacaacagcctcagcctcccaggcccttcccgggcctcggtcccgtggccgcctccccacgaagaggagctactcccggcttccaaggaccggatcgagggcagtggcgagcgcaccacctgaccgggcactacccggatctcacaactgcctttgtccctccccgcggaattggaacccaacagccgcagagcgctcttggaaccatgtgctgctgccgcctccgccgccgccgccgctgcctccgccgccgcccgcgcgccgcccgcgcgccgcgctagttgagatggtgacaggattcagcaacacgaaattcggcgtttagagctgctctgccgccgccgtcacagacaccacagccaccgctttgtctccgatagtgcacacagccccggccacctcgcacactccccgacgccccaagcccccgaggcctccgcggagcattcagccaatcacaaagctgcagctcctcccgcccccgccctgatgtacagcctcctgattggcgggctgcgtgtccccatgtgaccggatcttggttggccggtcccgcccctgtcacgtgacagcgtgcgcctctcttcctgctttcctgaccctctccgccatttaaagaaacagtaccgggggcgggccgagcgacgcagccgggacggtagctgcggtgcggaccggaggagccatcttgtctcgtcgccggggagtcaggcccctaaatcgaagaagccctggcgcgccctccccccctcccgggtctggtagggcgaaggaacgggcgtgcggtcgatcgagcgatcggttggcggctctttctcctgctctggcatccagctcttggggcgcaggcccggccgccgcggcgcgcgcccggtggccgttggcgctcgcgccgcgtctttcttctcgtacgcagaactcgggcggcggcctatgcgtttgcgattcgacgaggagtcgtccgggtggtcggcggcggcgggcagctgctccgccccgctccgggggaggcggcggcggcagcggccgcgggatttggagcggccggggaggcgggggtggccggggccggcttggaggcctggcgccacccttcggggcctgcaaggacccagttgggggggcaggagggggccggaggatggttggttgtgggatttctactttgccttttcctccttatgccgccttagtgaggggcgggagctctggcggcagccccggggtggggagacgagctccggagtcggaagagctgggttttcttccgggcctagccaccagttggcggagtgaccttaggcgagtcactctgtaatttgtctgcgcctcagtttcctcctctgcctatcaatgtgtgtggggttgaaatcgctttgtaaactataaagcgtgggtgtacgtaaaggatggttattgtttataattttttttgagttgtaagaaaacttagcagttccccaatccttgggttttgaacctgggaaccttggattggagttggggatccccaaacttcctgaaattgtgggaatgtgcggtttgggggaatgatgggaatttgtgggaatgtgcgttttaggggaatgatgatccatcgctagcaagttttccaagggggctgtgacccagaagagttaagaatcacaatttcttcatgctacagagaggaaactgaggcctagatgtcatttgggacccttcacaaccattttgaagccctgtttgagtccctgggatatgtgagctgtttctatgcataatggatattcggggttaacaacagtcccctgcttggcttctattctgaatccttttctttcaccatggggtgcctgaagggtggctgatgcatatggtacaatggcacccagtgtaaagcagctacaattaggagtggatgtgttctgtagcatcctatttaaataagcctattttatcctttggcccgtcaactctgttatctgctgcttgtactggtgcctgtacttttctgactctcattgaccatattccacgaccatggttgtcatccattacttgatcctactttacatgtctagtctgtgtggttggtggtgaataggcttctttttacatggtgctgccagcccagctaattaatggtgcacgtggacttttagcaagcgggctcactggaagagactgaacctggcatggaattcctgaagatgtttggggttttttttctttcttaatcgaaagttaacattgtctgaaaagttttgttagaactactgcggaacctcaaaatcagtagatttggaagtgattcaaagctaaactttttccttggccctccttgtgttctaattgcttgcaagtgtaatactaggatgtccaagatgccagtttttgcttctttgttagttgtcagctgcttttatcaaatttcaggccattatccaacaaacactataaaaatgtttgaacaattggatttcaaacattttcgttttgtggagtggtgctcaccaagtggtacagccctaagcaagtgaacacaaacacatttaagtgtattttgtctgattagatgttagccagttatgctatttcattcaaatgtctgaaaaaatcaattgactattcccttttcctaaagggcagagacagataatctcacttccagagaaatgacttggagaaaaaaaagtgttggtctttttgctcttttgtaattaaatccggatgtacctcaaaagacttaagactgtggtgataagatgctttcctcagcagaaaggagggaaaaaaaacaactggaactcaaagcttgaaattctgtggcaaaacatgagatgtccaggattggaggttgaaaagatttcactacagtgttctgcaatagttggagcagataactttcagtgtagccacagccatggactccagatttccagattttcaagacctggacctggaacccgaaagagcttgtcacgatgcggcaggaacactggaggtagatttttttttatttttgaattttgggactgttgaccttgctgtgagaaaagagacaacgactgagcaagcactaccaccagcactgttactgggaattagaagacctgagtttctgtccagaccctcagtgcaaactgaggatgctccatccaaagtgaattatggtacttgccattttccaaaatgccttatcctttaccatctctgcacttttgttcatactctcattctactttggaactgctgctctgtggcttttcatctgtcaaaactgccattttctcagtatccaactcttatgccctcttttccatgagtctcctaactagccagaatagagctttaaagttttatgacatttcgttatgtatcctctatctgtatacaaaatcctgtaaaatagttacttgcctgcatttactgtctttgcagatagcagactccttgaaagcagggtccttgtttagtgcatctttgcccacatacaccacaacttatcaagatgcatttattaggaaggaggagtttagagagcaggctatcagaataaccacttcacctacagacctggtacctggatttttgcccgagatgattcctaccaccttactactgacgaagacacccattccagtggaccactgtgacccaggaggcattcagccatcatgatgtggcctttacctccactcctgtcttgttctacccagattcagcacagccctttatagtgaagtcagagtcctcaagccaaatagctaaagctgttttatcacaacaaaggcctagtttgttccatgagtgtgcatttcatttcttcagttaaagccttcagagacacacaataaatttggaccaggggattttttagttattaatgctctctgaagaaaggcaacatctttttgagagcagcattggaccacaccccacaatctcaaatgattgaaattcatgaacatctaggatcccatgaaggtcactggaccctgttttttctacttcaaatcctgtagtagcctactgaatgagaaaacatattctgacccattgggatcaaatcaaaggcacagtgaactcctcatagcatcttctttggaattactcaggaaccagaactttttacacaaatgtaagaaattctaccaaggagtccccttacctaacagcatctcacaaggctgcaccagattccagaaaaggcttctcttgatacatcaagcattttgtgaccgacttattcttagatcattggttttccaaaggctttgtggccatgaagccctttgagtgaaaactgtgcagaagcccagagtaaaagtgaagctgctctggatgaagtagtgaagcaagagtaggggcctgaatcctgctacaactatcttcctttaccaccgtggtgacacctaaggggacttccttacaacaccttgaactcttccgaacacagtttgaaaaccactgccccagacagcaatatgtttgacctgaatggcattccaatcttttctgtacctccactcagcacagttcatgttcagtagatgctgaacattcttagaaatactgtgtgtgaacttagaaaagtgcaagaagacaggcatgtctttgaccccaggaatgatcatttgctgaagatggtgtcaagtgaacctagattaacagccctccactccagatggatatccagtgattcctagaatgggatatagccagagaacaattctatgcaccctacactgacagactcccttaagcaacaccagatgctctactggtacttgaagtacatgactttgaagtcttgaccctccatgaatacctgaattatcagcaagcgggttttgaagctggtgcctcattgaggccatattagagcaacttgtacatttgacctcttgttatcagccatggtactctacttcgtgtgcaagagataactatgaaagccaaattcaaatactggcaacatttcctaaaggggctcaatatctatcattcgtcttcttttccaaactacacatcactgtatgactcaaccagtagcagttatattgccccttggtttttattcagtttaactactgtttccaagataaatgagctaataagctttaaaaaaaaaaaaaaaaaggctgaattcttttttcttcatcactggcatatctgcctattctccagaattattatgactattcagctcactttaacagttgaacttcaagcgacaatctttgaacaccccttctcatgtgatttaaaatgaaaccatttggaaaagtttcttctagccagtaatagattttttttttaattgctctgccttgtgccgagagatgttcttttaagatgaatcttttgatgtctgataccaccaaatataggtggtagggagagttggaggctggccctttgagcaggccattagcttacttgctgggcatttccgatagcttattgcctacctttttgctggaaacaaactgatttgaaaaacaaaatctatgaagactgcagctaaggattttatcggtagacttaagagcttttgtccttgtggatattttagtggaaccacatcagtctcaatactgtcattttacactgactcagagcagctgacttcattccttgccatgatatatatttaaggcaggcattgtaacagacataaagacaacttatctgtttcagcaggaaggattcagtttatgaactctcagaccagatcatgttgaacaaggagactttgatgtgtgtcatgagaaaactcattctttacttcccagtcaatttaaaggccagctatcctgagctactcgaatgaatgcactggttaaacattggaaatagtttgtttatatccttgtctctctctaggccaattgtgattacatgactcgactctacatctcgtcaaacaaggcctaggtctggttgctgtagactgctcgccctcaacaaataaaatctggttgactagcctccttgtatatacaactattatttgttaagaagaaattatcgtcaattttctactaccttccaattgtcagctctttttttcctctctggtttttcctatactttacagaaaaagacattgatctatactgccattccctctaatcctgccatactcagtcaaaaggaatgacttaagatgaagatgatcatctgctcgagtctaaaatatacattgtatataagaattggtgattagaaaagcaaaaaacctaaaacttaaatctaggagtctgtatactgtctccatgtctccatgcctcagatctcatctaaatctttgaacagcaccattcaaccaatctgaggccttgacttgcttgtaagatgattctcagagatcggctgagttaaaaaagatgacgacttgattaccaaagaaagtagggccaactttgacaaatctggctctgctgaccctgtcactcccagatgtagcatagactcctaaacagaacctcaagtctgattgaggataaggccttctcctgagctgaaagttctttggcagatgagcaagaaactgaaagctgatgtacctgactggctctgtaagatcagaaaactgtatccagaataagccctatggattaacccctgagtacccagagtaaaaactaatttacagaacttccttattgatctgctggttcttccagatcatattctggctattggtatggctggcctttctgaaggtaccctgcttgtctattttcctgactcagctcttgcctgcctttttcacatgttgctgcaattagactcaccgtgaggactacagtcaatttcagtctatcttgtgcccaatacaacaaggatttttaatagtaacaacccacacctcacccactaggactcaatgttcacaacaggaaggaccattgctgcatactccttgaccagcaacttttttgaagatatttttaagtgcagagtaggcctctattcctgtatgtaattgttcattttcagcacctggaacctcatctatcgggtctggaaggaatacagcagttcgaaagccgcgtccatttctctccttcagtagtgcagaaatgagtccgattcaccagtacacacagaactgtaccagttcaacctagcaaaagaagaaaagtttccactgtacttaaaatttacagctgactcaaattgcctcacagaattatttgatgtagaaggctagttgtcttacttcagatcagcaggacagttgggctctcagactcatgaccactgagtttgcttgtgttgaaactgtggtttcatccaacatatgctattggacatgattattattccattcaaatggattacagacttcttgaggacaggacaaacttatctctcatggtgtttttttagaatacttttataaccaaggaagaaaccatgccagctgttaccattcaacttcttaagcagagattaagctttttcatatctgttcttatcctggacatcagtagtttttaattgcccagcatccgttccatcttgtaacaactccctgatgtttcttaaaaccacctcttcctattttcagtctgtggtttggacagtctgacccaaccttgagctttgtgggtgaacatgtaattcagacctcatcaatcagcaaatccatctgaactgtggaggagaagctctctttactgagggtgctttagctttgtaggatgaaaacctcaaactaacagggcctaccatgtagagaatgaagccagtgcaggggaaagcagagccaaaatatggagagacttgaatcctgatgacagcgtttgtgcccctggatccaaccgtgcctgaagctagaatatcccctggacttttcagttatgtgaaccaataaatacccttttttgcttaa

SEQ ID NO: 309563 - DNA, 7754 bp, Homo sapiens
gcgcaagttgcagcttcaccacctcccaagtgaaaaagctcctaggcactcacgatttcttttttcaaagccggaccaaacccagttcagggtggtggtcagattacctcacacttggcccacataaacacctcacaaatgacccgcccacagcacctcgggcaggccgcgccccgcccccacgtccctcagacaacagcctcagcctcccaggcccttcccgggcctcggtcccgtggccgcctccccacgaagaggagctactcccggcttccaaggaccggatcgagggcagtggcgagcgcaccacctgaccgggcactacccggatctcacaactgcctttgtccctccccgcggaattggaacccaacagccgcagagcgctcttggaaccatgtgctgctgccgcctccgccgccgccgccgctgcctccgccgccgcccgcgcgccgcccgcgcgccgcgctagttgagatggtgacaggattcagcaacacgaaattcggcgtttagagctgctctgccgccgccgtcacagacaccacagccaccgctttgtctccgatagtgcacacagccccggccacctcgcacactccccgacgccccaagcccccgaggcctccgcggagcattcagccaatcacaaagctgcagctcctcccgcccccgccctgatgtacagcctcctgattggcgggctgcgtgtccccatgtgaccggatcttggttggccggtcccgcccctgtcacgtgacagcgtgcgcctctcttcctgctttcctgaccctctccgccatttaaagaaacagtaccgggggcgggccgagcgacgcagccgggacggtagctgcggtgcggaccggaggagccatcttgtctcgtcgccggggagtcaggcccctaaatcgaagaagccctggcgcgccctccccccctcccgggtctggtagggcgaaggaacgggcgtgcggtcgatcgagcgatcggttggcggctctttctcctgctctggcatccagctcttggggcgcaggcccggccgccgcggcgcgcgcccggtggccgttggcgctcgcgccgcgtctttcttctcgtacgcagaactcgggcggcggcctatgcgtttgcgattcgacgaggagtcgtccgggtggtcggcggcggcgggcagctgctccgccccgctccgggggaggcggcggcggcagcggccgcgggatttggagcggccggggaggcgggggtggccggggccggcttggaggcctggcgccacccttcggggcctgcaaggacccagttgggggggcaggagggggccggaggatggttggttgtgggatttctactttgccttttcctccttatgccgccttagtgaggggcgggagctctggcggcagccccggggtggggagacgagctccggagtcggaagagctgggttttcttccgggcctagccaccagttggcggagtgaccttaggcgagtcactctgtaatttgtctgcgcctcagtttcctcctctgcctatcaatgtgtgtggggttgaaatcgctttgtaaactataaagcgtgggtgtacgtaaaggatggttattgtttataattttttttgagttgtaagaaaacttagcagttccccaatccttgggttttgaacctgggaaccttggattggagttggggatccccaaacttcctgaaattgtgggaatgtgcggtttgggggaatgatgggaatttgtgggaatgtgcgttttaggggaatgatgatccatcgctagcaagttttccaagggggctgtgacccagaagagttaagaatcacaatttcttcatgctacagagaggaaactgaggcctagatgtcatttgggacccttcacaaccattttgaagccctgtttgagtccctgggatatgtgagctgtttctatgcataatggatattcggggttaacaacagtcccctgcttggcttctattctgaatccttttctttcaccatggggtgcctgaagggtggctgatgcatatggtacaatggcacccagtgtaaagcagctacaattaggagtggatgtgttctgtagcatcctatttaaataagcctattttatcctttggcccgtcaactctgttatctgctgcttgtactggtgcctgtacttttctgactctcattgaccatattccacgaccatggttgtcatccattacttgatcctactttacatgtctagtctgtgtggttggtggtgaataggcttctttttacatggtgctgccagcccagctaattaatggtgcacgtggacttttagcaagcgggctcactggaagagactgaacctggcatggaattcctgaagatgtttggggttttttttctttcttaatcgaaagttaacattgtctgaaaagttttgttagaactactgcggaacctcaaaatcagtagatttggaagtgattcaaagctaaactttttccttggccctccttgtgttctaattgcttgcaagtgtaatactaggatgtccaagatgccagtttttgcttctttgttagttgtcagctgcttttatcaaatttcaggccattatccaacaaacactataaaaatgtttgaacaattggatttcaaacattttcgttttgtggagtggtgctcaccaagtggtacagccctaagcaagtgaacacaaacacatttaagtgtattttgtctgattagatgttagccagttatgctatttcattcaaatgtctgaaaaaatcaattgactattcccttttcctaaagggcagagacagataatctcacttccagagaaatgacttggagaaaaaaaagtgttggtctttttgctcttttgtaattaaatccggatgtacctcaaaagacttaagactgtggtgataagatgctttcctcagcagaaaggagggaaaaaaaacaactggaactcaaagcttgaaattctgtggcaaaacatgagatgtccaggattggaggttgaaaagatttcactacagtgttctgcaatagttggagcagataactttcagtgtagccacagccatggactccagatttccagattttcaagacctggacctggaacccgaaagagcttgtcacgatgcggcaggaacactggaggtagatttttttttatttttgaattttgggactgttgaccttgctgtgagaaaagagacaacgactgagcaagcactaccaccagcactgttactgggaattagaagacctgagtttctgtccagaccctcagtgcaaactgaggatgctccatccaaagtgaattatgtcctgtgcctcctgattgctgagtgttcacctggaccttctgactaccttccctgtgctattccatcagcctacagacctggtacctggatttttgcccgagatgattcctaccaccttactactgacgaagacacccattccagtggaccactgtgacccaggaggcattcagccatcatgatgtggcctttacctccactcctgtcttgttctacccagattcagcacagccctttatagtgaagtcagagtcctcaagccaaatagctaaagctgttttatcacaacaaaggcctagtttgttccatgagtgtgcatttcatttcttcagttaaagccttcagagacacacaataaatttggaccaggggattttttagttattaatgctctctgaagaaaggcaacatctttttgagagcagcattggaccacaccccacaatctcaaatgattgaaattcatgaacatctaggatcccatgaaggtcactggaccctgttttttctacttcaaatcctgtagtagcctactgaatgagaaaacatattctgacccattgggatcaaatcaaaggcacagtgaactcctcatagcatcttctttggaattactcaggaaccagaactttttacacaaatgtaagaaattctaccaaggagtccccttacctaacagcatctcacaaggctgcaccagattccagaaaaggcttctcttgatacatcaagcattttgtgaccgacttattcttagatcattggttttccaaaggctttgtggccatgaagccctttgagtgaaaactgtgcagaagcccagagtaaaagtgaagctgctctggatgaagtagtgaagcaagagtaggggcctgaatcctgctacaactatcttcctttaccaccgtggtgacacctaaggggacttccttacaacaccttgaactcttccgaacacagtttgaaaaccactgccccagacagcaatatgtttgacctgaatggcattccaatcttttctgtacctccactcagcacagttcatgttcagtagatgctgaacattcttagaaatactgtgtgtgaacttagaaaagtgcaagaagacaggcatgtctttgaccccaggaatgatcatttgctgaagatggtgtcaagtgaacctagattaacagccctccactccagatggatatccagtgattcctagaatgggatatagccagagaacaattctatgcaccctacactgacagactcccttaagcaacaccagatgctctactggtacttgaagtacatgactttgaagtcttgaccctccatgaatacctgaattatcagcaagcgggttttgaagctggtgcctcattgaggccatattagagcaacttgtacatttgacctcttgttatcagccatggtactctacttcgtgtgcaagagataactatgaaagccaaattcaaatactggcaacatttcctaaaggggctcaatatctatcattcgtcttcttttccaaactacacatcactgtatgactcaaccagtagcagttatattgccccttggtttttattcagtttaactactgtttccaagataaatgagctaataagctttaaaaaaaaaaaaaaaaaggctgaattcttttttcttcatcactggcatatctgcctattctccagaattattatgactattcagctcactttaacagttgaacttcaagcgacaatctttgaacaccccttctcatgtgatttaaaatgaaaccatttggaaaagtttcttctagccagtaatagattttttttttaattgctctgccttgtgccgagagatgttcttttaagatgaatcttttgatgtctgataccaccaaatataggtggtagggagagttggaggctggccctttgagcaggccattagcttacttgctgggcatttccgatagcttattgcctacctttttgctggaaacaaactgatttgaaaaacaaaatctatgaagactgcagctaaggattttatcggtagacttaagagcttttgtccttgtggatattttagtggaaccacatcagtctcaatactgtcattttacactgactcagagcagctgacttcattccttgccatgatatatatttaaggcaggcattgtaacagacataaagacaacttatctgtttcagcaggaaggattcagtttatgaactctcagaccagatcatgttgaacaaggagactttgatgtgtgtcatgagaaaactcattctttacttcccagtcaatttaaaggccagctatcctgagctactcgaatgaatgcactggttaaacattggaaatagtttgtttatatccttgtctctctctaggccaattgtgattacatgactcgactctacatctcgtcaaacaaggcctaggtctggttgctgtagactgctcgccctcaacaaataaaatctggttgactagcctccttgtatatacaactattatttgttaagaagaaattatcgtcaattttctactaccttccaattgtcagctctttttttcctctctggtttttcctatactttacagaaaaagacattgatctatactgccattccctctaatcctgccatactcagtcaaaaggaatgacttaagatgaagatgatcatctgctcgagtctaaaatatacattgtatataagaattggtgattagaaaagcaaaaaacctaaaacttaaatctaggagtctgtatactgtctccatgtctccatgcctcagatctcatctaaatctttgaacagcaccattcaaccaatctgaggccttgacttgcttgtaagatgattctcagagatcggctgagttaaaaaagatgacgacttgattaccaaagaaagtagggccaactttgacaaatctggctctgctgaccctgtcactcccagatgtagcatagactcctaaacagaacctcaagtctgattgaggataaggccttctcctgagctgaaagttctttggcagatgagcaagaaactgaaagctgatgtacctgactggctctgtaagatcagaaaactgtatccagaataagccctatggattaacccctgagtacccagagtaaaaactaatttacagaacttccttattgatctgctggttcttccagatcatattctggctattggtatggctggcctttctgaaggtaccctgcttgtctattttcctgactcagctcttgcctgcctttttcacatgttgctgcaattagactcaccgtgaggactacagtcaatttcagtctatcttgtgcccaatacaacaaggatttttaatagtaacaacccacacctcacccactaggactcaatgttcacaacaggaaggaccattgctgcatactccttgaccagcaacttttttgaagatatttttaagtgcagagtaggcctctattcctgtatgtaattgttcattttcagcacctggaacctcatctatcgggtctggaaggaatacagcagttcgaaagccgcgtccatttctctccttcagtagtgcagaaatgagtccgattcaccagtacacacagaactgtaccagttcaacctagcaaaagaagaaaagtttccactgtacttaaaatttacagctgactcaaattgcctcacagaattatttgatgtagaaggctagttgtcttacttcagatcagcaggacagttgggctctcagactcatgaccactgagtttgcttgtgttgaaactgtggtttcatccaacatatgctattggacatgattattattccattcaaatggattacagacttcttgaggacaggacaaacttatctctcatggtgtttttttagaatacttttataaccaaggaagaaaccatgccagctgttaccattcaacttcttaagcagagattaagctttttcatatctgttcttatcctggacatcagtagtttttaattgcccagcatccgttccatcttgtaacaactccctgatgtttcttaaaaccacctcttcctattttcagtctgtggtttggacagtctgacccaaccttgagctttgtgggtgaacatgtaattcagacctcatcaatcagcaaatccatctgaactgtggaggagaagctctctttactgagggtgctttagctttgtaggatgaaaacctcaaactaacagggcctaccatgtagagaatgaagccagtgcaggggaaagcagagccaaaatatggagagacttgaatcctgatgacagcgtttgtgcccctggatccaaccgtgcctgaagctagaatatcccctggacttttcagttatgtgaaccaataaatacccttttttgcttaa

SEQ ID NO: 309564 - DNA, 7685 bp, Homo sapiens
gcgcaagttgcagcttcaccacctcccaagtgaaaaagctcctaggcactcacgatttcttttttcaaagccggaccaaacccagttcagggtggtggtcagattacctcacacttggcccacataaacacctcacaaatgacccgcccacagcacctcgggcaggccgcgccccgcccccacgtccctcagacaacagcctcagcctcccaggcccttcccgggcctcggtcccgtggccgcctccccacgaagaggagctactcccggcttccaaggaccggatcgagggcagtggcgagcgcaccacctgaccgggcactacccggatctcacaactgcctttgtccctccccgcggaattggaacccaacagccgcagagcgctcttggaaccatgtgctgctgccgcctccgccgccgccgccgctgcctccgccgccgcccgcgcgccgcccgcgcgccgcgctagttgagatggtgacaggattcagcaacacgaaattcggcgtttagagctgctctgccgccgccgtcacagacaccacagccaccgctttgtctccgatagtgcacacagccccggccacctcgcacactccccgacgccccaagcccccgaggcctccgcggagcattcagccaatcacaaagctgcagctcctcccgcccccgccctgatgtacagcctcctgattggcgggctgcgtgtccccatgtgaccggatcttggttggccggtcccgcccctgtcacgtgacagcgtgcgcctctcttcctgctttcctgaccctctccgccatttaaagaaacagtaccgggggcgggccgagcgacgcagccgggacggtagctgcggtgcggaccggaggagccatcttgtctcgtcgccggggagtcaggcccctaaatcgaagaagccctggcgcgccctccccccctcccgggtctggtagggcgaaggaacgggcgtgcggtcgatcgagcgatcggttggcggctctttctcctgctctggcatccagctcttggggcgcaggcccggccgccgcggcgcgcgcccggtggccgttggcgctcgcgccgcgtctttcttctcgtacgcagaactcgggcggcggcctatgcgtttgcgattcgacgaggagtcgtccgggtggtcggcggcggcgggcagctgctccgccccgctccgggggaggcggcggcggcagcggccgcgggatttggagcggccggggaggcgggggtggccggggccggcttggaggcctggcgccacccttcggggcctgcaaggacccagttgggggggcaggagggggccggaggatggttggttgtgggatttctactttgccttttcctccttatgccgccttagtgaggggcgggagctctggcggcagccccggggtggggagacgagctccggagtcggaagagctgggttttcttccgggcctagccaccagttggcggagtgaccttaggcgagtcactctgtaatttgtctgcgcctcagtttcctcctctgcctatcaatgtgtgtggggttgaaatcgctttgtaaactataaagcgtgggtgtacgtaaaggatggttattgtttataattttttttgagttgtaagaaaacttagcagttccccaatccttgggttttgaacctgggaaccttggattggagttggggatccccaaacttcctgaaattgtgggaatgtgcggtttgggggaatgatgggaatttgtgggaatgtgcgttttaggggaatgatgatccatcgctagcaagttttccaagggggctgtgacccagaagagttaagaatcacaatttcttcatgctacagagaggaaactgaggcctagatgtcatttgggacccttcacaaccattttgaagccctgtttgagtccctgggatatgtgagctgtttctatgcataatggatattcggggttaacaacagtcccctgcttggcttctattctgaatccttttctttcaccatggggtgcctgaagggtggctgatgcatatggtacaatggcacccagtgtaaagcagctacaattaggagtggatgtgttctgtagcatcctatttaaataagcctattttatcctttggcccgtcaactctgttatctgctgcttgtactggtgcctgtacttttctgactctcattgaccatattccacgaccatggttgtcatccattacttgatcctactttacatgtctagtctgtgtggttggtggtgaataggcttctttttacatggtgctgccagcccagctaattaatggtgcacgtggacttttagcaagcgggctcactggaagagactgaacctggcatggaattcctgaagatgtttggggttttttttctttcttaatcgaaagttaacattgtctgaaaagttttgttagaactactgcggaacctcaaaatcagtagatttggaagtgattcaaagctaaactttttccttggccctccttgtgttctaattgcttgcaagtgtaatactaggatgtccaagatgccagtttttgcttctttgttagttgtcagctgcttttatcaaatttcaggccattatccaacaaacactataaaaatgtttgaacaattggatttcaaacattttcgttttgtggagtggtgctcaccaagtggtacagccctaagcaagtgaacacaaacacatttaagtgtattttgtctgattagatgttagccagttatgctatttcattcaaatgtctgaaaaaatcaattgactattcccttttcctaaagggcagagacagataatctcacttccagagaaatgacttggagaaaaaaaagtgttggtctttttgctcttttgtaattaaatccggatgtacctcaaaagacttaagactgtggtgataagatgctttcctcagcagaaaggagggaaaaaaaacaactggaactcaaagcttgaaattctgtggcaaaacatgagatgtccaggattggaggttgaaaagatttcactacagtgttctgcaatagttggagcagataactttcagtgtagccacagccatggactccagatttccagattttcaagacctggacctggaacccgaaagagcttgtcacgatgcggcaggaacactggaggtagatttttttttatttttgaattttgggactgttgaccttgctgtgagaaaagagacaacgactgagcaagcactaccaccagcactgttactgggaattagaagacctgagtttctgtccagaccctcagtgcaaactgaggatgctccatccaaagtgaattatgcctacagacctggtacctggatttttgcccgagatgattcctaccaccttactactgacgaagacacccattccagtggaccactgtgacccaggaggcattcagccatcatgatgtggcctttacctccactcctgtcttgttctacccagattcagcacagccctttatagtgaagtcagagtcctcaagccaaatagctaaagctgttttatcacaacaaaggcctagtttgttccatgagtgtgcatttcatttcttcagttaaagccttcagagacacacaataaatttggaccaggggattttttagttattaatgctctctgaagaaaggcaacatctttttgagagcagcattggaccacaccccacaatctcaaatgattgaaattcatgaacatctaggatcccatgaaggtcactggaccctgttttttctacttcaaatcctgtagtagcctactgaatgagaaaacatattctgacccattgggatcaaatcaaaggcacagtgaactcctcatagcatcttctttggaattactcaggaaccagaactttttacacaaatgtaagaaattctaccaaggagtccccttacctaacagcatctcacaaggctgcaccagattccagaaaaggcttctcttgatacatcaagcattttgtgaccgacttattcttagatcattggttttccaaaggctttgtggccatgaagccctttgagtgaaaactgtgcagaagcccagagtaaaagtgaagctgctctggatgaagtagtgaagcaagagtaggggcctgaatcctgctacaactatcttcctttaccaccgtggtgacacctaaggggacttccttacaacaccttgaactcttccgaacacagtttgaaaaccactgccccagacagcaatatgtttgacctgaatggcattccaatcttttctgtacctccactcagcacagttcatgttcagtagatgctgaacattcttagaaatactgtgtgtgaacttagaaaagtgcaagaagacaggcatgtctttgaccccaggaatgatcatttgctgaagatggtgtcaagtgaacctagattaacagccctccactccagatggatatccagtgattcctagaatgggatatagccagagaacaattctatgcaccctacactgacagactcccttaagcaacaccagatgctctactggtacttgaagtacatgactttgaagtcttgaccctccatgaatacctgaattatcagcaagcgggttttgaagctggtgcctcattgaggccatattagagcaacttgtacatttgacctcttgttatcagccatggtactctacttcgtgtgcaagagataactatgaaagccaaattcaaatactggcaacatttcctaaaggggctcaatatctatcattcgtcttcttttccaaactacacatcactgtatgactcaaccagtagcagttatattgccccttggtttttattcagtttaactactgtttccaagataaatgagctaataagctttaaaaaaaaaaaaaaaaaggctgaattcttttttcttcatcactggcatatctgcctattctccagaattattatgactattcagctcactttaacagttgaacttcaagcgacaatctttgaacaccccttctcatgtgatttaaaatgaaaccatttggaaaagtttcttctagccagtaatagattttttttttaattgctctgccttgtgccgagagatgttcttttaagatgaatcttttgatgtctgataccaccaaatataggtggtagggagagttggaggctggccctttgagcaggccattagcttacttgctgggcatttccgatagcttattgcctacctttttgctggaaacaaactgatttgaaaaacaaaatctatgaagactgcagctaaggattttatcggtagacttaagagcttttgtccttgtggatattttagtggaaccacatcagtctcaatactgtcattttacactgactcagagcagctgacttcattccttgccatgatatatatttaaggcaggcattgtaacagacataaagacaacttatctgtttcagcaggaaggattcagtttatgaactctcagaccagatcatgttgaacaaggagactttgatgtgtgtcatgagaaaactcattctttacttcccagtcaatttaaaggccagctatcctgagctactcgaatgaatgcactggttaaacattggaaatagtttgtttatatccttgtctctctctaggccaattgtgattacatgactcgactctacatctcgtcaaacaaggcctaggtctggttgctgtagactgctcgccctcaacaaataaaatctggttgactagcctccttgtatatacaactattatttgttaagaagaaattatcgtcaattttctactaccttccaattgtcagctctttttttcctctctggtttttcctatactttacagaaaaagacattgatctatactgccattccctctaatcctgccatactcagtcaaaaggaatgacttaagatgaagatgatcatctgctcgagtctaaaatatacattgtatataagaattggtgattagaaaagcaaaaaacctaaaacttaaatctaggagtctgtatactgtctccatgtctccatgcctcagatctcatctaaatctttgaacagcaccattcaaccaatctgaggccttgacttgcttgtaagatgattctcagagatcggctgagttaaaaaagatgacgacttgattaccaaagaaagtagggccaactttgacaaatctggctctgctgaccctgtcactcccagatgtagcatagactcctaaacagaacctcaagtctgattgaggataaggccttctcctgagctgaaagttctttggcagatgagcaagaaactgaaagctgatgtacctgactggctctgtaagatcagaaaactgtatccagaataagccctatggattaacccctgagtacccagagtaaaaactaatttacagaacttccttattgatctgctggttcttccagatcatattctggctattggtatggctggcctttctgaaggtaccctgcttgtctattttcctgactcagctcttgcctgcctttttcacatgttgctgcaattagactcaccgtgaggactacagtcaatttcagtctatcttgtgcccaatacaacaaggatttttaatagtaacaacccacacctcacccactaggactcaatgttcacaacaggaaggaccattgctgcatactccttgaccagcaacttttttgaagatatttttaagtgcagagtaggcctctattcctgtatgtaattgttcattttcagcacctggaacctcatctatcgggtctggaaggaatacagcagttcgaaagccgcgtccatttctctccttcagtagtgcagaaatgagtccgattcaccagtacacacagaactgtaccagttcaacctagcaaaagaagaaaagtttccactgtacttaaaatttacagctgactcaaattgcctcacagaattatttgatgtagaaggctagttgtcttacttcagatcagcaggacagttgggctctcagactcatgaccactgagtttgcttgtgttgaaactgtggtttcatccaacatatgctattggacatgattattattccattcaaatggattacagacttcttgaggacaggacaaacttatctctcatggtgtttttttagaatacttttataaccaaggaagaaaccatgccagctgttaccattcaacttcttaagcagagattaagctttttcatatctgttcttatcctggacatcagtagtttttaattgcccagcatccgttccatcttgtaacaactccctgatgtttcttaaaaccacctcttcctattttcagtctgtggtttggacagtctgacccaaccttgagctttgtgggtgaacatgtaattcagacctcatcaatcagcaaatccatctgaactgtggaggagaagctctctttactgagggtgctttagctttgtaggatgaaaacctcaaactaacagggcctaccatgtagagaatgaagccagtgcaggggaaagcagagccaaaatatggagagacttgaatcctgatgacagcgtttgtgcccctggatccaaccgtgcctgaagctagaatatcccctggacttttcagttatgtgaaccaataaatacccttttttgcttaa

SEQ ID NO: 309565 - DNA, 8025 bp, Homo sapiens
gcgcaagttgcagcttcaccacctcccaagtgaaaaagctcctaggcactcacgatttcttttttcaaagccggaccaaacccagttcagggtggtggtcagattacctcacacttggcccacataaacacctcacaaatgacccgcccacagcacctcgggcaggccgcgccccgcccccacgtccctcagacaacagcctcagcctcccaggcccttcccgggcctcggtcccgtggccgcctccccacgaagaggagctactcccggcttccaaggaccggatcgagggcagtggcgagcgcaccacctgaccgggcactacccggatctcacaactgcctttgtccctccccgcggaattggaacccaacagccgcagagcgctcttggaaccatgtgctgctgccgcctccgccgccgccgccgctgcctccgccgccgcccgcgcgccgcccgcgcgccgcgctagttgagatggtgacaggattcagcaacacgaaattcggcgtttagagctgctctgccgccgccgtcacagacaccacagccaccgctttgtctccgatagtgcacacagccccggccacctcgcacactccccgacgccccaagcccccgaggcctccgcggagcattcagccaatcacaaagctgcagctcctcccgcccccgccctgatgtacagcctcctgattggcgggctgcgtgtccccatgtgaccggatcttggttggccggtcccgcccctgtcacgtgacagcgtgcgcctctcttcctgctttcctgaccctctccgccatttaaagaaacagtaccgggggcgggccgagcgacgcagccgggacggtagctgcggtgcggaccggaggagccatcttgtctcgtcgccggggagtcaggcccctaaatcgaagaagccctggcgcgccctccccccctcccgggtctggtagggcgaaggaacgggcgtgcggtcgatcgagcgatcggttggcggctctttctcctgctctggcatccagctcttggggcgcaggcccggccgccgcggcgcgcgcccggtggccgttggcgctcgcgccgcgtctttcttctcgtacgcagaactcgggcggcggcctatgcgtttgcgattcgacgaggagtcgtccgggtggtcggcggcggcgggcagctgctccgccccgctccgggggaggcggcggcggcagcggccgcgggatttggagcggccggggaggcgggggtggccggggccggcttggaggcctggcgccacccttcggggcctgcaaggacccagttgggggggcaggagggggccggaggatggttggttgtgggatttctactttgccttttcctccttatgccgccttagtgaggggcgggagctctggcggcagccccggggtggggagacgagctccggagtcggaagagctgggttttcttccgggcctagccaccagttggcggagtgaccttaggcgagtcactctgtaatttgtctgcgcctcagtttcctcctctgcctatcaatgtgtgtggggttgaaatcgctttgtaaactataaagcgtgggtgtacgtaaaggatggttattgtttataattttttttgagttgtaagaaaacttagcagttccccaatccttgggttttgaacctgggaaccttggattggagttggggatccccaaacttcctgaaattgtgggaatgtgcggtttgggggaatgatgggaatttgtgggaatgtgcgttttaggggaatgatgatccatcgctagcaagttttccaagggggctgtgacccagaagagttaagaatcacaatttcttcatgctacagagaggaaactgaggcctagatgtcatttgggacccttcacaaccattttgaagccctgtttgagtccctgggatatgtgagctgtttctatgcataatggatattcggggttaacaacagtcccctgcttggcttctattctgaatccttttctttcaccatggggtgcctgaagggtggctgatgcatatggtacaatggcacccagtgtaaagcagctacaattaggagtggatgtgttctgtagcatcctatttaaataagcctattttatcctttggcccgtcaactctgttatctgctgcttgtactggtgcctgtacttttctgactctcattgaccatattccacgaccatggttgtcatccattacttgatcctactttacatgtctagtctgtgtggttggtggtgaataggcttctttttacatggtgctgccagcccagctaattaatggtgcacgtggacttttagcaagcgggctcactggaagagactgaacctggcatggaattcctgaagatgtttggggttttttttctttcttaatcgaaagttaacattgtctgaaaagttttgttagaactactgcggaacctcaaaatcagtagatttggaagtgattcaaagctaaactttttccttggccctccttgtgttctaattgcttgcaagtgtaatactaggatgtccaagatgccagtttttgcttctttgttagttgtcagctgcttttatcaaatttcaggccattatccaacaaacactataaaaatgtttgaacaattggatttcaaacattttcgttttgtggagtggtgctcaccaagtggtacagccctaagcaagtgaacacaaacacatttaagtgtattttgtctgattagatgttagccagttatgctatttcattcaaatgtctgaaaaaatcaattgactattcccttttcctaaagggcagagacagataatctcacttccagagaaatgacttggagaaaaaaaagtgttggtctttttgctcttttgtaattaaatccggatgtacctcaaaagacttaagactgtggtgataagatgctttcctcagcagaaaggagggaaaaaaaacaactggaactcaaagcttgaaattctgtggcaaaacatgagatgtccaggattggaggttgaaaagatttcactacagtgttctgcaatagttggagcagataactttcagtgtagccacagccatggactccagatttccagattttcaagacctggacctggaacccgaaagagcttgtcacgatgcggcaggaacactggaggtagatttttttttatttttgaattttgggactgttgaccttgctgtgagaaaagagacaacgactgagcaagcactaccaccagcactgttactgggaattagaagacctgagtttctgtccagaccctcagtgcaaactgaggatgctccatccaaagtgaattatggtacttgccattttccaaaatgccttatcctttaccatctctgcacttttgttcatactctcattctactttggaactgctgctctgtggcttttcatctgtcaaaactgccattttctcagtatccaactcttatgccctcttttccatgagtctcctaactagccagaatagagctttaaagttttatgacatttcgttatgtatcctctatctgtatacaaaatcctgtaaaatagttacttgcctgcatttactgtctttgcagatagcagactccttgaaagcagggtccttgtttagtgcatctttgcccacatacaccacaacttatcaagatgcatttattaggaaggaggagtttagagagcaggctatcagaataaccacttcacctacagacctggtacctggatttttgcccgagatgattcctaccaccttactactgacgaagacacccattccagtggaccactgtgacccaggaggcattcagccatcatgatgtggcctttacctccactcctgtcttgttctacccagattcagcacagccctttatagtgaagtcagagtcctcaagccaaatagctaaagctgttttatcacaacaaaggcctagtttgttccatgagtgtgcatttcatttcttcagttaaagccttcagagacacacaataaatttggaccaggggattttttagttattaatgctctctgaagaaaggcaacatctttttgagagcagcattggaccacaccccacaatctcaaatgattgaaattcatgaacatctaggatcccatgaaggtcactggaccctgttttttctacttcaaatcctgtagtagcctactgaatgagaaaacatattctgacccattgggatcaaatcaaaggcacagtgaactcctcatagcatcttctttggaattactcaggaaccagaactttttacacaaatgtaagaaattctaccaaggagtccccttacctaacagcatctcacaaggctgcaccagattccagaaaaggcttctcttgatacatcaagcattttgtgaccgacttattcttagatcattggttttccaaaggctttgtggccatgaagccctttgagtgaaaactgtgcagaagcccagagtaaaagtgaagctgctctggatgaagtagtgaagcaagagtaggggcctgaatcctgctacaactatcttcctttaccaccgtggtgacacctaaggggacttccttacaacaccttgaactcttccgaacacagtttgaaaaccactgccccagacagcaatatgtttgacctgaatggcattccaatcttttctgtacctccactcagcacagttcatgttcagtagatgctgaacattcttagaaatactgtgtgtgaacttagaaaagtgcaagaagacaggcatgtctttgaccccaggaatgatcatttgctgaagatggtgtcaagtgaacctagattaacagccctccactccagatggatatccagtgattcctagaatgggatatagccagagaacaattctatgcaccctacactgacagactcccttaagcaacaccagatgctctactggtacttgaagtacatgactttgaagtcttgaccctccatgaatacctgaattatcagcaagcgggttttgaagctggtgcctcattgaggccatattagagcaacttgtacatttgacctcttgttatcagccatggtactctacttcgtgtgcaagagataactatgaaagccaaattcaaatactggcaacatttcctaaaggggctcaatatctatcattcgtcttcttttccaaactacacatcactgtatgactcaaccagtagcagttatattgccccttggtttttattcagtttaactactgtttccaagataaatgagctaataagctttaaaaaaaaaaaaaaaaaggctgaattcttttttcttcatcactggcatatctgcctattctccagaattattatgactattcagctcactttaacagttgaacttcaagcgacaatctttgaacaccccttctcatgtgatttaaaatgaaaccatttggcgagagatgttcttttaagatgaatcttttgatgtctgataccaccaaatataggtggtagggagagttggaggctggccctttgagcaggccattagcttacttgctgggcatttccgatagcttattgcctacctttttgctggaaacaaactgatttgaaaaacaaaatctatgaagactgcagctaaggattttatcggtagacttaagagcttttgtccttgtggatattttagtggaaccacatcagtctcaatactgtcattttacactgactcagagcagctgacttcattccttgccatgatatatatttaaggcaggcattgtaacagacataaagacaacttatctgtttcagcaggaaggattcagtttatgaactctcagaccagatcatgttgaacaaggagactttgatgtgtgtcatgagaaaactcattctttacttcccagtcaatttaaaggccagctatcctgagctactcgaatgaatgcactggttaaacattggaaatagtttgtttatatccttgtctctctctaggccaattgtgattacatgactcgactctacatctcgtcaaacaaggcctaggtctggttgctgtagactgctcgccctcaacaaataaaatctggttgactagcctccttgtatatacaactattatttgttaagaagaaattatcgtcaattttctactaccttccaattgtcagctctttttttcctctctggtttttcctatactttacagaaaaagacattgatctatactgccattccctctaatcctgccatactcagtcaaaaggaatgacttaagatgaagatgatcatctgctcgagtctaaaatatacattgtatataagaattggtgattagaaaagcaaaaaacctaaaacttaaatctaggagtctgtatactgtctccatgtctccatgcctcagatctcatctaaatctttgaacagcaccattcaaccaatctgaggccttgacttgcttgtaagatgattctcagagatcggctgagttaaaaaagatgacgacttgattaccaaagaaagtagggccaactttgacaaatctggctctgctgaccctgtcactcccagatgtagcatagactcctaaacagaacctcaagtctgattgaggataaggccttctcctgagctgaaagttctttggcagatgagcaagaaactgaaagctgatgtacctgactggctctgtaagatcagaaaactgtatccagaataagccctatggattaacccctgagtacccagagtaaaaactaatttacagaacttccttattgatctgctggttcttccagatcatattctggctattggtatggctggcctttctgaaggtaccctgcttgtctattttcctgactcagctcttgcctgcctttttcacatgttgctgcaattagactcaccgtgaggactacagtcaatttcagtctatcttgtgcccaatacaacaaggatttttaatagtaacaacccacacctcacccactaggactcaatgttcacaacaggaaggaccattgctgcatactccttgaccagcaacttttttgaagatatttttaagtgcagagtaggcctctattcctgtatgtaattgttcattttcagcacctggaacctcatctatcgggtctggaaggaatacagcagttcgaaagccgcgtccatttctctccttcagtagtgcagaaatgagtccgattcaccagtacacacagaactgtaccagttcaacctagcaaaagaagaaaagtttccactgtacttaaaatttacagctgactcaaattgcctcacagaattatttgatgtagaaggctagttgtcttacttcagatcagcaggacagttgggctctcagactcatgaccactgagtttgcttgtgttgaaactgtggtttcatccaacatatgctattggacatgattattattccattcaaatggattacagacttcttgaggacaggacaaacttatctctcatggtgtttttttagaatacttttataaccaaggaagaaaccatgccagctgttaccattcaacttcttaagcagagattaagctttttcatatctgttcttatcctggacatcagtagtttttaattgcccagcatccgttccatcttgtaacaactccctgatgtttcttaaaaccacctcttcctattttcagtctgtggtttggacagtctgacccaaccttgagctttgtgggtgaacatgtaattcagacctcatcaatcagcaaatccatctgaactgtggaggagaagctctctttactgagggtgctttagctttgtaggatgaaaacctcaaactaacagggcctaccatgtagagaatgaagccagtgcaggggaaagcagagccaaaatatggagagacttgaatcctgatgacagcgtttgtgcccctggatccaaccgtgcctgaagctagaatatcccctggacttttcagttatgtgaaccaataaatacccttttttgcttaa

SEQ ID NO: 309566 - DNA, 7585 bp, Homo sapiens
gcgcaagttgcagcttcaccacctcccaagtgaaaaagctcctaggcactcacgatttcttttttcaaagccggaccaaacccagttcagggtggtggtcagattacctcacacttggcccacataaacacctcacaaatgacccgcccacagcacctcgggcaggccgcgccccgcccccacgtccctcagacaacagcctcagcctcccaggcccttcccgggcctcggtcccgtggccgcctccccacgaagaggagctactcccggcttccaaggaccggatcgagggcagtggcgagcgcaccacctgaccgggcactacccggatctcacaactgcctttgtccctccccgcggaattggaacccaacagccgcagagcgctcttggaaccatgtgctgctgccgcctccgccgccgccgccgctgcctccgccgccgcccgcgcgccgcccgcgcgccgcgctagttgagatggtgacaggattcagcaacacgaaattcggcgtttagagctgctctgccgccgccgtcacagacaccacagccaccgctttgtctccgatagtgcacacagccccggccacctcgcacactccccgacgccccaagcccccgaggcctccgcggagcattcagccaatcacaaagctgcagctcctcccgcccccgccctgatgtacagcctcctgattggcgggctgcgtgtccccatgtgaccggatcttggttggccggtcccgcccctgtcacgtgacagcgtgcgcctctcttcctgctttcctgaccctctccgccatttaaagaaacagtaccgggggcgggccgagcgacgcagccgggacggtagctgcggtgcggaccggaggagccatcttgtctcgtcgccggggagtcaggcccctaaatcgaagaagccctggcgcgccctccccccctcccgggtctggtagggcgaaggaacgggcgtgcggtcgatcgagcgatcggttggcggctctttctcctgctctggcatccagctcttggggcgcaggcccggccgccgcggcgcgcgcccggtggccgttggcgctcgcgccgcgtctttcttctcgtacgcagaactcgggcggcggcctatgcgtttgcgattcgacgaggagtcgtccgggtggtcggcggcggcgggcagctgctccgccccgctccgggggaggcggcggcggcagcggccgcgggatttggagcggccggggaggcgggggtggccggggccggcttggaggcctggcgccacccttcggggcctgcaaggacccagttgggggggcaggagggggccggaggatggttggttgtgggatttctactttgccttttcctccttatgccgccttagtgaggggcgggagctctggcggcagccccggggtggggagacgagctccggagtcggaagagctgggttttcttccgggcctagccaccagttggcggagtgaccttaggcgagtcactctgtaatttgtctgcgcctcagtttcctcctctgcctatcaatgtgtgtggggttgaaatcgctttgtaaactataaagcgtgggtgtacgtaaaggatggttattgtttataattttttttgagttgtaagaaaacttagcagttccccaatccttgggttttgaacctgggaaccttggattggagttggggatccccaaacttcctgaaattgtgggaatgtgcggtttgggggaatgatgggaatttgtgggaatgtgcgttttaggggaatgatgatccatcgctagcaagttttccaagggggctgtgacccagaagagttaagaatcacaatttcttcatgctacagagaggaaactgaggcctagatgtcatttgggacccttcacaaccattttgaagccctgtttgagtccctgggatatgtgagctgtttctatgcataatggatattcggggttaacaacagtcccctgcttggcttctattctgaatccttttctttcaccatggggtgcctgaagggtggctgatgcatatggtacaatggcacccagtgtaaagcagctacaattaggagtggatgtgttctgtagcatcctatttaaataagcctattttatcctttggcccgtcaactctgttatctgctgcttgtactggtgcctgtacttttctgactctcattgaccatattccacgaccatggttgtcatccattacttgatcctactttacatgtctagtctgtgtggttggtggtgaataggcttctttttacatggtgctgccagcccagctaattaatggtgcacgtggacttttagcaagcgggctcactggaagagactgaacctggcatggaattcctgaagatgtttggggttttttttctttcttaatcgaaagttaacattgtctgaaaagttttgttagaactactgcggaacctcaaaatcagtagatttggaagtgattcaaagctaaactttttccttggccctccttgtgttctaattgcttgcaagtgtaatactaggatgtccaagatgccagtttttgcttctttgttagttgtcagctgcttttatcaaatttcaggccattatccaacaaacactataaaaatgtttgaacaattggatttcaaacattttcgttttgtggagtggtgctcaccaagtggtacagccctaagcaagtgaacacaaacacatttaagtgtattttgtctgattagatgttagccagttatgctatttcattcaaatgtctgaaaaaatcaattgactattcccttttcctaaagggcagagacagataatctcacttccagagaaatgacttggagaaaaaaaagtgttggtctttttgctcttttgtaattaaatccggatgtacctcaaaagacttaagactgtggtgataagatgctttcctcagcagaaaggagggaaaaaaaacaactggaactcaaagcttgaaattctgtggcaaaacatgagatgtccaggattggaggttgaaaagatttcactacagtgttctgcaatagttggagcagataactttcagtgtagccacagccatggactccagatttccagattttcaagacctggacctggaacccgaaagagcttgtcacgatgcggcaggaacactggagtcctgtgcctcctgattgctgagtgttcacctggaccttctgactaccttccctgtgctattccatcagcctacagacctggtacctggatttttgcccgagatgattcctaccaccttactactgacgaagacacccattccagtggaccactgtgacccaggaggcattcagccatcatgatgtggcctttacctccactcctgtcttgttctacccagattcagcacagccctttatagtgaagtcagagtcctcaagccaaatagctaaagctgttttatcacaacaaaggcctagtttgttccatgagtgtgcatttcatttcttcagttaaagccttcagagacacacaataaatttggaccaggggattttttagttattaatgctctctgaagaaaggcaacatctttttgagagcagcattggaccacaccccacaatctcaaatgattgaaattcatgaacatctaggatcccatgaaggtcactggaccctgttttttctacttcaaatcctgtagtagcctactgaatgagaaaacatattctgacccattgggatcaaatcaaaggcacagtgaactcctcatagcatcttctttggaattactcaggaaccagaactttttacacaaatgtaagaaattctaccaaggagtccccttacctaacagcatctcacaaggctgcaccagattccagaaaaggcttctcttgatacatcaagcattttgtgaccgacttattcttagatcattggttttccaaaggctttgtggccatgaagccctttgagtgaaaactgtgcagaagcccagagtaaaagtgaagctgctctggatgaagtagtgaagcaagagtaggggcctgaatcctgctacaactatcttcctttaccaccgtggtgacacctaaggggacttccttacaacaccttgaactcttccgaacacagtttgaaaaccactgccccagacagcaatatgtttgacctgaatggcattccaatcttttctgtacctccactcagcacagttcatgttcagtagatgctgaacattcttagaaatactgtgtgtgaacttagaaaagtgcaagaagacaggcatgtctttgaccccaggaatgatcatttgctgaagatggtgtcaagtgaacctagattaacagccctccactccagatggatatccagtgattcctagaatgggatatagccagagaacaattctatgcaccctacactgacagactcccttaagcaacaccagatgctctactggtacttgaagtacatgactttgaagtcttgaccctccatgaatacctgaattatcagcaagcgggttttgaagctggtgcctcattgaggccatattagagcaacttgtacatttgacctcttgttatcagccatggtactctacttcgtgtgcaagagataactatgaaagccaaattcaaatactggcaacatttcctaaaggggctcaatatctatcattcgtcttcttttccaaactacacatcactgtatgactcaaccagtagcagttatattgccccttggtttttattcagtttaactactgtttccaagataaatgagctaataagctttaaaaaaaaaaaaaaaaaggctgaattcttttttcttcatcactggcatatctgcctattctccagaattattatgactattcagctcactttaacagttgaacttcaagcgacaatctttgaacaccccttctcatgtgatttaaaatgaaaccatttggaaaagtttcttctagccagtaatagattttttttttaattgctctgccttgtgccgagagatgttcttttaagatgaatcttttgatgtctgataccaccaaatataggtggtagggagagttggaggctggccctttgagcaggccattagcttacttgctgggcatttccgatagcttattgcctacctttttgctggaaacaaactgatttgaaaaacaaaatctatgaagactgcagctaaggattttatcggtagacttaagagcttttgtccttgtggatattttagtggaaccacatcagtctcaatactgtcattttacactgactcagagcagctgacttcattccttgccatgatatatatttaaggcaggcattgtaacagacataaagacaacttatctgtttcagcaggaaggattcagtttatgaactctcagaccagatcatgttgaacaaggagactttgatgtgtgtcatgagaaaactcattctttacttcccagtcaatttaaaggccagctatcctgagctactcgaatgaatgcactggttaaacattggaaatagtttgtttatatccttgtctctctctaggccaattgtgattacatgactcgactctacatctcgtcaaacaaggcctaggtctggttgctgtagactgctcgccctcaacaaataaaatctggttgactagcctccttgtatatacaactattatttgttaagaagaaattatcgtcaattttctactaccttccaattgtcagctctttttttcctctctggtttttcctatactttacagaaaaagacattgatctatactgccattccctctaatcctgccatactcagtcaaaaggaatgacttaagatgaagatgatcatctgctcgagtctaaaatatacattgtatataagaattggtgattagaaaagcaaaaaacctaaaacttaaatctaggagtctgtatactgtctccatgtctccatgcctcagatctcatctaaatctttgaacagcaccattcaaccaatctgaggccttgacttgcttgtaagatgattctcagagatcggctgagttaaaaaagatgacgacttgattaccaaagaaagtagggccaactttgacaaatctggctctgctgaccctgtcactcccagatgtagcatagactcctaaacagaacctcaagtctgattgaggataaggccttctcctgagctgaaagttctttggcagatgagcaagaaactgaaagctgatgtacctgactggctctgtaagatcagaaaactgtatccagaataagccctatggattaacccctgagtacccagagtaaaaactaatttacagaacttccttattgatctgctggttcttccagatcatattctggctattggtatggctggcctttctgaaggtaccctgcttgtctattttcctgactcagctcttgcctgcctttttcacatgttgctgcaattagactcaccgtgaggactacagtcaatttcagtctatcttgtgcccaatacaacaaggatttttaatagtaacaacccacacctcacccactaggactcaatgttcacaacaggaaggaccattgctgcatactccttgaccagcaacttttttgaagatatttttaagtgcagagtaggcctctattcctgtatgtaattgttcattttcagcacctggaacctcatctatcgggtctggaaggaatacagcagttcgaaagccgcgtccatttctctccttcagtagtgcagaaatgagtccgattcaccagtacacacagaactgtaccagttcaacctagcaaaagaagaaaagtttccactgtacttaaaatttacagctgactcaaattgcctcacagaattatttgatgtagaaggctagttgtcttacttcagatcagcaggacagttgggctctcagactcatgaccactgagtttgcttgtgttgaaactgtggtttcatccaacatatgctattggacatgattattattccattcaaatggattacagacttcttgaggacaggacaaacttatctctcatggtgtttttttagaatacttttataaccaaggaagaaaccatgccagctgttaccattcaacttcttaagcagagattaagctttttcatatctgttcttatcctggacatcagtagtttttaattgcccagcatccgttccatcttgtaacaactccctgatgtttcttaaaaccacctcttcctattttcagtctgtggtttggacagtctgacccaaccttgagctttgtgggtgaacatgtaattcagacctcatcaatcagcaaatccatctgaactgtggaggagaagctctctttactgagggtgctttagctttgtaggatgaaaacctcaaactaacagggcctaccatgtagagaatgaagccagtgcaggggaaagcagagccaaaatatggagagacttgaatcctgatgacagcgtttgtgcccctggatccaaccgtgcctgaagctagaatatcccctggacttttcagttatgtgaaccaataaatacccttttttgcttaa

SEQ ID NO: 309567 - DNA, 6502 bp, Homo sapiens
ggtcctacttttcacaggggctgtgacccagaagagttagaatcacaatttcttcatgctacagagaggaaactgaggcctagatgtcatttgggacccttcacaaccattttgaagccctgtttgagtccctgggaaaagtagggaatgtgcggtttgggggaatgatgggaatttgtgggaatgtgcgttttaggggaatgatgatccatcgctagcaagttttccaagggggctgtgacccagaagagttaagaatcacaatttcttcatgctacagagaggaaactgaggcctagatgtcatttgggacccttcacaaccattttgaagccctgtttgagtccctgggatatgtgagctgtttctatgcataatggatattcggggttaacaacagtcccctgcttggcttctattctgaatccttttctttcaccatggggtgcctgaagggtggctgatgcatatggtacaatggcacccagtgtaaagcagctacaattaggagtggatgtgttctgtagcatcctatttaaataagcctattttatcctttggcccgtcaactctgttatctgctgcttgtactggtgcctgtacttttctgactctcattgaccatattccacgaccatggttgtcatccattacttgatcctactttacatgtctagtctgtgtggttggtggtgaataggcttctttttacatggtgctgccagcccagctaattaatggtgcacgtggacttttagcaagcgggctcactggaagagactgaacctggcatggaattcctgaagatgtttggggttttttttctttcttaatcgaaagttaacattgtctgaaaagttttgttagaactactgcggaacctcaaaatcagtagatttggaagtgattcaaagctaaactttttccttggccctccttgtgttctaattgcttgcaagtgtaatactaggatgtccaagatgccagtttttgcttctttgttagttgtcagctgcttttatcaaatttcaggccattatccaacaaacactataaaaatgtttgaacaattggatttcaaacattttcgttttgtggagtggtgctcaccaagtggtacagccctaagcaagtgaacacaaacacatttaagtgtattttgtctgattagatgttagccagttatgctatttcattcaaatgtctgaaaaaatcaattgactattcccttttcctaaagggcagagacagataatctcacttccagagaaatgacttggagaaaaaaaagtgttggtctttttgctcttttgtaattaaatccggatgtacctcaaaagacttaagactgtggtgataagatgctttcctcagcagaaaggagggaaaaaaaacaactggaactcaaagcttgaaattctgtggcaaaacatgagatgtccaggattggaggttgaaaagatttcactacagtgttctgcaatagttggagcagataactttcagtgtagccacagccatggactccagatttccagattttcaagacctggacctggaacccgaaagagcttgtcacgatgcggcaggaacactggaggtagatttttttttatttttgaattttgggactgttgaccttgctgtgagaaaagagacaacgactgagcaagcactaccaccagcactgttactgggaattagaagacctgagtttctgtccagaccctcagtgcaaactgaggatgctccatccaaagtgaattatggtacttgccattttccaaaatgccttatcctttaccatctctgcacttttgttcatactctcattctactttggaactgctgctctgtggcttttcatctgtcaaaactgccattttctcagtatccaactcttatgccctcttttccatgagtctcctaactagccagaatagagctttaaagttttatgacatttcgttatgtatcctctatctgtatacaaaatcctgtaaaatagttacttgcctgcatttactgtctttgcagatagcagactccttgaaagcagggtccttgtttagtgcatctttgcccacatacaccacaacttatcaagatgcatttattaggaaggaggagtttagagagcaggctatcagaataaccacttcacctacagacctggtacctggatttttgcccgagatgattcctaccaccttactactgacgaagacacccattccagtggaccactgtgacccaggaggcattcagccatcatgatgtggcctttacctccactcctgtcttgttctacccagattcagcacagccctttatagtgaagtcagagtcctcaagccaaatagctaaagctgttttatcacaacaaaggcctagtttgttccatgagtgtgcatttcatttcttcagttaaagccttcagagacacacaataaatttggaccaggggattttttagttattaatgctctctgaagaaaggcaacatctttttgagagcagcattggaccacaccccacaatctcaaatgattgaaattcatgaacatctaggatcccatgaaggtcactggaccctgttttttctacttcaaatcctgtagtagcctactgaatgagaaaacatattctgacccattgggatcaaatcaaaggcacagtgaactcctcatagcatcttctttggaattactcaggaaccagaactttttacacaaatgtaagaaattctaccaaggagtccccttacctaacagcatctcacaaggctgcaccagattccagaaaaggcttctcttgatacatcaagcattttgtgaccgacttattcttagatcattggttttccaaaggctttgtggccatgaagccctttgagtgaaaactgtgcagaagcccagagtaaaagtgaagctgctctggatgaagtagtgaagcaagagtaggggcctgaatcctgctacaactatcttcctttaccaccgtggtgacacctaaggggacttccttacaacaccttgaactcttccgaacacagtttgaaaaccactgccccagacagcaatatgtttgacctgaatggcattccaatcttttctgtacctccactcagcacagttcatgttcagtagatgctgaacattcttagaaatactgtgtgtgaacttagaaaagtgcaagaagacaggcatgtctttgaccccaggaatgatcatttgctgaagatggtgtcaagtgaacctagattaacagccctccactccagatggatatccagtgattcctagaatgggatatagccagagaacaattctatgcaccctacactgacagactcccttaagcaacaccagatgctctactggtacttgaagtacatgactttgaagtcttgaccctccatgaatacctgaattatcagcaagcgggttttgaagctggtgcctcattgaggccatattagagcaacttgtacatttgacctcttgttatcagccatggtactctacttcgtgtgcaagagataactatgaaagccaaattcaaatactggcaacatttcctaaaggggctcaatatctatcattcgtcttcttttccaaactacacatcactgtatgactcaaccagtagcagttatattgccccttggtttttattcagtttaactactgtttccaagataaatgagctaataagctttaaaaaaaaaaaaaaaaaggctgaattcttttttcttcatcactggcatatctgcctattctccagaattattatgactattcagctcactttaacagttgaacttcaagcgacaatctttgaacaccccttctcatgtgatttaaaatgaaaccatttggaaaagtttcttctagccagtaatagattttttttttaattgctctgccttgtgccgagagatgttcttttaagatgaatcttttgatgtctgataccaccaaatataggtggtagggagagttggaggctggccctttgagcaggccattagcttacttgctgggcatttccgatagcttattgcctacctttttgctggaaacaaactgatttgaaaaacaaaatctatgaagactgcagctaaggattttatcggtagacttaagagcttttgtccttgtggatattttagtggaaccacatcagtctcaatactgtcattttacactgactcagagcagctgacttcattccttgccatgatatatatttaaggcaggcattgtaacagacataaagacaacttatctgtttcagcaggaaggattcagtttatgaactctcagaccagatcatgttgaacaaggagactttgatgtgtgtcatgagaaaactcattctttacttcccagtcaatttaaaggccagctatcctgagctactcgaatgaatgcactggttaaacattggaaatagtttgtttatatccttgtctctctctaggccaattgtgattacatgactcgactctacatctcgtcaaacaaggcctaggtctggttgctgtagactgctcgccctcaacaaataaaatctggttgactagcctccttgtatatacaactattatttgttaagaagaaattatcgtcaattttctactaccttccaattgtcagctctttttttcctctctggtttttcctatactttacagaaaaagacattgatctatactgccattccctctaatcctgccatactcagtcaaaaggaatgacttaagatgaagatgatcatctgctcgagtctaaaatatacattgtatataagaattggtgattagaaaagcaaaaaacctaaaacttaaatctaggagtctgtatactgtctccatgtctccatgcctcagatctcatctaaatctttgaacagcaccattcaaccaatctgaggccttgacttgcttgtaagatgattctcagagatcggctgagttaaaaaagatgacgacttgattaccaaagaaagtagggccaactttgacaaatctggctctgctgaccctgtcactcccagatgtagcatagactcctaaacagaacctcaagtctgattgaggataaggccttctcctgagctgaaagttctttggcagatgagcaagaaactgaaagctgatgtacctgactggctctgtaagatcagaaaactgtatccagaataagccctatggattaacccctgagtacccagagtaaaaactaatttacagaacttccttattgatctgctggttcttccagatcatattctggctattggtatggctggcctttctgaaggtaccctgcttgtctattttcctgactcagctcttgcctgcctttttcacatgttgctgcaattagactcaccgtgaggactacagtcaatttcagtctatcttgtgcccaatacaacaaggatttttaatagtaacaacccacacctcacccactaggactcaatgttcacaacaggaaggaccattgctgcatactccttgaccagcaacttttttgaagatatttttaagtgcagagtaggcctctattcctgtatgtaattgttcattttcagcacctggaacctcatctatcgggtctggaaggaatacagcagttcgaaagccgcgtccatttctctccttcagtagtgcagaaatgagtccgattcaccagtacacacagaactgtaccagttcaacctagcaaaagaagaaaagtttccactgtacttaaaatttacagctgactcaaattgcctcacagaattatttgatgtagaaggctagttgtcttacttcagatcagcaggacagttgggctctcagactcatgaccactgagtttgcttgtgttgaaactgtggtttcatccaacatatgctattggacatgattattattccattcaaatggattacagacttcttgaggacaggacaaacttatctctcatggtgtttttttagaatacttttataaccaaggaagaaaccatgccagctgttaccattcaacttcttaagcagagattaagctttttcatatctgttcttatcctggacatcagtagtttttaattgcccagcatccgttccatcttgtaacaactccctgatgtttcttaaaaccacctcttcctattttcagtctgtggtttggacagtctgacccaaccttgagctttgtgggtgaacatgtaattcagacctcatcaatcagcaaatccatctgaactgtggaggagaagctctctttactgagggtgctttagctttgtaggatgaaaacctcaaactaacagggcctaccatgtagagaatgaagccagtgcaggggaaagcagagccaaaatatggagagacttgaatcctgatgacagcgtttgtgcccctggatccaaccgtgcctgaagctagaatatcccctggacttttcagttatgtgaaccaataaatacccttttttgcttaa

SEQ ID NO: 309568 - DNA, 8025 bp, Homo sapiens
gcgcaagttgcagcttcaccacctcccaagtgaaaaagctcctaggcactcacgatttcttttttcaaagccggaccaaacccagttcagggtggtggtcagattacctcacacttggcccacataaacacctcacaaatgacccgcccacagcacctcgggcaggccgcgccccgcccccacgtccctcagacaacagcctcagcctcccaggcccttcccgggcctcggtcccgtggccgcctccccacgaagaggagctactcccggcttccaaggaccggatcgagggcagtggcgagcgcaccacctgaccgggcactacccggatctcacaactgcctttgtccctccccgcggaattggaacccaacagccgcagagcgctcttggaaccatgtgctgctgccgcctccgccgccgccgccgctgcctccgccgccgcccgcgcgccgcccgcgcgccgcgctagttgagatggtgacaggattcagcaacacgaaattcggcgtttagagctgctctgccgccgccgtcacagacaccacagccaccgctttgtctccgatagtgcacacagccccggccacctcgcacactccccgacgccccaagcccccgaggcctccgcggagcattcagccaatcacaaagctgcagctcctcccgcccccgccctgatgtacagcctcctgattggcgggctgcgtgtccccatgtgaccggatcttggttggccggtcccgcccctgtcacgtgacagcgtgcgcctctcttcctgctttcctgaccctctccgccatttaaagaaacagtaccgggggcgggccgagcgacgcagccgggacggtagctgcggtgcggaccggaggagccatcttgtctcgtcgccggggagtcaggcccctaaatcgaagaagccctggcgcgccctccccccctcccgggtctggtagggcgaaggaacgggcgtgcggtcgatcgagcgatcggttggcggctctttctcctgctctggcatccagctcttggggcgcaggcccggccgccgcggcgcgcgcccggtggccgttggcgctcgcgccgcgtctttcttctcgtacgcagaactcgggcggcggcctatgcgtttgcgattcgacgaggagtcgtccgggtggtcggcggcggcgggcagctgctccgccccgctccgggggaggcggcggcggcagcggccgcgggatttggagcggccggggaggcgggggtggccggggccggcttggaggcctggcgccacccttcggggcctgcaaggacccagttgggggggcaggagggggccggaggatggttggttgtgggatttctactttgccttttcctccttatgccgccttagtgaggggcgggagctctggcggcagccccggggtggggagacgagctccggagtcggaagagctgggttttcttccgggcctagccaccagttggcggagtgaccttaggcgagtcactctgtaatttgtctgcgcctcagtttcctcctctgcctatcaatgtgtgtggggttgaaatcgctttgtaaactataaagcgtgggtgtacgtaaaggatggttattgtttataattttttttgagttgtaagaaaacttagcagttccccaatccttgggttttgaacctgggaaccttggattggagttggggatccccaaacttcctgaaattgtgggaatgtgcggtttgggggaatgatgggaatttgtgggaatgtgcgttttaggggaatgatgatccatcgctagcaagttttccaagggggctgtgacccagaagagttaagaatcacaatttcttcatgctacagagaggaaactgaggcctagatgtcatttgggacccttccataatggatattcggggttaacaacagtcccctgcttggcttctattctgaatccttttctttcaccatggggtgcctgaagggtggctgatgcatatggtacaatggcacccagtgtaaagcagctacaattaggagtggatgtgttctgtagcatcctatttaaataagcctattttatcctttggcccgtcaactctgttatctgctgcttgtactggtgcctgtacttttctgactctcattgaccatattccacgaccatggttgtcatccattacttgatcctactttacatgtctagtctgtgtggttggtggtgaataggcttctttttacatggtgctgccagcccagctaattaatggtgcacgtggacttttagcaagcgggctcactggaagagactgaacctggcatggaattcctgaagatgtttggggttttttttctttcttaatcgaaagttaacattgtctgaaaagttttgttagaactactgcggaacctcaaaatcagtagatttggaagtgattcaaagctaaactttttccttggccctccttgtgttctaattgcttgcaagtgtaatactaggatgtccaagatgccagtttttgcttctttgttagttgtcagctgcttttatcaaatttcaggccattatccaacaaacactataaaaatgtttgaacaattggatttcaaacattttcgttttgtggagtggtgctcaccaagtggtacagccctaagcaagtgaacacaaacacatttaagtgtattttgtctgattagatgttagccagttatgctatttcattcaaatgtctgaaaaaatcaattgactattcccttttcctaaagggcagagacagataatctcacttccagagaaatgacttggagaaaaaaaagtgttggtctttttgctcttttgtaattaaatccggatgtacctcaaaagacttaagactgtggtgataagatgctttcctcagcagaaaggagggaaaaaaaacaactggaactcaaagcttgaaattctgtggcaaaacatgagatgtccaggattggaggttgaaaagatttcactacagtgttctgcaatagttggagcagataactttcagtgtagccacagccatggactccagatttccagattttcaagacctggacctggaacccgaaagagcttgtcacgatgcggcaggaacactggaggtagatttttttttatttttgaattttgggactgttgaccttgctgtgagaaaagagacaacgactgagcaagcactaccaccagcactgttactgggaattagaagacctgagtttctgtccagaccctcagtgcaaactgaggatgctccatccaaagtgaattatggtacttgccattttccaaaatgccttatcctttaccatctctgcacttttgttcatactctcattctactttggaactgctgctctgtggcttttcatctgtcaaaactgccattttctcagtatccaactcttatgccctcttttccatgagtctcctaactagccagaatagagctttaaagttttatgacatttcgttatgtatcctctatctgtatacaaaatcctgtaaaatagttacttgcctgcatttactgtctttgcagatagcagactccttgaaagcagggtccttgtttagtgcatctttgcccacatacaccacaacttatcaagatgcatttattaggaaggaggagtttagagagcaggctatcagaataaccacttcacctacagacctggtacctggatttttgcccgagatgattcctaccaccttactactgacgaagacacccattccagtggaccactgtgacccaggaggcattcagccatcatgatgtggcctttacctccactcctgtcttgttctacccagattcagcacagccctttatagtgaagtcagagtcctcaagccaaatagctaaagctgttttatcacaacaaaggcctagtttgttccatgagtgtgcatttcatttcttcagttaaagccttcagagacacacaataaatttggaccaggggattttttagttattaatgctctctgaagaaaggcaacatctttttgagagcagcattggaccacaccccacaatctcaaatgattgaaattcatgaacatctaggatcccatgaaggtcactggaccctgttttttctacttcaaatcctgtagtagcctactgaatgagaaaacatattctgacccattgggatcaaatcaaaggcacagtgaactcctcatagcatcttctttggaattactcaggaaccagaactttttacacaaatgtaagaaattctaccaaggagtccccttacctaacagcatctcacaaggctgcaccagattccagaaaaggcttctcttgatacatcaagcattttgtgaccgacttattcttagatcattggttttccaaaggctttgtggccatgaagccctttgagtgaaaactgtgcagaagcccagagtaaaagtgaagctgctctggatgaagtagtgaagcaagagtaggggcctgaatcctgctacaactatcttcctttaccaccgtggtgacacctaaggggacttccttacaacaccttgaactcttccgaacacagtttgaaaaccactgccccagacagcaatatgtttgacctgaatggcattccaatcttttctgtacctccactcagcacagttcatgttcagtagatgctgaacattcttagaaatactgtgtgtgaacttagaaaagtgcaagaagacaggcatgtctttgaccccaggaatgatcatttgctgaagatggtgtcaagtgaacctagattaacagccctccactccagatggatatccagtgattcctagaatgggatatagccagagaacaattctatgcaccctacactgacagactcccttaagcaacaccagatgctctactggtacttgaagtacatgactttgaagtcttgaccctccatgaatacctgaattatcagcaagcgggttttgaagctggtgcctcattgaggccatattagagcaacttgtacatttgacctcttgttatcagccatggtactctacttcgtgtgcaagagataactatgaaagccaaattcaaatactggcaacatttcctaaaggggctcaatatctatcattcgtcttcttttccaaactacacatcactgtatgactcaaccagtagcagttatattgccccttggtttttattcagtttaactactgtttccaagataaatgagctaataagctttaaaaaaaaaaaaaaaaaggctgaattcttttttcttcatcactggcatatctgcctattctccagaattattatgactattcagctcactttaacagttgaacttcaagcgacaatctttgaacaccccttctcatgtgatttaaaatgaaaccatttggaaaagtttcttctagccagtaatagattttttttttaattgctctgccttgtgccgagagatgttcttttaagatgaatcttttgatgtctgataccaccaaatataggtggtagggagagttggaggctggccctttgagcaggccattagcttacttgctgggcatttccgatagcttattgcctacctttttgctggaaacaaactgatttgaaaaacaaaatctatgaagactgcagctaaggattttatcggtagacttaagagcttttgtccttgtggatattttagtggaaccacatcagtctcaatactgtcattttacactgactcagagcagctgacttcattccttgccatgatatatatttaaggcaggcattgtaacagacataaagacaacttatctgtttcagcaggaaggattcagtttatgaactctcagaccagatcatgttgaacaaggagactttgatgtgtgtcatgagaaaactcattctttacttcccagtcaatttaaaggccagctatcctgagctactcgaatgaatgcactggttaaacattggaaatagtttgtttatatccttgtctctctctaggccaattgtgattacatgactcgactctacatctcgtcaaacaaggcctaggtctggttgctgtagactgctcgccctcaacaaataaaatctggttgactagcctccttgtatatacaactattatttgttaagaagaaattatcgtcaattttctactaccttccaattgtcagctctttttttcctctctggtttttcctatactttacagaaaaagacattgatctatactgccattccctctaatcctgccatactcagtcaaaaggaatgacttaagatgaagatgatcatctgctcgagtctaaaatatacattgtatataagaattggtgattagaaaagcaaaaaacctaaaacttaaatctaggagtctgtatactgtctccatgtctccatgcctcagatctcatctaaatctttgaacagcaccattcaaccaatctgaggccttgacttgcttgtaagatgattctcagagatcggctgagttaaaaaagatgacgacttgattaccaaagaaagtagggccaactttgacaaatctggctctgctgaccctgtcactcccagatgtagcatagactcctaaacagaacctcaagtctgattgaggataaggccttctcctgagctgaaagttctttggcagatgagcaagaaactgaaagctgatgtacctgactggctctgtaagatcagaaaactgtatccagaataagccctatggattaacccctgagtacccagagtaaaaactaatttacagaacttccttattgatctgctggttcttccagatcatattctggctattggtatggctggcctttctgaaggtaccctgcttgtctattttcctgactcagctcttgcctgcctttttcacatgttgctgcaattagactcaccgtgaggactacagtcaatttcagtctatcttgtgcccaatacaacaaggatttttaatagtaacaacccacacctcacccactaggactcaatgttcacaacaggaaggaccattgctgcatactccttgaccagcaacttttttgaagatatttttaagtgcagagtaggcctctattcctgtatgtaattgttcattttcagcacctggaacctcatctatcgggtctggaaggaatacagcagttcgaaagccgcgtccatttctctccttcagtagtgcagaaatgagtccgattcaccagtacacacagaactgtaccagttcaacctagcaaaagaagaaaagtttccactgtacttaaaatttacagctgactcaaattgcctcacagaattatttgatgtagaaggctagttgtcttacttcagatcagcaggacagttgggctctcagactcatgaccactgagtttgcttgtgttgaaactgtggtttcatccaacatatgctattggacatgattattattccattcaaatggattacagacttcttgaggacaggacaaacttatctctcatggtgtttttttagaatacttttataaccaaggaagaaaccatgccagctgttaccattcaacttcttaagcagagattaagctttttcatatctgttcttatcctggacatcagtagtttttaattgcccagcatccgttccatcttgtaacaactccctgatgtttcttaaaaccacctcttcctattttcagtctgtggtttggacagtctgacccaaccttgagctttgtgggtgaacatgtaattcagacctcatcaatcagcaaatccatctgaactgtggaggagaagctctctttactgagggtgctttagctttgtaggatgaaaacctcaaactaacagggcctaccatgtagagaatgaagccagtgcaggggaaagcagagccaaaatatggagagacttgaatcctgatgacagcgtttgtgcccctggatccaaccgtgcctgaagctagaatatcccctggacttttcagttatgtgaaccaataaatacccttttttgcttaa

SEQ ID NO: 309569 - DNA, 6875 bp, Homo sapiens
gcgcaagttgcagcttcaccacctcccaagtgaaaaagctcctaggcactcacgatttcttttttcaaagccggaccaaacccagttcagggtggtggtcagattacctcacacttggcccacataaacacctcacaaatgacccgcccacagcacctcgggcaggccgcgccccgcccccacgtccctcagacaacagcctcagcctcccaggcccttcccgggcctcggtcccgtggccgcctccccacgaagaggagctactcccggcttccaaggaccggatcgagggcagtggcgagcgcaccacctgaccgggcactacccggatctcacaactgcctttgtccctccccgcggaattggaacccaacagccgcagagcgctcttggaaccatgtgctgctgccgcctccgccgccgccgccgctgcctccgccgccgcccgcgcgccgcccgcgcgccgcgctagttgagatggtgacaggattcagcaacacgaaattcggcgtttagagctgctctgccgccgccgtcacagacaccacagccaccgctttgtctccgatagtgcacacagccccggccacctcgcacactccccgacgccccaagcccccgaggcctccgcggagcattcagccaatcacaaagctgcagctcctcccgcccccgccctgatgtacagcctcctgattggcgggctgcgtgtccccatgtgaccggatcttggttggccggtcccgcccctgtcacgtgacagcgtgcgcctctcttcctgctttcctgaccctctccgccatttaaagaaacagtaccgggggcgggccgagcgacgcagccgggacggtagctgcggtgcggaccggaggagccatcttgtctcgtcgccggggagtcaggcccctaaatcgaagaagccctggcgcgccctccccccctcccgggtctggtagggcgaaggaacgggcgtgcggtcgatcgagcgatcggttggcggctctttctcctgctctggcatccagctcttggggcgcaggcccggccgccgcggcgcgcgcccggtggccgttggcgctcgcgccgcgtctttcttctcgtacgcagaactcgggcggcggcctatgcgtttgcgattcgacgaggagtcgtccgggtggtcggcggcggcgggcagctgctccgccccgctccgggggaggcggcggcggcagcggccgcgggatttggagcggccggggaggcgggggtggccggggccggcttggaggcctggcgccacccttcggggcctgcaaggacccagttgggggggcaggagggggccggaggatggttggttgtgggatttctactttgccttttcctccttatgccgccttagtgaggggcgggagctctggcggcagccccggggtggggagacgagctccggagtcggaagagctgggttttcttccgggcctagccaccagttggcggagtgaccttaggcgagtcactctgtaatttgtctgcgcctcagtttcctcctctgcctatcaatgtgtgtggggttgaaatcgctttgtaaactataaagcgtgggtgtacgtaaaggatggttattgtttataattttttttgagttgtaagaaaacttagcagttccccaatccttgggttttgaacctgggaaccttggattggagttggggatccccaaacttcctgaaattgtgggaatgtgcggtttgggggaatgatgggaatttgtgggaatgtgcgttttaggggaatgatgatccatcgctagcaagttttccaagggggctgtgacccagaagagttaagaatcacaatttcttcatgctacagagaggaaactgaggcctagatgtcatttgggacccttcacaaccattttgaagccctgtttgagtccctgggatatgtgagctgtttctatgcataatggatattcggggttaacaacagtcccctgcttggcttctattctgaatccttttctttcaccatggggtgcctgaagggtggctgatgcatatggtacaatggcacccagtgtaaagcagctacaattaggagtggatgtgttctgtagcatcctatttaaataagcctattttatcctttggcccgtcaactctgttatctgctgcttgtactggtgcctgtacttttctgactctcattgaccatattccacgaccatggttgtcatccattacttgatcctactttacatgtctagtctgtgtggttggtggtgaataggcttctttttacatggtgctgccagcccagctaattaatggtgcacgtggacttttagcaagcgggctcactggaagagactgaacctggcatggaattcctgaagatgtttggggttttttttctttcttaatcgaaagttaacattgtctgaaaagttttgttagaactactgcggaacctcaaaatcagtagatttggaagtgattcaaagctaaactttttccttggccctccttgtgttctaattgcttgcaagtgtaatactaggatgtccaagatgccagtttttgcttctttgttagttgtcagctgcttttatcaaatttcaggccattatccaacaaacactataaaaatgtttgaacaattggatttcaaacattttcgttttgtggagtggtgctcaccaagtggtacagccctaagcaagtgaacacaaacacatttaagtgtattttgtctgattagatgttagccagttatgctatttcattcaaatgtctgaaaaaatcaattgactattcccttttcctaaagggcagagacagataatctcacttccagagaaatgacttggagaaaaaaaagtgttggtctttttgctcttttgtaattaaatccggatgtacctcaaaagacttaagactgtggtgataagatgctttcctcagcagaaaggagggaaaaaaaacaactggaactcaaagcttgaaattctgtggcaaaacatgagatgtccaggattggaggttgaaaagatttcactacagtgttctgcaatagttggagcagataactttcagtgtagccacagccatggactccagatttccagattttcaagacctggacctggaacccgaaagagcttgtcacgatgcggcaggaacactggaggtagatttttttttatttttgaattttgggactgttgaccttgctgtgagaaaagagacaacgactgagcaagcactaccaccagcactgttactgggaattagaagacctgagtttctgtccagaccctcagtgcaaactgaggatgctccatccaaagtgaattatgtcctgtgcctcctgattgctgagtgttcacctggaccttctgactaccttccctgtgctattccatcagcctacagacctggtacctggatttttgccccagacagcaatatgtttgacctgaatggcattccaatcttttctgtacctccactcagcacagttcatgttcagtagatgctgaacattcttagaaatactgtgtgtgaacttagaaaagtgcaagaagacaggcatgtctttgaccccaggaatgatcatttgctgaagatggtgtcaagtgaacctagattaacagccctccactccagatggatatccagtgattcctagaatgggatatagccagagaacaattctatgcaccctacactgacagactcccttaagcaacaccagatgctctactggtacttgaagtacatgactttgaagtcttgaccctccatgaatacctgaattatcagcaagcgggttttgaagctggtgcctcattgaggccatattagagcaacttgtacatttgacctcttgttatcagccatggtactctacttcgtgtgcaagagataactatgaaagccaaattcaaatactggcaacatttcctaaaggggctcaatatctatcattcgtcttcttttccaaactacacatcactgtatgactcaaccagtagcagttatattgccccttggtttttattcagtttaactactgtttccaagataaatgagctaataagctttaaaaaaaaaaaaaaaaaggctgaattcttttttcttcatcactggcatatctgcctattctccagaattattatgactattcagctcactttaacagttgaacttcaagcgacaatctttgaacaccccttctcatgtgatttaaaatgaaaccatttggaaaagtttcttctagccagtaatagattttttttttaattgctctgccttgtgccgagagatgttcttttaagatgaatcttttgatgtctgataccaccaaatataggtggtagggagagttggaggctggccctttgagcaggccattagcttacttgctgggcatttccgatagcttattgcctacctttttgctggaaacaaactgatttgaaaaacaaaatctatgaagactgcagctaaggattttatcggtagacttaagagcttttgtccttgtggatattttagtggaaccacatcagtctcaatactgtcattttacactgactcagagcagctgacttcattccttgccatgatatatatttaaggcaggcattgtaacagacataaagacaacttatctgtttcagcaggaaggattcagtttatgaactctcagaccagatcatgttgaacaaggagactttgatgtgtgtcatgagaaaactcattctttacttcccagtcaatttaaaggccagctatcctgagctactcgaatgaatgcactggttaaacattggaaatagtttgtttatatccttgtctctctctaggccaattgtgattacatgactcgactctacatctcgtcaaacaaggcctaggtctggttgctgtagactgctcgccctcaacaaataaaatctggttgactagcctccttgtatatacaactattatttgttaagaagaaattatcgtcaattttctactaccttccaattgtcagctctttttttcctctctggtttttcctatactttacagaaaaagacattgatctatactgccattccctctaatcctgccatactcagtcaaaaggaatgacttaagatgaagatgatcatctgctcgagtctaaaatatacattgtatataagaattggtgattagaaaagcaaaaaacctaaaacttaaatctaggagtctgtatactgtctccatgtctccatgcctcagatctcatctaaatctttgaacagcaccattcaaccaatctgaggccttgacttgcttgtaagatgattctcagagatcggctgagttaaaaaagatgacgacttgattaccaaagaaagtagggccaactttgacaaatctggctctgctgaccctgtcactcccagatgtagcatagactcctaaacagaacctcaagtctgattgaggataaggccttctcctgagctgaaagttctttggcagatgagcaagaaactgaaagctgatgtacctgactggctctgtaagatcagaaaactgtatccagaataagccctatggattaacccctgagtacccagagtaaaaactaatttacagaacttccttattgatctgctggttcttccagatcatattctggctattggtatggctggcctttctgaaggtaccctgcttgtctattttcctgactcagctcttgcctgcctttttcacatgttgctgcaattagactcaccgtgaggactacagtcaatttcagtctatcttgtgcccaatacaacaaggatttttaatagtaacaacccacacctcacccactaggactcaatgttcacaacaggaaggaccattgctgcatactccttgaccagcaacttttttgaagatatttttaagtgcagagtaggcctctattcctgtatgtaattgttcattttcagcacctggaacctcatctatcgggtctggaaggaatacagcagttcgaaagccgcgtccatttctctccttcagtagtgcagaaatgagtccgattcaccagtacacacagaactgtaccagttcaacctagcaaaagaagaaaagtttccactgtacttaaaatttacagctgactcaaattgcctcacagaattatttgatgtagaaggctagttgtcttacttcagatcagcaggacagttgggctctcagactcatgaccactgagtttgcttgtgttgaaactgtggtttcatccaacatatgctattggacatgattattattccattcaaatggattacagacttcttgaggacaggacaaacttatctctcatggtgtttttttagaatacttttataaccaaggaagaaaccatgccagctgttaccattcaacttcttaagcagagattaagctttttcatatctgttcttatcctggacatcagtagtttttaattgcccagcatccgttccatcttgtaacaactccctgatgtttcttaaaaccacctcttcctattttcagtctgtggtttggacagtctgacccaaccttgagctttgtgggtgaacatgtaattcagacctcatcaatcagcaaatccatctgaactgtggaggagaagctctctttactgagggtgctttagctttgtaggatgaaaacctcaaactaacagggcctaccatgtagagaatgaagccagtgcaggggaaagcagagccaaaatatggagagacttgaatcctgatgacagcgtttgtgcccctggatccaaccgtgcctgaagctagaatatcccctggacttttcagttatgtgaaccaataaatacccttttttgcttaa

SEQ ID NO: 309570 - DNA, 8641 bp, Homo sapiens
gcgcaagttgcagcttcaccacctcccaagtgaaaaagctcctaggcactcacgatttcttttttcaaagccggaccaaacccagttcagggtggtggtcagattacctcacacttggcccacataaacacctcacaaatgacccgcccacagcacctcgggcaggccgcgccccgcccccacgtccctcagacaacagcctcagcctcccaggcccttcccgggcctcggtcccgtggccgcctccccacgaagaggagctactcccggcttccaaggaccggatcgagggcagtggcgagcgcaccacctgaccgggcactacccggatctcacaactgcctttgtccctccccgcggaattggaacccaacagccgcagagcgctcttggaaccatgtgctgctgccgcctccgccgccgccgccgctgcctccgccgccgcccgcgcgccgcccgcgcgccgcgctagttgagatggtgacaggattcagcaacacgaaattcggcgtttagagctgctctgccgccgccgtcacagacaccacagccaccgctttgtctccgatagtgcacacagccccggccacctcgcacactccccgacgccccaagcccccgaggcctccgcggagcattcagccaatcacaaagctgcagctcctcccgcccccgccctgatgtacagcctcctgattggcgggctgcgtgtccccatgtgaccggatcttggttggccggtcccgcccctgtcacgtgacagcgtgcgcctctcttcctgctttcctgaccctctccgccatttaaagaaacagtaccgggggcgggccgagcgacgcagccgggacggtagctgcggtgcggaccggaggagccatcttgtctcgtcgccggggagtcaggcccctaaatcgaagaagccctggcgcgccctccccccctcccgggtctggtagggcgaaggaacgggcgtgcggtcgatcgagcgatcggttggcggctctttctcctgctctggcatccagctcttggggcgcaggcccggccgccgcggcgcgcgcccggtggccgttggcgctcgcgccgcgtctttcttctcgtacgcagaactcgggcggcggcctatgcgtttgcgattcgacgaggagtcgtccgggtggtcggcggcggcgggcagctgctccgccccgctccgggggaggcggcggcggcagcggccgcgggatttggagcggccggggaggcgggggtggccggggccggcttggaggcctggcgccacccttcggggcctgcaaggacccagttgggggggcaggagggggccggaggatggttggttgtgggatttctactttgccttttcctccttatgccgccttagtgaggggcgggagctctggcggcagccccggggtggggagacgagctccggagtcggaagagctgggttttcttccgggcctagccaccagttggcggagtgaccttaggcgagtcactctgtaatttgtctgcgcctcagtttcctcctctgcctatcaatgtgtgtggggttgaaatcgctttgtaaactataaagcgtgggtgtacgtaaaggatggttattgtttataattttttttgagttgtaagaaaacttagcagttccccaatccttgggttttgaacctgggaaccttggattggagttggggatccccaaacttcctgaaattgtgggaatgtgcggtttgggggaatgatgggaatttgtgggaatgtgcgttttaggggaatgatgatccatcgctagcaagttttccaagggggctgtgacccagaagagttaagaatcacaatttcttcatgctacagagaggaaactgaggcctagatgtcatttgggacccttcacaaccattttgaagccctgtttgagtccctgggatatgtgagctgtttctatgcataatggatattcggggttaacaacagtcccctgcttggcttctattctgaatccttttctttcaccatggggtgcctgaagggtggctgatgcatatggtacaatggcacccagtgtaaagcagctacaattaggagtggatgtgttctgtagcatcctatttaaataagcctattttatcctttggcccgtcaactctgttatctgctgcttgtactggtgcctgtacttttctgactctcattgaccatattccacgaccatggttgtcatccattacttgatcctactttacatgtctagtctgtgtggttggtggtgaataggcttctttttacatggtgctgccagcccagctaattaatggtgcacgtggacttttagcaagcgggctcactggaagagactgaacctggcatggaattcctgaagatgtttggggttttttttctttcttaatcgaaagttaacattgtctgaaaagttttgttagaactactgcggaacctcaaaatcagtagatttggaagtgattcaaagctaaactttttccttggccctccttgtgttctaattgcttgcaagtgtaatactaggatgtccaagatgccagtttttgcttctttgttagttgtcagctgcttttatcaaatttcaggccattatccaacaaacactataaaaatgtttgaacaattggatttcaaacattttcgttttgtggagtggtgctcaccaagtggtacagccctaagcaagtgaacacaaacacatttaagtgtattttgtctgattagatgttagccagttatgctatttcattcaaatgtctgaaaaaatcaattgactattcccttttcctaaagggcagagacagataatctcacttccagagaaatgacttggagaaaaaaaagtgttggtctttttgctcttttgtaattaaatccggatgtacctcaaaagacttaagactgtggtgataagatgctttcctcagcagaaaggagggaaaaaaaacaactggaactcaaagcttgaaattctgtggcaaaacatgagatgtccaggattggaggttgaaaagatttcactacagtgttctgcaatagttggagcagataactttcagtgtagccacagccatggactccagatttccagattttcaagacctggacctggaacccgaaagagcttgtcacgatgcggcaggaacactggaggtagatttttttttatttttgaattttgggactgttgaccttgctgtgagaaaagagacaacgactgagcaagcactaccaccagcactgttactgggaattagaagacctgagtttctgtccagaccctcagtgcaaactgaggatgctccatccaaagtgaattatggtacttgccattttccaaaatgccttatcctttaccatctctgcacttttgttcatactctcattctactttggaactgctgctctgtggcttttcatctgtcaaaactgccattttctcagtatccaactcttatgccctcttttccatgagtctcctaactagccagaatagagctttaaagttttatgacatttcgttatgtatcctctatctgtatacaaaatcctgtaaaatagttacttgcctgcatttactgtctttgcagatagcagactccttgaaagcagggtccttgtttagtgcatctttgcccacatacaccacaacttatcaagatgcatttattaggaaggaggagtttagagagcaggctatcagaataaccacttcacctacagacctggtacctggatttttgcccgagatgattcctaccaccttactactgacgaagacacccattccagtggaccactgtgacccaggaggcattcagccatcatgatgtggcctttacctccactcctgtcttgttctacccagattcagcacagccctttatagtgaagtcagagtcctcaagccaaatagctaaagctgttttatcacaacaaaggcctagtttgttccatgagtgtgcatttcatttcttcagttaaagccttcagagacacacaataaatttggaccaggggattttttagttattaatgctctctgaagaaaggcaacatctttttgagagcagcattggaccacaccccacaatctcaaatgattgaaattcatgaacatctaggatcccatgaaggtcactggaccctgttttttctacttcaaatcctgtagtagcctactgaatgagaaaacatattctgacccattgggatcaaatcaaaggcacagtgaactcctcatagcatcttctttggaattactcaggaaccagaactttttacacaaatgtaagaaattctaccaaggagtccccttacctaacagcatctcacaaggctgcaccagattccagaaaaggcttctcttgatacatcaagcattttgtgaccgacttattcttagatcattggttttccaaaggctttgtggccatgaagccctttgagtgaaaactgtgcagaagcccagagtaaaagtgaagctgctctggatgaagtagtgaagcaagagtaggggcctgaatcctgctacaactatcttcctttaccaccgtggtgacacctaaggggacttccttacaacaccttgaactcttccgaacacagtttgaaaaccactgccccagacagcaatatgtttgacctgaatggcattccaatcttttctgtacctccactcagcacagttcatgttcagtagatgctgaacattcttagaaatactgtgtgtgaacttagaaaagtgcaagaagacaggcatgtctttgaccccaggaatgatcatttgctgaagatggtgtcaagtgaacctagattaacagccctccactccagatggatatccagtgattcctagaatgggatatagccagagaacaattctatgcaccctacactgacagactcccttaagcaacaccagatgctctactggtacttgaagtacatgactttgaagtcttgaccctccatgaatacctgaattatcagcaagcgggttttgaagctggtgcctcattgaggccatattagagcaacttgtacatttgacctcttgttatcagccatggtactctacttcgtgtgcaagagataactatgaaagccaaattcaaatactggcaacatttcctaaaggggctcaatatctatcattcgtcttcttttccaaactacacatcactgtatgactcaaccagtagcagttatattgccccttggtttttattcagtttaactactgtttccaagataaatgagctaataagctttaaaaaaaaaaaaaaaaaggctgaattcttttttcttcatcactggcatatctgcctattctccagaattattatgactattcagctcactttaacagttgaacttcaagcgacaatctttgaacaccccttctcatgtgatttaaaatgaaaccatttggaaaagtttcttctagccagtaatagattttttttttaattgctctgccttgtgccgagagatgttcttttaagatgaatcttttgatgtctgataccaccaaatataggtggtagggagagttggaggctggccctttgagcaggccattagcttacttgctgggcatttccgatagcttattgcctacctttttgctggaaacaaactgatttgaaaaacaaaatctatgaagactgcagctaaggattttatcggtagacttaagagcttttgtccttgtggatattttagtggaaccacatcagtctcaatactgtcattttacactgactcagagcagctgacttcattccttgccatgatatatatttaaggcaggcattgtaacagacataaagacaacttatctgtttcagcaggaaggattcagtttatgaactctcagaccagatcatgttgaacaaggagactttgatgtgtgtcatgagaaaactcattctttacttcccagtcaatttaaaggccagctatcctgagctactcgaatgaatgcactggttaaacattggaaatagtttgtttatatccttgtctctctctaggccaattgtgattacatgactcgactctacatctcgtcaaacaaggcctaggtctggttgctgtagactgctcgccctcaacaaataaaatctggttgactagcctccttgtatatacaactattatttgttaagaagaaattatcgtcaattttctactaccttccaattgtcagctctttttttcctctctggtttttcctatactttacagaaaaagacattgatctatactgccattccctctaatcctgccatactcagtcaaaaggaatgacttaagatgaagatgatcatctgctcgagtctaaaatatacattgtatataagaattggtgattagaaaagcaaaaaacctaaaacttaaatctaggagtctgtatactgtctccatgtctccatgcctcagatctcatctaaatctttgaacagcaccattcaaccaatctgaggccttgacttgcttgtaagatgattctcagagatcggctgagttaaaaaagatgacgacttgattaccaaagaaagtagggccaactttgacaaatctggctctgctgaccctgtcactcccagatgtagcatagactcctaaacagaacctcaagtctgattgaggataaggccttctcctgagctgaaagttctttggcagatgagcaagaaactgaaagctgatgtacctgactggctctgtaagatcagaaaactgtatccagaataagccctatggattaacccctgagtacccagagtaaaaactaatttacagaacttccttattgatctgctggttcttccagatcatattctggctattggtatggctggcctttctgaaggtaccctgcttgtctattttcctgactcagctcttgcctgcctttttcacatgttgctgcaattagactcaccgtgaggactacagtcaatttcagtctatcttgtgcccaatacaacaaggatttttaatagtaacaacccacacctcacccactaggactcaatgttcacaacaggaaggaccattgctgcatactccttgaccagcaacttttttgaagatatttttaagtgcagagtaggcctctattcctgtatgtaattgttcattttcagcacctggaacctcatctatcgggtctggaaggaatacagcagttcgaaagccgcgtccatttctctccttcagtagtgcagaaatgagtccgattcaccagtacacacagaactgtaccagttcaacctagcaaaagaagaaaagtttccactgtacttaaaatttacagctgactcaaattgcctcacagaattatttgatgtagaaggctagttgtcttacttcagatcagcaggacagttgggctctcagactcatgaccactgagtttgcttgtgttgaaactgtggtttcatccaacatatgctattggacatgattattattccattcaaatggattacagacttcttgaggacaggacaaacttatctctcatggtgtttttttagaatacttttataaccaaggaagaaaccatgccagctgttaccattcaacttcttaagcagagattaagctttttcatatctgttcttatcctggacatcagtagtttttaattgcccagcatccgttccatcttgtaacaactccctgatgtttcttaaaaccacctcttcctattttcagtctgtggtttggacagtctgacccaaccttgagctttgtgggtgaacatgtaattcagacctcatcaatcagcaaatccatctgaactgtggaggagaagctctctttactgagggtgctttagctttgtaggatgaaaacctcaaactaacagggcctaccatgtagagaatgaagccagtgcaggggaaagcagagccaaaatatggagagacttgaatcctgatgacagcgtttgtgcccctggatccaaccgtgcctgaagctagaatatcccctggacttttcagttatgtgaaccaataaatacccttttttgcttaagttactttgagttgggtttctgttacttgaaattgaatccacactaatatatctaccaacattgagacttgacagatccaagtatttattaagctagaggtcatggtcactgaaattactttccaaagtggaagacaaaatgaaacaggaactgagggaatatttaagatcccacagaagcgtaaaaatgacatggtagaaagtaatagaaaacctaaatgtctgtcattaaaggataggttaaggtgtggttcagccatataggaatatctcgtatctgttaaaatgaataaagtacattcattgtgtatggaaaaatggccatgatacattaggtgaaacaagttattaatagaaaagtgtacagtgtgaactcattttaaaatgtgtgtgcttatgtttataaatgcatagaaaggtctattcacagctttctttgaacagtgtagatcacatgaaactttcaactttatacatttctgtattaatattttacactacccacattatttttaaactttattttaaataaagaatttttaaaattaaaaatagtgcttac

SEQ ID NO: 309571 - DNA, 8188 bp, Homo sapiens
  misc_feature (8188)..(8188): n is a, c, g, or t
gcgcaagttgcagcttcaccacctcccaagtgaaaaagctcctaggcactcacgatttcttttttcaaagccggaccaaacccagttcagggtggtggtcagattacctcacacttggcccacataaacacctcacaaatgacccgcccacagcacctcgggcaggccgcgccccgcccccacgtccctcagacaacagcctcagcctcccaggcccttcccgggcctcggtcccgtggccgcctccccacgaagaggagctactcccggcttccaaggaccggatcgagggcagtggcgagcgcaccacctgaccgggcactacccggatctcacaactgcctttgtccctccccgcggaattggaacccaacagccgcagagcgctcttggaaccatgtgctgctgccgcctccgccgccgccgccgctgcctccgccgccgcccgcgcgccgcccgcgcgccgcgctagttgagatggtgacaggattcagcaacacgaaattcggcgtttagagctgctctgccgccgccgtcacagacaccacagccaccgctttgtctccgatagtgcacacagccccggccacctcgcacactccccgacgccccaagcccccgaggcctccgcggagcattcagccaatcacaaagctgcagctcctcccgcccccgccctgatgtacagcctcctgattggcgggctgcgtgtccccatgtgaccggatcttggttggccggtcccgcccctgtcacgtgacagcgtgcgcctctcttcctgctttcctgaccctctccgccatttaaagaaacagtaccgggggcgggccgagcgacgcagccgggacggtagctgcggtgcggaccggaggagccatcttgtctcgtcgccggggagtcaggcccctaaatcgaagaagccctggcgcgccctccccccctcccgggtctggtagggcgaaggaacgggcgtgcggtcgatcgagcgatcggttggcggctctttctcctgctctggcatccagctcttggggcgcaggcccggccgccgcggcgcgcgcccggtggccgttggcgctcgcgccgcgtctttcttctcgtacgcagaactcgggcggcggcctatgcgtttgcgattcgacgaggagtcgtccgggtggtcggcggcggcgggcagctgctccgccccgctccgggggaggcggcggcggcagcggccgcgggatttggagcggccggggaggcgggggtggccggggccggcttggaggcctggcgccacccttcggggcctgcaaggacccagttgggggggcaggagggggccggaggatggttggttgtgggatttctactttgccttttcctccttatgccgccttagtgaggggcgggagctctggcggcagccccggggtggggagacgagctccggagtcggaagagctgggttttcttccgggcctagccaccagttggcggagtgaccttaggcgagtcactctgtaatttgtctgcgcctcagtttcctcctctgcctatcaatgtgtgtggggttgaaatcgctttgtaaactataaagcgtgggtgtacgtaaaggatggttattgtttataattttttttgagttgtaagaaaacttagcagttccccaatccttgggttttgaacctgggaaccttggattggagttggggatccccaaacttcctgaaattgtgggaatgtgcggtttgggggaatgatgggaatttgtgggaatgtgcgttttaggggaatgatgatccatcgctagcaagttttccaagggggctgtgacccagaagagttaagaatcacaatttcttcatgctacagagaggaaactgaggcctagatgtcatttgggacccttcacaaccattttgaagccctgtttgagtccctgggatatgtgagctgtttctatgcataatggatattcggggttaacaacagtcccctgcttggcttctattctgaatccttttctttcaccatggggtgcctgaagggtggctgatgcatatggtacaatggcacccagtgtaaagcagctacaattaggagtggatgtgttctgtagcatcctatttaaataagcctattttatcctttggcccgtcaactctgttatctgctgcttgtactggtgcctgtacttttctgactctcattgaccatattccacgaccatggttgtcatccattacttgatcctactttacatgtctagtctgtgtggttggtggtgaataggcttctttttacatggtgctgccagcccagctaattaatggtgcacgtggacttttagcaagcgggctcactggaagagactgaacctggcatggaattcctgaagatgtttggggttttttttctttcttaatcgaaagttaacattgtctgaaaagttttgttagaactactgcggaacctcaaaatcagtagatttggaagtgattcaaagctaaactttttccttggccctccttgtgttctaattgcttgcaagtgtaatactaggatgtccaagatgccagtttttgcttctttgttagttgtcagctgcttttatcaaatttcaggccattatccaacaaacactataaaaatgtttgaacaattggatttcaaacattttcgttttgtggagtggtgctcaccaagtggtacagccctaagcaagtgaacacaaacacatttaagtgtattttgtctgattagatgttagccagttatgctatttcattcaaatgtctgaaaaaatcaattgactattcccttttcctaaagggcagagacagataatctcacttccagagaaatgacttggagaaaaaaaagtgttggtctttttgctcttttgtaattaaatccggatgtacctcaaaagacttaagactgtggtgataagatgctttcctcagcagaaaggagggaaaaaaaacaactggaactcaaagcttgaaattctgtggcaaaacatgagatgtccaggattggaggttgaaaagatttcactacagtgttctgcaatagttggagcagataactttcagtgtagccacagccatggactccagatttccagattttcaagacctggacctggaacccgaaagagcttgtcacgatgcggcaggaacactggaggtagatttttttttatttttgaattttgggactgttgaccttgctgtgagaaaagagacaacgactgagcaagcactaccaccagcactgttactgggaattagaagacctgagtttctgtccagaccctcagtgcaaactgaggatgctccatccaaagtgaattatggtacttgccattttccaaaatgccttatcctttaccatctctgcacttttgttcatactctcattctactttggaactgctgctctgtggcttttcatctgtcaaaactgccattttctcagtatccaactcttatgccctcttttccatgagtctcctaactagccagaatagagctttaaagttttatgacatttcgttatgtatcctctatctgtatacaaaatcctgtaaaatagttacttgcctgcatttactgtctttgcagatagcagactccttgaaagcagggtccttgtttagtgcatctttgcccacatacaccacaacttatcaagatgcatttattaggaaggaggagtttagagagcaggctatcagaataaccacttcacctacagacctggtacctggatttttgcccgagatgattcctaccaccttactactgacgaagacacccattccagtggaccactgtgacccaggaggcattcagccatcatgatgtggcctttacctccactcctgtcttgttctacccagattcagcacagccctttatagtgaagtcagagtcctcaagccaaatagctaaagctgttttatcacaacaaaggcctagtttgttccatgagtgtgcatttcatttcttcagttaaagccttcagagacacacaataaatttggaccaggggattttttagttattaatgctctctgaagaaaggcaacatctttttgagagcagcattggaccacaccccacaatctcaaatgattgaaattcatgaacatctaggatcccatgaaggtcactggaccctgttttttctacttcaaatcctgtagtagcctactgaatgagaaaacatattctgacccattgggatcaaatcaaaggcacagtgaactcctcatagcatcttctttggaattactcaggaaccagaactttttacacaaatgtaagaaattctaccaaggagtccccttacctaacagcatctcacaaggctgcaccagattccagaaaaggcttctcttgatacatcaagcattttgtgaccgacttattcttagatcattggttttccaaaggctttgtggccatgaagccctttgagtgaaaactgtgcagaagcccagagtaaaagtgaagctgctctggatgaagtagtgaagcaagagtaggggcctgaatcctgctacaactatcttcctttaccaccgtggtgacacctaaggggacttccttacaacaccttgaactcttccgaacacagtttgaaaaccactgccccagacagcaatatgtttgacctgaatggcattccaatcttttctgtacctccactcagcacagttcatgttcagtagatgctgaacattcttagaaatactgtgtgtgaacttagaaaagtgcaagaagacaggcatgtctttgaccccaggaatgatcatttgctgaagatggtgtcaagtgaacctagattaacagccctccactccagatggatatccagtgattcctagaatgggatatagccagagaacaattctatgcaccctacactgacagactcccttaagcaacaccagatgctctactggtacttgaagtacatgactttgaagtcttgaccctccatgaatacctgaattatcagcaagcgggttttgaagctggtgcctcattgaggccatattagagcaacttgtacatttgacctcttgttatcagccatggtactctacttcgtgtgcaagagataactatgaaagccaaattcaaatactggcaacatttcctaaaggggctcaatatctatcattcgtcttcttttccaaactacacatcactgtatgactcaaccagtagcagttatattgccccttggtttttattcagtttaactactgtttccaagataaatgagctaataagctttaaaaaaaaaaaaaaaaaggctgaattcttttttcttcatcactggcatatctgcctattctccagaattattatgactattcagctcactttaacagttgaacttcaagcgacaatctttgaacaccccttctcatgtgatttaaaatgaaaccatttggaaaagtttcttctagccagtaatagattttttttttaattgctctgccttgtgccgagagatgttcttttaagatgaatcttttgatgtctgataccaccaaatataggtggtagggagagttggaggctggccctttgagcaggccattagcttacttgctgggcatttccgatagcttattgcctacctttttgctggaaacaaactgatttgaaaaacaaaatctatgaagactgcagctaaggattttatcggtagacttaagagcttttgtccttgtggatattttagtggaaccacatcagtctcaatactgtcattttacactgactcagagcagctgacttcattccttgccatgatatatatttaaggcaggcattgtaacagacataaagacaacttatctgtttcagcaggaaggattcagtttatgaactctcagaccagatcatgttgaacaaggagactttgatgtgtgtcatgagaaaactcattctttacttcccagtcaatttaaaggccagctatcctgagctactcgaatgaatgcactggttaaacattggaaatagtttgtttatatccttgtctctctctaggccaattgtgattacatgactcgactctacatctcgtcaaacaaggcctaggtctggttgctgtagactgctcgccctcaacaaataaaatctggttgactagcctccttgtatatacaactattatttgttaagaagaaattatcgtcaattttctactaccttccaattgtcagctctttttttcctctctggtttttcctatactttacagaaaaagacattgatctatactgccattccctctaatcctgccatactcagtcaaaaggaatgacttaagatgaagatgatcatctgctcgagtctaaaatatacattgtatataagaattggtgattagaaaagcaaaaaacctaaaacttaaatctaggagtctgtatactgtctccatgtctccatgcctcagatctcatctaaatctttgaacagcaccattcaaccaatctgaggccttgacttgcttgtaagatgattctcagagatcggctgagttaaaaaagatgacgacttgattaccaaagaaagtagggccaactttgacaaatctggctctgctgaccctgtcactcccagatgtagcatagactcctaaacagaacctcaagtctgattgaggataaggccttctcctgagctgaaagttctttggcagatgagcaagaaactgaaagctgatgtacctgactggctctgtaagatcagaaaactgtatccagaataagccctatggattaacccctgagtacccagagtaaaaactaatttacagaacttccttattgatctgctggttcttccagatcatattctggctattggtatggctggcctttctgaaggtaccctgcttgtctattttcctgactcagctcttgcctgcctttttcacatgttgctgcaattagactcaccgtgaggactacagtcaatttcagtctatcttgtgcccaatacaacaaggatttttaatagtaacaacccacacctcacccactaggactcaatgttcacaacaggaaggaccattgctgcatactccttgaccagcaacttttttgaagatatttttaagtgcagagtaggcctctattcctgtatgtaattgttcattttcagcacctggaacctcatctatcgggtctggaaggaatacagcagttcgaaagccgcgtccatttctctccttcagtagtgcagaaatgagtccgattcaccagtacacacagaactgtaccagttcaacctagcaaaagaagaaaagtttccactgtacttaaaatttacagctgactcaaattgcctcacagaattatttgatgtagaaggctagttgtcttacttcagatcagcaggacagttgggctctcagactcatgaccactgagtttgcttgtgttgaaactgtggtttcatccaacatatgctattggacatgattattattccattcaaatggattacagacttcttgaggacaggacaaacttatctctcatggtgtttttttagaatacttttataaccaaggaagaaaccatgccagctgttaccattcaacttcttaagcagagattaagctttttcatatctgttcttatcctggacatcagtagtttttaattgcccagcatccgttccatcttgtaacaactccctgatgtttcttaaaaccacctcttcctattttcagtctgtggtttggacagtctgacccaaccttgagctttgtgggtgaacatgtaattcagacctcatcaatcagcaaatccatctgaactgtggaggagaagctctctttactgagggtgctttagctttgtaggatgaaaacctcaaactaacagggcctaccatgtagagaatgaagccagtgcaggggaaagcagagccaaaatatggagagacttgaatcctgatgacagcgtttgtgcccctggatccaaccgtgcctgaagctagaatatcccctggacttttcagttatgtgaaccaataaatacccttttttgcttaaaaaaaactcgagcaagcttatgcattgcgcccgaattcgagctcactgggcaattcgccctatagggaggcgaatacaattcactgcccggggttttacaccgccggcn

SEQ ID NO: 309572 - DNA, 8000 bp, Homo sapiens
gcgcaagttgcagcttcaccacctcccaagtgaaaaagctcctaggcactcacgatttcttttttcaaagccggaccaaacccagttcagggtggtggtcagattacctcacacttggcccacataaacacctcacaaatgacccgcccacagcacctcgggcaggccgcgccccgcccccacgtccctcagacaacagcctcagcctcccaggcccttcccgggcctcggtcccgtggccgcctccccacgaagaggagctactcccggcttccaaggaccggatcgagggcagtggcgagcgcaccacctgaccgggcactacccggatctcacaactgcctttgtccctccccgcggaattggaacccaacagccgcagagcgctcttggaaccatgtgctgctgccgcctccgccgccgccgccgctgcctccgccgccgcccgcgcgccgcccgcgcgccgcgctagttgagatggtgacaggattcagcaacacgaaattcggcgtttagagctgctctgccgccgccgtcacagacaccacagccaccgctttgtctccgatagtgcacacagccccggccacctcgcacactccccgacgccccaagcccccgaggcctccgcggagcattcagccaatcacaaagctgcagctcctcccgcccccgccctgatgtacagcctcctgattggcgggctgcgtgtccccatgtgaccggatcttggttggccggtcccgcccctgtcacgtgacagcgtgcgcctctcttcctgctttcctgaccctctccgccatttaaagaaacagtaccgggggcgggccgagcgacgcagccgggacggtagctgcggtgcggaccggaggagccatcttgtctcgtcgccggggagtcaggcccctaaatcgaagaagccctggcgcgccctccccccctcccgggtctggtagggcgaaggaacgggcgtgcggtcgatcgagcgatcggttggcggctctttctcctgctctggcatccagctcttggggcgcaggcccggccgccgcggcgcgcgcccggtggccgttggcgctcgcgccgcgtctttcttctcgtacgcagaactcgggcggcggcctatgcgtttgcgattcgacgaggagtcgtccgggtggtcggcggcggcgggcagctgctccgccccgctccgggggaggcggcggcggcagcggccgcgggatttggagcggccggggaggcgggggtggccggggccggcttggaggcctggcgccacccttcggggcctgcaaggacccagttgggggggcaggagggggccggaggatggttggttgtgggatttctactttgccttttcctccttatgccgccttagtgaggggcgggagctctggcggcagccccggggtggggagacgagctccggagtcggaagagctgggttttcttccgggcctagccaccagttggcggagtgaccttaggcgagtcactctgtaatttgtctgcgcctcagtttcctcctctgcctatcaatgtgtgtggggttgaaatcgctttgtaaactataaagcgtgggtgtacgtaaaggatggttattgtttataattttttttgagttgtaagaaaacttagcagttccccaatccttgggttttgaacctgggaaccttggattggagttggggatccccaaacttcctgaaattgtgggaatgtgcggtttgggggaatgatgggaatttgtgggaatgtgcgttttaggggaatgatgatccatcgctagcaagttttccaagggggctgtgacccagaagagttaagaatcacaatttcttcatgctacagagaggaaactgaggcctagatgtcatttgggacccttcacaaccattttgaagccctgtttgagtccctgggatatgtgagctgtttctatgcataatggatattcggggttaacaacagtcccctgcttggcttctattctgaatccttttctttcaccatggggtgcctgaagggtggctgatgcatatggtacaatggcacccagtgtaaagcagctacaattaggagtggatgtgttctgtagcatcctatttaaataagcctattttatcctttggcccgtcaactctgttatctgctgcttgtactggtgcctgtacttttctgactctcattgaccatattccacgaccatggttgtcatccattacttgatcctactttacatgtctagtctgtgtggttggtggtgaataggcttctttttacatggtgctgccagcccagctaattaatggtgcacgtggacttttagcaagcgggctcactggaagagactgaacctggcatggaattcctgaagatgtttggggttttttttctttcttaatcgaaagttaacattgtctgaaaagttttgttagaactactgcggaacctcaaaatcagtagatttggaagtgattcaaagctaaactttttccttggccctccttgtgttctaattgcttgcaagtgtaatactaggatgtccaagatgccagtttttgcttctttgttagttgtcagctgcttttatcaaatttcaggccattatccaacaaacactataaaaatgtttgaacaattggatttcaaacattttcgttttgtggagtggtgctcaccaagtggtacagccctaagcaagtgaacacaaacacatttaagtgtattttgtctgattagatgttagccagttatgctatttcattcaaatgtctgaaaaaatcaattgactattcccttttcctaaagggcagagacagataatctcacttccagagaaatgacttggagaaaaaaaagtgttggtctttttgctcttttgtaattaaatccggatgtacctcaaaagacttaagactgtggtgataagatgctttcctcagcagaaaggagggaaaaaaaacaactggaactcaaagcttgaaattctgtggcaaaacatgagatgtccaggattggaggttgaaaagatttcactacagtgttctgcaatagttggagcagataactttcagtgtagccacagccatggactccagatttccagattttcaagacctggacctggaacccgaaagagcttgtcacgatgcggcaggaacactggaggtagatttttttttatttttgaattttgggactgttgaccttgctgtgagaaaagagacaacgactgagcaagcactaccaccagcactgttactgggaattagaagacctgagtttctgtccagaccctcagtgcaaactgaggatgctccatccaaagtgaattatggtacttgccattttccaaaatgccttatcctttaccatctctgcacttttgttcatactctcattctactttggaactgctgctctgtggcttttcatctgtcaaaactgccattttctcagtatccaactcttatgccctcttttccatgagtctcctaactagccagaatagagctttaaagttttatgacatttcgttatgtatcctctatctgtatacaaaatcctgtaaaatagttacttgcctgcatttactgtctttgcagatagcagactccttgaaagcagggtccttgtttagtgcatctttgcccacatacaccacaacttatcaagatgcatttattaggaaggaggagtttagagagcaggctatcagaataaccacttcacctacagacctggtacctggatttttgcccgagatgattcctaccaccttactactgacgaagacacccattccagtggaccactgtgacccaggaggcattcagccatcatgatgtggcctttacctccactcctgtcttgttctacccagattcagcacagccctttatagtgaagtcagagtcctcaagccaaatagctaaagctgttttatcacaacaaaggcctagtttgttccatgagtgtgcatttcatttcttcagttaaagccttcagagacacacaataaatttggaccaggggattttttagttattaatgctctctgaagaaaggcaacatctttttgagagcagcattggaccacaccccacaatctcaaatgattgaaattcatgaacatctaggatcccatgaaggtcactggaccctgttttttctacttcaaatcctgtagtagcctactgaatgagaaaacatattctgacccattgggatcaaatcaaaggcacagtgaactcctcatagcatcttctttggaattactcaggaaccagaactttttacacaaatgtaagaaattctaccaaggagtccccttacctaacagcatctcacaaggctgcaccagattccagaaaaggcttctcttgatacatcaagcattttgtgaccgacttattcttagatcattggttttccaaaggctttgtggccatgaagccctttgagtgaaaactgtgcagaagcccagagtaaaagtgaagctgctctggatgaagtagtgaagcaagagtaggggcctgaatcctgctacaactatcttcctttaccaccgtggtgacacctaaggggacttccttacaacaccttgaactcttccgaacacagtttgaaaaccactgccccagacagcaatatgtttgacctgaatggcattccaatcttttctgtacctccactcagcacagttcatgttcagtagatgctgaacattcttagaaatactgtgtgtgaacttagaaaagtgcaagaagacaggcatgtctttgaccccaggaatgatcatttgctgaagatggtgtcaagtgaacctagattaacagccctccactccagatggatatccagtgattcctagaatgggatatagccagagaacaattctatgcaccctacactgacagactcccttaagcaacaccagatgctctactggtacttgaagtacatgactttgaagtcttgaccctccatgaatacctgaattatcagcaagcgggttttgaagctggtgcctcattgaggccatattagagcaacttgtacatttgacctcttgttatcagccatggtactctacttcgtgtgcaagagataactatgaaagccaaattcaaatactggcaacatttcctaaaggggctcaatatctatcattcgtcttcttttccaaactacacatcactgtatgactcaaccagtagcagttatattgccccttggtttttattcagtttaactactgtttccaagataaatgagctaataagctttaaaaaaaaaaaaaaaaaggctgaattcttttttcttcatcactggcatatctgcctattctccagaattattatgactattcagctcactttaacagttgaacttcaagcgacaatctttgaacaccccttctcatgtgatttaaaatgaaaccatttggaaaagtttcttctagccagtaatagattttttttttaattgctctgccttgtgccgagagatgttcttttaagatgaatcttttgatgtctgataccaccaaatataggtggtagggagagttggaggctggccctttgagcaggccattagcttacttgctgggcatttccgatagcttattgcctacctttttgctggaaacaaactgatttgaaaaacaaaatctatgaagactgcagctaaggattttatcggtagacttaagagcttttgtccttgtggatattttagtggaaccacatcagtctcaatactgtcattttacactgactcagagcagctgacttcattccttgccatgatatatatttaaggcaggcattgtaacagacataaagacaacttatctgtttcagcaggaaggattcagtttatgaactctcagaccagatcatgttgaacaaggagactttgatgtgtgtcatgagaaaactcattctttacttcccagtcaatttaaaggccagctatcctgagctactcgaatgaatgcactggttaaacattggaaatagtttgtttatatccttgtctctctctaggccaattgtgattacatgactcgactctacatctcgtcaaacaaggcctaggtctggttgctgtagactgctcgccctcaacaaataaaatctggttgactagcctccttgtatatacaactattatttgttaagaagaaattatcgtcaattttctactaccttccaattgtcagctctttttttcctctctggtttttcctatactttacagaaaaagacattgatctatactgccattccctctaatcctgccatactcagtcaaaaggaatgacttaagatgaagatgatcatctgctcgagtctaaaatatacattgtatataagaattggtgattagaaaagcaaaaaacctaaaacttaaatctaggagtctgtatactgtctccatgtctccatgcctcagatctcatctaaatctttgaacagcaccattcaaccaatctgaggccttgacttgcttgtaagatgattctcagagatcggctgagttaaaaaagatgacgacttgattaccaaagaaagtagggccaactttgacaaatctggctctgctgaccctgtcactcccagatgtagcatagactcctaaacagaacctcaagtctgattgaggataaggccttctcctgagctgaaagttctttggcagatgagcaagaaactgaaagctgatgtacctgactggctctgtaagatcagaaaactgtatccagaataagccctatggattaacccctgagtacccagagtaaaaactaatttacagaacttccttattgatctgctggttcttccagatcatattctggctattggtatggctggcctttctgaaggtaccctgcttgtctattttcctgactcagctcttgcctgcctttttcacatgttgctgcaattagactcacccactaggactcaatgttcacaacaggaaggaccattgctgcatactccttgaccagcaacttttttgaagatatttttaagtgcagagtaggcctctattcctgtatgtaattgttcattttcagcacctggaacctcatctatcgggtctggaaggaatacagcagttcgaaagccgcgtccatttctctccttcagtagtgcagaaatgagtccgattcaccagtacacacagaactgtaccagttcaacctagcaaaagaagaaaagtttccactgtacttaaaatttacagctgactcaaattgcctcacagaattatttgatgtagaaggctagttgtcttacttcagatcagcaggacagttgggctctcagactcatgaccactgagtttgcttgtgttgaaactgtggtttcatccaacatatgctattggacatgattattattccattcaaatggattacagacttcttgaggacaggacaaacttatctctcatggtgtttttttagaatacttttataaccaaggaagaaaccatgccagctgttaccattcaacttcttaagcagagattaagctttttcatatctgttcttatcctggacatcagtagtttttaattgcccagcatccgttccatcttgtaacaactccctgatgtttcttaaaaccacctcttcctattttcagtctgtggtttggacagtctgacccaaccttgagctttgtgggtgaacatgtaattcagacctcatcaatcagcaaatccatctgaactgtggaggagaagctctctttactgagggtgctttagctttgtaggatgaaaacctcaaactaacagggcctaccatgtagagaatgaagccagtgcaggggaaagcagagccaaaatatggagagacttgaatcctgatgacagcgtttgtgcccctggatccaaccgtgcctgaagctagaatatcccctggacttttcagttatgtgaaccaataaatacccttttttgcttaa

SEQ ID NO: 309573 - DNA, 4315 bp, Homo sapiens
cagaataaacagcatcttcaaaatccccctttctcataccttcttattaatggttgaattagtatgtctctgtcatctgagagtcttgcatcttgaccattacctttattttctgtcaagggaatccctagaagatgtatggggagacataggaaaggaatggaagaaagttaattcaccccaaattggataaattccatgacatttagcaatatacttctgtatccctagaattgtatcataactttagttcaaggacattgcatctcaggtgggttaaggaggttgggaaggggagaaaagggatgaggagatattttcttgagatttatctccttgagataatgcttgagaagtcatccagccatggacttcttggagtaatacttacaaagaattggatgcattttgcatccttaggcaaaaaccccagtgctgttacaactgaaaatcattagccttgttctctgatagatacttacaagcccaactgcaggcaatcaaaatttatagcagatgagttctaactccatcaacctgtaatgtggtccatcttagggaaagaataggaaaacaccttggtttaccacaggctttgcttacagtttctgctttctgtgacctattttttgtatttcagcattttgtgaccgacttattcttagatcattggttttccaaaggctttgtggccatgaagccctttgagtgaaaactgtgcagaagcccagagtaaaagtgaagctgctctggatgaagtagtgaagcaagagtaggggcctgaatcctgctacaactatcttcctttaccaccgtggtgacacctaaggggacttccttacaacaccttgaactcttccgaacacagtttgaaaaccactgccccagacagcaatatgtttgacctgaatggcattccaatcttttctgtacctccactcagcacagttcatgttcagtagatgctgaacattcttagaaatactgtgtgtgaacttagaaaagtgcaagaagacaggcatgtctttgaccccaggaatgatcatttgctgaagatggtgtcaagtgaacctagattaacagccctccactccagatggatatccagtgattcctagaatgggatatagccagagaacaattctatgcaccctacactgacagactcccttaagcaacaccagatgctctactggtacttgaagtacatgactttgaagtcttgaccctccatgaatacctgaattatcagcaagcgggttttgaagctggtgcctcattgaggccatattagagcaacttgtacatttgacctcttgttatcagccatggtactctacttcgtgtgcaagagataactatgaaagccaaattcaaatactggcaacatttcctaaaggggctcaatatctatcattcgtcttcttttccaaactacacatcactgtatgactcaaccagtagcagttatattgccccttggtttttattcagtttaactactgtttccaagataaatgagctaataagctttaaaaaaaaaaaaaaaaaggctgaattcttttttcttcatcactggcatatctgcctattctccagaattattatgactattcagctcactttaacagttgaacttcaagcgacaatctttgaacaccccttctcatgtgatttaaaatgaaaccatttggaaaagtttcttctagccagtaatagattttttttttaattgctctgccttgtgccgagagatgttcttttaagatgaatcttttgatgtctgataccaccaaatataggtggtagggagagttggaggctggccctttgagcaggccattagcttacttgctgggcatttccgatagcttattgcctacctttttgctggaaacaaactgatttgaaaaacaaaatctatgaagactgcagctaaggattttatcggtagacttaagagcttttgtccttgtggatattttagtggaaccacatcagtctcaatactgtcattttacactgactcagagcagctgacttcattccttgccatgatatatatttaaggcaggcattgtaacagacataaagacaacttatctgtttcagcaggaaggattcagtttatgaactctcagaccagatcatgttgaacaaggagactttgatgtgtgtcatgagaaaactcattctttacttcccagtcaatttaaaggccagctatcctgagctactcgaatgaatgcactggttaaacattggaaatagtttgtttatatccttgtctctctctaggccaattgtgattacatgactcgactctacatctcgtcaaacaaggcctaggtctggttgctgtagactgctcgccctcaacaaataaaatctggttgactagcctccttgtatatacaactattatttgttaagaagaaattatcgtcaattttctactaccttccaattgtcagctctttttttcctctctggtttttcctatactttacagaaaaagacattgatctatactgccattccctctaatcctgccatactcagtcaaaaggaatgacttaagatgaagatgatcatctgctcgagtctaaaatatacattgtatataagaattggtgattagaaaagcaaaaaacctaaaacttaaatctaggagtctgtatactgtctccatgtctccatgcctcagatctcatctaaatctttgaacagcaccattcaaccaatctgaggccttgacttgcttgtaagatgattctcagagatcggctgagttaaaaaagatgacgacttgattaccaaagaaagtagggccaactttgacaaatctggctctgctgaccctgtcactcccagatgtagcatagactcctaaacagaacctcaagtctgattgaggataaggccttctcctgagctgaaagttctttggcagatgagcaagaaactgaaagctgatgtacctgactggctctgtaagatcagaaaactgtatccagaataagccctatggattaacccctgagtacccagagtaaaaactaatttacagaacttccttattgatctgctggttcttccagatcatattctggctattggtatggctggcctttctgaaggtaccctgcttgtctattttcctgactcagctcttgcctgcctttttcacatgttgctgcaattagactcaccgtgaggactacagtcaatttcagtctatcttgtgcccaatacaacaaggatttttaatagtaacaacccacacctcacccactaggactcaatgttcacaacaggaaggaccattgctgcatactccttgaccagcaacttttttgaagatatttttaagtgcagagtaggcctctattcctgtatgtaattgttcattttcagcacctggaacctcatctatcgggtctggaaggaatacagcagttcgaaagccgcgtccatttctctccttcagtagtgcagaaatgagtccgattcaccagtacacacagaactgtaccagttcaacctagcaaaagaagaaaagtttccactgtacttaaaatttacagctgactcaaattgcctcacagaattatttgatgtagaaggctagttgtcttacttcagatcagcaggacagttgggctctcagactcatgaccactgagtttgcttgtgttgaaactgtggtttcatccaacatatgctattggacatgattattattccattcaaatggattacagacttcttgaggacaggacaaacttatctctcatggtgtttttttagaatacttttataaccaaggaagaaaccatgccagctgttaccattcaacttcttaagcagagattaagctttttcatatctgttcttatcctggacatcagtagtttttaattgcccagcatccgttccatcttgtaacaactccctgatgtttcttaaaaccacctcttcctattttcagtctgtggtttggacagtctgacccaaccttgagctttgtgggtgaacatgtaattcagacctcatcaatcagcaaatccatctgaactgtggaggagaagctctctttactgagggtgctttagctttgtaggatgaaaacctcaaactaacagggcctaccatgtagagaatgaagccagtgcaggggaaagcagagccaaaatatggagagacttgaatcctgatgacagcgtttgtgcccctggatccaaccgtgcctgaagctagaatatcccctggacttttcagttatgtgaaccaataaatacccttttttgcttaa

SEQ ID NO: 309574 - DNA, 8197 bp, Homo sapiens
gcgcaagttgcagcttcaccacctcccaagtgaaaaagctcctaggcactcacgatttcttttttcaaagccggaccaaacccagttcagggtggtggtcagattacctcacacttggcccacataaacacctcacaaatgacccgcccacagcacctcgggcaggccgcgccccgcccccacgtccctcagacaacagcctcagcctcccaggcccttcccgggcctcggtcccgtggccgcctccccacgaagaggagctactcccggcttccaaggaccggatcgagggcagtggcgagcgcaccacctgaccgggcactacccggatctcacaactgcctttgtccctccccgcggaattggaacccaacagccgcagagcgctcttggaaccatgtgctgctgccgcctccgccgccgccgccgctgcctccgccgccgcccgcgcgccgcccgcgcgccgcgctagttgagatggtgacaggattcagcaacacgaaattcggcgtttagagctgctctgccgccgccgtcacagacaccacagccaccgctttgtctccgatagtgcacacagccccggccacctcgcacactccccgacgccccaagcccccgaggcctccgcggagcattcagccaatcacaaagctgcagctcctcccgcccccgccctgatgtacagcctcctgattggcgggctgcgtgtccccatgtgaccggatcttggttggccggtcccgcccctgtcacgtgacagcgtgcgcctctcttcctgctttcctgaccctctccgccatttaaagaaacagtaccgggggcgggccgagcgacgcagccgggacggtagctgcggtgcggaccggaggagccatcttgtctcgtcgccggggagtcaggcccctaaatcgaagaagccctggcgcgccctccccccctcccgggtctggtagggcgaaggaacgggcgtgcggtcgatcgagcgatcggttggcggctctttctcctgctctggcatccagctcttggggcgcaggcccggccgccgcggcgcgcgcccggtggccgttggcgctcgcgccgcgtctttcttctcgtacgcagaactcgggcggcggcctatgcgtttgcgattcgacgaggagtcgtccgggtggtcggcggcggcgggcagctgctccgccccgctccgggggaggcggcggcggcagcggccgcgggatttggagcggccggggaggcgggggtggccggggccggcttggaggcctggcgccacccttcggggcctgcaaggacccagttgggggggcaggagggggccggaggatggttggttgtgggatttctactttgccttttcctccttatgccgccttagtgaggggcgggagctctggcggcagccccggggtggggagacgagctccggagtcggaagagctgggttttcttccgggcctagccaccagttggcggagtgaccttaggcgagtcactctgtaatttgtctgcgcctcagtttcctcctctgcctatcaatgtgtgtggggttgaaatcgctttgtaaactataaagcgtgggtgtacgtaaaggatggttattgtttataattttttttgagttgtaagaaaacttagcagttccccaatccttgggttttgaacctgggaaccttggattggagttggggatccccaaacttcctgaaattgtgggaatgtgcggtttgggggaatgatgggaatttgtgggaatgtgcgttttaggggaatgatgatccatcgctagcaagttttccaagggggctgtgacccagaagagttaagaatcacaatttcttcatgctacagagaggaaactgaggcctagatgtcatttgggacccttcacaaccattttgaagccctgtttgagtccctgggatatgtgagctgtttctatgcataatggatattcggggttaacaacagtcccctgcttggcttctattctgaatccttttctttcaccatggggtgcctgaagggtggctgatgcatatggtacaatggcacccagtgtaaagcagctacaattaggagtggatgtgttctgtagcatcctatttaaataagcctattttatcctttggcccgtcaactctgttatctgctgcttgtactggtgcctgtacttttctgactctcattgaccatattccacgaccatggttgtcatccattacttgatcctactttacatgtctagtctgtgtggttggtggtgaataggcttctttttacatggtgctgccagcccagctaattaatggtgcacgtggacttttagcaagcgggctcactggaagagactgaacctggcatggaattcctgaagatgtttggggttttttttctttcttaatcgaaagttaacattgtctgaaaagttttgttagaactactgcggaacctcaaaatcagtagatttggaagtgattcaaagctaaactttttccttggccctccttgtgttctaattgcttgcaagtgtaatactaggatgtccaagatgccagtttttgcttctttgttagttgtcagctgcttttatcaaatttcaggccattatccaacaaacactataaaaatgtttgaacaattggatttcaaacattttcgttttgtggagtggtgctcaccaagtggtacagccctaagcaagtgaacacaaacacatttaagtgtattttgtctgattagatgttagccagttatgctatttcattcaaatgtctgaaaaaatcaattgactattcccttttcctaaagggcagagacagataatctcacttccagagaaatgacttggagaaaaaaaagtgttggtctttttgctcttttgtaattaaatccggatgtacctcaaaagacttaagactgtggtgataagatgctttcctcagcagaaaggagggaaaaaaaacaactggaactcaaagcttgaaattctgtggcaaaacatgagatgtccaggattggaggttgaaaagatttcactacagtgttctgcaatagttggagcagataactttcagtgtagccacagccatggactccagatttccagattttcaagacctggacctggaacccgaaagagcttgtcacgatgcggcaggaacactggaggtagatttttttttatttttgaattttgggactgttgaccttgctgtgagaaaagagacaacgactgagcaagcactaccaccagcactgttactgggaattagaagacctgagtttctgtccagaccctcagtgcaaactgaggatgctccatccaaagtgaattatggtacttgccattttccaaaatgccttatcctttaccatctctgcacttttgttcatactctcattctactttggaactgctgctctgtggcttttcatctgtcaaaactgccattttctcagtatccaactcttatgccctcttttccatgagtctcctaactagccagaatagagctttaaagttttatgacatttcgttatgtatcctctatctgtatacaaaatcctgtaaaatagttacttgcctgcatttactgtctttgcagatagcagactccttgaaagcagggtccttgtttagtgcatctttgcccacatacaccacaacttatcaagatgcatttattaggaaggaggagtttagagagcaggctatcagaataaccacttcacctacagacctggtacctggatttttgcccgagatgattcctaccaccttactactgacgaagacacccattccagtggaccactgtgacccaggaggcattcagccatcatgatgtggcctttacctccactcctgtcttgttctacccagattcagcacagccctttatagtgaagtcagagtcctcaagccaaatagctaaagctgttttatcacaacaaaggcctagtttgttccatgagtgtgcatttcatttcttcagttaaagccttcagagacacacaataaatttggaccaggggattttttagttattaatgctctctgaagaaaggcaacatctttttgagagcagcattggaccacaccccacaatctcaaatgattgaaattcatgaacatctaggatcccatgaaggtcactggaccctgttttttctacttcaaatcctgtagtagcctactgaatgagaaaacatattctgacccattgggatcaaatcaaaggcacagtgaactcctcatagcatcttctttggaattactcaggaaccagaactttttacacaaatgtaagaaattctaccaaggagtccccttacctaacagcatctcacaaggctgcaccagattccagaaaaggcttctcttgatacatcaagcattttgtgaccgacttattcttagatcattggttttccaaaggctttgtggccatgaagccctttgagtgaaaactgtgcagaagcccagagtaaaagtgaagctgctctggatgaagtagtgaagcaagagtaggggcctgaatcctgctacaactatcttcctttaccaccgtggtgacacctaaggggacttccttacaacaccttgaactcttccgaacacagtttgaaaaccactgccccagacagcaatatgtttgacctgaatggcattccaatcttttctgtacctccactcagcacagttcatgttcagtagatgctgaacattcttagaaatactgtgtgtgaacttagaaaagtgcaagaagacaggcatgtctttgaccccaggaatgatcatttgctgaagatggtgtcaagtgaacctagattaacagccctccactccagatggatatccagtgattcctagaatgggatatagccagagaacaattctatgcaccctacactgacagactcccttaagcaacaccagatgctctactggtacttgaagtacatgactttgaagtcttgaccctccatgaatacctgaattatcagcaagcgggttttgaagctggtgcctcattgaggccatattagagcaacttgtacatttgacctcttgttatcagccatggtactctacttcgtgtgcaagagataactatgaaagccaaattcaaatactggcaacatttcctaaaggggctcaatatctatcattcgtcttcttttccaaactacacatcactgtatgactcaaccagtagcagttatattgccccttggtttttattcagtttaactactgtttccaagataaatgagctaataagctttaaaaaaaaaaaaaaaaaggctgaattcttttttcttcatcactggcatatctgcctattctccagaattattatgactattcagctcactttaacagttgaacttcaagcgacaatctttgaacaccccttctcatgtgatttaaaatgaaaccatttggaaaagtttcttctagccagtaatagattttttttttaattgctctgccttgtgccgagagatgttcttttaagatgaatcttttgatgtctgataccaccaaatataggtggtagggagagttggaggctggccctttgagcaggccattagcttacttgctgggcatttccgatagcttattgcctacctttttgctggaaacaaactgatttgaaaaacaaaatctatgaagactgcagctaaggattttatcggtagacttaagagcttttgtccttgtggatattttagtggaaccacatcagtctcaatactgtcattttacactgactcagagcagctgacttcattccttgccatgatatatatttaaggcaggcattgtaacagacataaagacaacttatctgtttcagcaggaaggattcagtttatgaactctcagaccagatcatgttgaacaaggagactttgatgtgtgtcatgagaaaactcattctttacttcccagtcaatttaaaggccagctatcctgagctactcgaatgaatgcactggttaaacattggaaatagtttgtttatatccttgtctctctctaggccaattgtgattacatgactcgactctacatctcgtcaaacaaggcctaggtctggttgctgtagactgctcgccctcaacaaataaaatctggttgactagcctccttgtatatacaactattatttgttaagaagaaattatcgtcaattttctactaccttccaattgtcagctctttttttcctctctggtttttcctatactttacagaaaaagacattgatctatactgccattccctctaatcctgccatactcagtcaaaaggaatgacttaagatgaagatgatcatctgctcgagtctaaaatatacattgtatataagaattggtgattagaaaagcaaaaaacctaaaacttaaatctaggagtctgtatactgtctccatgtctccatgcctcagatctcatctaaatctttgaacagcaccattcaaccaatctgaggccttgacttgcttgtaagatgattctcagagatcggctgagttaaaaaagatgacgacttgattaccaaagaaagtagggccaactttgacaaatctggctctgctgaccctgtcactcccagatgtagcatagactcctaaacagaacctcaagtctgattgaggataaggccttctcctgagctgaaagttctttggcagatgagcaagaaactgaaagctgatgtacctgactggctctgtaagatcagaaaactgtatccagaataagccctatggattaacccctgagtacccagagtaaaaactaatttacagaacttccttattgatctgctggttcttccagatcatattctggctattggtatggctggcctttctgaaggtaccctgcttgtctattttcctgactcagctcttgcctgcctttttcacatgttgctgcaattagactcaccgtgaggactacagtcaatttcagtctatcttgtgcccaatacaacaaggatttttaatagtaacaacccacacctcacccactaggactcaatgttcacaacaggaaggaccattgctgcatactccttgaccagcaacttttttgaagatatttttaagtgcagagtaggcctctattcctgtatgtaattgttcattttcagcacctggaacctcatctatcgggtctggaaggaatacagcagttcgaaagccgcgtccatttctctccttcagtagtgcagaaatgagtccgattcaccagtacacacagaactgtaccagttcaacctagcaaaagaagaaaagtttccactgtacttaaaatttacagctgactcaaattgcctcacagaattatttgatgtagaaggctagttgtcttacttcagatcagcaggacagttgggctctcagactcatgaccactgagtttgcttgtgttgaaactgtggtttcatccaacatatgctattggacatgattattattccattcaaatggattacagacttcttgaggacaggacaaacttatctctcatggtgtttttttagaatacttttataaccaaggaagaaaccatgccagctgttaccattcaacttcttaagcagagattaagctttttcatatctgttcttatcctggacatcagtagtttttaattgcccagcatccgttccatcttgtaacaactccctgatgtttcttaaaaccacctcttcctattttcagtctgtggtttggacagtctgacccaaccttgagctttgtgggtgaacatgtaattcagacctcatcaatcagcaaatccatctgaactgtggaggagaagctctctttactgagggtgctttagctttgtaggatgaaaactacttcaaatcctgtagtagcctactgagtgagaaaacatattctgaccatgggattcaatcagaggcacagtgaactcctcatagcatcttcttgggattactcagggacccagaacttttacgccaatgtagaatctaccgaggaggtccctttacttaaggattcacagggtggccgattccaaaaggtccttggaactcaggcatgggcgccatctaaacgggtcaagggggagtacctttggaacgtgaccccagaaagaccggcaaaacaagggcgcccgcaaatctcacgggcg

SEQ ID NO: 309575 - DNA, 4061 bp, Homo sapiens
aactctgcatcgtcatggtggcttggggctgtccggcgtgggagaacgtcgatacggagatattttcttgagatttatctccttgagataatgcttgagaagtcatccagccatggacttcttggagtaatacttacaaagaattggatgcattttgcatccttaggcaaaaaccccagtgctgttacaactgaaaatcattagccttgttctctgatagatacttacaagcccaactgcaggcaatcaaaatttatagcagatgagttctaactccatcaacctgtaatgtggtccatcttagggaaagaataggaaaacaccttggtttaccacaggctttgcttacagtttctgctttctgtgacctattttttgtatttcagcattttgtgaccgacttattcttagatcattggttttccaaaggctttgtggccatgaagccctttgagtgaaaactgtgcagaagcccagagtaaaagtgaagctgctctggatgaagtagtgaagcaagagtaggggcctgaatcctgctacaactatcttcctttaccaccgtggtgacacctaaggggacttccttacaacaccttgaactcttccgaacacagtttgaaaaccactgccccagacagcaatatgtttgacctgaatggcattccaatcttttctgtacctccactcagcacagttcatgttcagtagatgctgaacattcttagaaatactgtgtgtgaacttagaaaagtgcaagaagacaggcatgtctttgaccccaggaatgatcatttgctgaagatggtgtcaagtgaacctagattaacagccctccactccagatggatatccagtgattcctagaatgggatatagccagagaacaattctatgcaccctacactgacagactcccttaagcaacaccagatgctctactggtacttgaagtacatgactttgaagtcttgaccctccatgaatacctgaattatcagcaagcgggttttgaagctggtgcctcattgaggccatattagagcaacttgtacatttgacctcttgttatcagccatggtactctacttcgtgtgcaagagataactatgaaagccaaattcaaatactggcaacatttcctaaaggggctcaatatctatcattcgtcttcttttccaaactacacatcactgtatgactcaaccagtagcagttatattgccccttggtttttattcagtttaactactgtttccaagataaatgagctaataagctttaaaaaaaaaaaaaaaaaggctgaattcttttttcttcatcactggcatatctgcctattctccagaattattatgactattcagctcactttaacagttgaacttcaagcgacaatctttgaacaccccttctcatgtgatttaaaatgaaaccatttggaaaagtttcttctagccagtaatagattttttttttaattgctctgccttgtgccgagagatgttcttttaagatgaatcttttgatgtctgataccaccaaatataggtggtagggagagttggaggctggccctttgagcaggccattagcttacttgctgggcatttccgatagcttattgcctacctttttgctggaaacaaactgatttgaaaaacaaaatctatgaagactgcagctaaggattttatcggtagacttaagagcttttgtccttgtggatattttagtggaaccacatcagtctcaatactgtcattttacactgactcagagcagctgacttcattccttgccatgatatatatttaaggcaggcattgtaacagacataaagacaacttatctgtttcagcaggaaggattcagtttatgaactctcagaccagatcatgttgaacaaggagactttgatgtgtgtcatgagaaaactcattctttacttcccagtcaatttaaaggccagctatcctgagctactcgaatgaatgcactggttaaacattggaaatagtttgtttatatccttgtctctctctaggccaattgtgattacatgactcgactctacatctcgtcaaacaaggcctaggtctggttgctgtagactgctcgccctcaacaaataaaatctggttgactagcctccttgtatatacaactattatttgttaagaagaaattatcgtcaattttctactaccttccaattgtcagctctttttttcctctctggtttttcctatactttacagaaaaagacattgatctatactgccattccctctaatcctgccatactcagtcaaaaggaatgacttaagatgaagatgatcatctgctcgagtctaaaatatacattgtatataagaattggtgattagaaaagcaaaaaacctaaaacttaaatctaggagtctgtatactgtctccatgtctccatgcctcagatctcatctaaatctttgaacagcaccattcaaccaatctgaggccttgacttgcttgtaagatgattctcagagatcggctgagttaaaaaagatgacgacttgattaccaaagaaagtagggccaactttgacaaatctggctctgctgaccctgtcactcccagatgtagcatagactcctaaacagaacctcaagtctgattgaggataaggccttctcctgagctgaaagttctttggcagatgagcaagaaactgaaagctgatgtacctgactggctctgtaagatcagaaaactgtatccagaataagccctatggattaacccctgagtacccagagtaaaaactaatttacagaacttccttattgatctgctggttcttccagatcatattctggctattggtatggctggcctttctgaaggtaccctgcttgtctattttcctgactcagctcttgcctgcctttttcacatgttgctgcaattagactcaccgtgaggactacagtcaatttcagtctatcttgtgcccaatacaacaaggatttttaatagtaacaacccacacctcacccactaggactcaatgttcacaacaggaaggaccattgctgcatactccttgaccagcaacttttttgaagatatttttaagtgcagagtaggcctctattcctgtatgtaattgttcattttcagcacctggaacctcatctatcgggtctggaaggaatacagcagttcgaaagccgcgtccatttctctccttcagtagtgcagaaatgagtccgattcaccagtacacacagaactgtaccagttcaacctagcaaaagaagaaaagtttccactgtacttaaaatttacagctgactcaaattgcctcacagaattatttgatgtagaaggctagttgtcttacttcagatcagcaggacagttgggctctcagactcatgaccactgagtttgcttgtgttgaaactgtggtttcatccaacatatgctattggacatgattattattccattcaaatggattacagacttcttgaggacaggacaaacttatctctcatggtgtttttttagaatacttttataaccaaggaagaaaccatgccagctgttaccattcaacttcttaagcagagattaagctttttcatatctgttcttatcctggacatcagtagtttttaattgcccagcatccgttccatcttgtaacaactccctgatgtttcttaaaaccacctcttcctattttcagtctgtggtttggacagtctgacccaaccttgagctttgtgggtgaacatgtaattcagacctcatcaatcagcaaatccatctgaactgtggaggagaagctctctttactgagggtgctttagctttgtaggatgaaaacctcaaactaacagggcctaccatgtagagaatgaagccagtgcaggggaaagcagagccaaaatatggagagacttgaatcctgatgacagcgtttgtgcccctggatccaaccgtgcctgaagctagaatatcccctggacttttcagttatgtgaaccaataaatacccttttttgcttaa

SEQ ID NO: 309576 - DNA, 7782 bp, Homo sapiens
  misc_feature (7732)..(7732): n is a, c, g, or t
  misc_feature (7774)..(7774): n is a, c, g, or t
gcgcaagttgcagcttcaccacctcccaagtgaaaaagctcctaggcactcacgatttcttttttcaaagccggaccaaacccagttcagggtggtggtcagattacctcacacttggcccacataaacacctcacaaatgacccgcccacagcacctcgggcaggccgcgccccgcccccacgtccctcagacaacagcctcagcctcccaggcccttcccgggcctcggtcccgtggccgcctccccacgaagaggagctactcccggcttccaaggaccggatcgagggcagtggcgagcgcaccacctgaccgggcactacccggatctcacaactgcctttgtccctccccgcggaattggaacccaacagccgcagagcgctcttggaaccatgtgctgctgccgcctccgccgccgccgccgctgcctccgccgccgcccgcgcgccgcccgcgcgccgcgctagttgagatggtgacaggattcagcaacacgaaattcggcgtttagagctgctctgccgccgccgtcacagacaccacagccaccgctttgtctccgatagtgcacacagccccggccacctcgcacactccccgacgccccaagcccccgaggcctccgcggagcattcagccaatcacaaagctgcagctcctcccgcccccgccctgatgtacagcctcctgattggcgggctgcgtgtccccatgtgaccggatcttggttggccggtcccgcccctgtcacgtgacagcgtgcgcctctcttcctgctttcctgaccctctccgccatttaaagaaacagtaccgggggcgggccgagcgacgcagccgggacggtagctgcggtgcggaccggaggagccatcttgtctcgtcgccggggagtcaggcccctaaatcgaagaagccctggcgcgccctccccccctcccgggtctggtagggcgaaggaacgggcgtgcggtcgatcgagcgatcggttggcggctctttctcctgctctggcatccagctcttggggcgcaggcccggccgccgcggcgcgcgcccggtggccgttggcgctcgcgccgcgtctttcttctcgtacgcagaactcgggcggcggcctatgcgtttgcgattcgacgaggagtcgtccgggtggtcggcggcggcgggcagctgctccgccccgctccgggggaggcggcggcggcagcggccgcgggatttggagcggccggggaggcgggggtggccggggccggcttggaggcctggcgccacccttcggggcctgcaaggacccagttgggggggcaggagggggccggaggatggttggttgtgggatttctactttgccttttcctccttatgccgccttagtgaggggcgggagctctggcggcagccccggggtggggagacgagctccggagtcggaagagctgggttttcttccgggcctagccaccagttggcggagtgaccttaggcgagtcactctgtaatttgtctgcgcctcagtttcctcctctgcctatcaatgtgtgtggggttgaaatcgctttgtaaactataaagcgtgggtgtacgtaaaggatggttattgtttataattttttttgagttgtaagaaaacttagcagttccccaatccttgggttttgaacctgggaaccttggattggagttggggatccccaaacttcctgaaattgtgggaatgtgcggtttgggggaatgatgggaatttgtgggaatgtgcgttttaggggaatgatgatccatcgctagcaagttttccaagggggctgtgacccagaagagttaagaatcacaatttcttcatgctacagagaggaaactgaggcctagatgtcatttgggacccttcacaaccattttgaagccctgtttgagtccctgggatatgtgagctgtttctatgcataatggatattcggggttaacaacagtcccctgcttggcttctattctgaatccttttctttcaccatggggtgcctgaagggtggctgatgcatatggtacaatggcacccagtgtaaagcagctacaattaggagtggatgtgttctgtagcatcctatttaaataagcctattttatcctttggcccgtcaactctgttatctgctgcttgtactggtgcctgtacttttctgactctcattgaccatattccacgaccatggttgtcatccattacttgatcctactttacatgtctagtctgtgtggttggtggtgaataggcttctttttacatggtgctgccagcccagctaattaatggtgcacgtggacttttagcaagcgggctcactggaagagactgaacctggcatggaattcctgaagatgtttggggttttttttctttcttaatcgaaagttaacattgtctgaaaagttttgttagaactactgcggaacctcaaaatcagtagatttggaagtgattcaaagctaaactttttccttggccctccttgtgttctaattgcttgcaagtgtaatactaggatgtccaagatgccagtttttgcttctttgttagttgtcagctgcttttatcaaatttcaggccattatccaacaaacactataaaaatgtttgaacaattggatttcaaacattttcgttttgtggagtggtgctcaccaagtggtacagccctaagcaagtgaacacaaacacatttaagtgtattttgtctgattagatgttagccagttatgctatttcattcaaatgtctgaaaaaatcaattgactattcccttttcctaaagggcagagacagataatctcacttccagagaaatgacttggagaaaaaaaagtgttggtctttttgctcttttgtaattaaatccggatgtacctcaaaagacttaagactgtggtgataagatgctttcctcagcagaaaggagggaaaaaaaacaactggaactcaaagcttgaaattctgtggcaaaacatgagatgtccaggattggaggttgaaaagatttcactacagtgttctgcaatagttggagcagataactttcagtgtagccacagccatggactccagatttccagattttcaagacctggacctggaacccgaaagagcttgtcacgatgcggcaggaacactggaggtagatttttttttatttttgaattttgggactgttgaccttgctgtgagaaaagagacaacgactgagcaagcactaccaccagcactgttactgggaattagaagacctgagtttctgtccagaccctcagtgcaaactgaggatgctccatccaaagtgaattatggtacttgccattttccaaaatgccttatcctttaccatctctgcacttttgttcatactctcattctactttggaactgctgctctgtggcttttcatctgtcaaaactgccattttctcagtatccaactcttatgccctcttttccatgagtctcctaactagccagaatagagctttaaagttttatgacatttcgttatgtatcctctatctgtatacaaaatcctgtaaaatagttacttgcctgcatttactgtctttgcagatagcagactccttgaaagcagggtccttgtttagtgcatctttgcccacatacaccacaacttatcaagatgcatttattaggaaggaggagtttagagagcaggctatcagaataaccacttcacctacagacctggtacctggatttttgcccgagatgattcctaccaccttactactgacgaagacacccattccagtggaccactgtgacccaggaggcattcagccatcatgatgtggcctttacctccactcctgtcttgttctacccagattcagcacagccctttatagtgaagtcagagtcctcaagccaaatagctaaagctgttttatcacaacaaaggcctagtttgttccatgagtgtgcatttcatttcttcagttaaagccttcagagacacacaataaatttggaccaggggattttttagttattaatgctctctgaagaaaggcaacatctttttgagagcagcattggaccacaccccacaatctcaaatgattgaaattcatgaacatctaggatcccatgaaggtcactggaccctgttttttctacttcaaatcctgtagtagcctactgaatgagaaaacatattctgacccattgggatcaaatcaaaggcacagtgaactcctcatagcatcttctttggaattactcaggaaccagaactttttacacaaatgtaagaaattctaccaaggagtccccttacctaacagcatctcacaaggctgcaccagattccagaaaaggcttctcttgatacatcaagcattttgtgaccgacttattcttagatcattggttttccaaaggctttgtggccatgaagccctttgagtgaaaactgtgcagaagcccagagtaaaagtgaagctgctctggatgaagtagtgaagcaagagtaggggcctgaatcctgctacaactatcttcctttaccaccgtggtgacacctaaggggacttccttacaacaccttgaactcttccgaacacagtttgaaaaccactgccccagacagcaatatgtttgacctgaatggcattccaatcttttctgtacctccactcagcacagttcatgttcagtagatgctgaacattcttagaaatactgtgtgtgaacttagaaaagtgcaagaagacaggcatgtctttgaccccaggaatgatcatttgctgaagatggtgtcaagtgaacctagattaacagccctccactccagatggatatccagtgattcctagaatgggatatagccagagaacaattctatgcaccctacactgacagactcccttaagcaacaccagatgctctactggtacttgaagtacatgactttgaagtcttgaccctccatgaatacctgaattatcagcaagcgggttttgaagctggtgcctcattgaggccatattagagcaacttgtacatttgacctcttgttatcagccatggtactctacttcgtgtgcaagagataactatgaaagccaaattcaaatactggcaacatttcctaaaggggctcaatatctatcattcgtcttcttttccaaactacacatcactgtatgactcaaccagtagcagttatattgccccttggtttttattcagtttaactactgtttccaagataaatgagctaataagctttaaaaaaaaaaaaaaaaaggctgaattcttttttcttcatcactggcatatctgcctattctccagaattattatgactattcagctcactttaacagttgaacttcaagcgacaatctttgaacaccccttctcatgtgatttaaaatgaaaccatttggaaaagtttcttctagccagtaatagattttttttttaattgctctgccttgtgccgagagatgttcttttaagatgaatcttttgatgtctgataccaccaaatataggtggtagggagagttggaggctggccctttgagcaggccattagcttacttgctgggcatttccgatagcttattgcctacctttttgctggaaacaaactgatttgaaaaacaaaatctatgaagactgcagctaaggattttatcggtagacttaagagcttttgtccttgtggatattttagtggaaccacatcagtctcaatactgtcattttacactgactcagagcagctgacttcattccttgccatgatatatatttaaggcaggcattgtaacagacataaagacaacttatctgtttcagcaggaaggattcagtttatgaactctcagaccagatcatgttgaacaaggagactttgatgtgtgtcatgagaaaactcattctttacttcccagtcaatttaaaggccagctatcctgagctactcgaatgaatgcactggttaaacattggaaatagtttgtttatatccttgtctctctctaggccaattgtgattacatgactcgactctacatctcgtcaaacaaggcctaggtctggttgctgtagactgctcgccctcaacaaataaaatctggttgactagcctccttgtatatacaactattatttgttaagaagaaattatcgtcaattttctactaccttccaattgtcagctctttttttcctctctggtttttcctatactttacagaaaaagacattgatctatactgccattccctctaatcctgccatactcagtcaaaaggaatgacttaagatgaagatgatcatctgctcgagtctaaaatatacattgtatataagaattggtgattagaaaagcaaaaaacctaaaacttaaatctaggagtctgtatactgtctccatgtctccatgcctcagatctcatctaaatctttgaacagcaccattcaaccaatctgaggccttgacttgcttgtaagatgattctcagagatcggctgagttaaaaaagatgacgacttgattaccaaagaaagtagggccaactttgacaaatctggctctgctgaccctgtcactcccagatgtagcatagactcctaaacagaacctcaagtctgattgaggataaggccttctcctgagctgaaagttctttggcagatgagcaagaaactgaaagctgatgtacctgactggctctgtaagatcagaaaactgtatccagaataagccctatggattaacccctgagtacccagagtaaaaactaatttacagaacttccttattgatctgctggttcttccagatcatattctggctattggtatggctggcctttctgaaggtaccctgcttgtctattttcctgactcagctcttgcctgcctttttcacatgttgctgcaattagactcaccgtgaggactacagtcaatttcagtctatcttgtgcccaatacaacaaggatttttaatagtaacaacccacacctcacccactaggactcaatgttcacaacaggaaggaccattgctgcatactccttgaccagcaacttttttgaagatatttttaagtgcagagtaggcctctattcctgtatgtaattgttcattttcagcacctggaacctcatctatcgggtctggaaggaatacagcagttcgaaagccgcgtccatttctctccttcagtagtgcagaaatgagtccgattcaccagtacacacagaactgtaccagttcaacctagcaaaagaagaaaagtttccactgtacttaaaatttacagctgactcaaattgcctcacagaattatttgatgtagaaggctagttgtcttacttcagatcagcaggacagttgggctctcagactcatgaccactgagtttgcttgtgttgaaactgtggtttcatccaacatatgctattggacatgattattattccattcaaatggattacagacttcttgaggacaggacaaacttatctctcatggtgtttttttagaatacttttataaccaaggaagaaaccatgccagctgttaccattcaacttcttaagcagagattaagctttttcatatctgttcttatcctggacatcagtagtttttaattgcccagcatccgttccatcttgtaacaactatcttcctttaccancgtggtgaccctaaggggacttccttacacaccttggaactnttccgagc

SEQ ID NO: 309577 - DNA, 7700 bp, Homo sapiens
gcgcaagttgcagcttcaccacctcccaagtgaaaaagctcctaggcactcacgatttcttttttcaaagccggaccaaacccagttcagggtggtggtcagattacctcacacttggcccacataaacacctcacaaatgacccgcccacagcacctcgggcaggccgcgccccgcccccacgtccctcagacaacagcctcagcctcccaggcccttcccgggcctcggtcccgtggccgcctccccacgaagaggagctactcccggcttccaaggaccggatcgagggcagtggcgagcgcaccacctgaccgggcactacccggatctcacaactgcctttgtccctccccgcggaattggaacccaacagccgcagagcgctcttggaaccatgtgctgctgccgcctccgccgccgccgccgctgcctccgccgccgcccgcgcgccgcccgcgcgccgcgctagttgagatggtgacaggattcagcaacacgaaattcggcgtttagagctgctctgccgccgccgtcacagacaccacagccaccgctttgtctccgatagtgcacacagccccggccacctcgcacactccccgacgccccaagcccccgaggcctccgcggagcattcagccaatcacaaagctgcagctcctcccgcccccgccctgatgtacagcctcctgattggcgggctgcgtgtccccatgtgaccggatcttggttggccggtcccgcccctgtcacgtgacagcgtgcgcctctcttcctgctttcctgaccctctccgccatttaaagaaacagtaccgggggcgggccgagcgacgcagccgggacggtagctgcggtgcggaccggaggagccatcttgtctcgtcgccggggagtcaggcccctaaatcgaagaagccctggcgcgccctccccccctcccgggtctggtagggcgaaggaacgggcgtgcggtcgatcgagcgatcggttggcggctctttctcctgctctggcatccagctcttggggcgcaggcccggccgccgcggcgcgcgcccggtggccgttggcgctcgcgccgcgtctttcttctcgtacgcagaactcgggcggcggcctatgcgtttgcgattcgacgaggagtcgtccgggtggtcggcggcggcgggcagctgctccgccccgctccgggggaggcggcggcggcagcggccgcgggatttggagcggccggggaggcgggggtggccggggccggcttggaggcctggcgccacccttcggggcctgcaaggacccagttgggggggcaggagggggccggaggatggttggttgtgggatttctactttgccttttcctccttatgccgccttagtgaggggcgggagctctggcggcagccccggggtggggagacgagctccggagtcggaagagctgggttttcttccgggcctagccaccagttggcggagtgaccttaggcgagtcactctgtaatttgtctgcgcctcagtttcctcctctgcctatcaatgtgtgtggggttgaaatcgctttgtaaactataaagcgtgggtgtacgtaaaggatggttattgtttataattttttttgagttgtaagaaaacttagcagttccccaatccttgggttttgaacctgggaaccttggattggagttggggatccccaaacttcctgaaattgtgggaatgtgcggtttgggggaatgatgggaatttgtgggaatgtgcgttttaggggaatgatgatccatcgctagcaagttttccaagggggctgtgacccagaagagttaagaatcacaatttcttcatgctacagagaggaaactgaggcctagatgtcatttgggacccttcacaaccattttgaagccctgtttgagtccctgggatatgtgagctgtttctatgcataatggatattcggggttaacaacagtcccctgcttggcttctattctgaatccttttctttcaccatggggtgcctgaagggtggctgatgcatatggtacaatggcacccagtgtaaagcagctacaattaggagtggatgtgttctgtagcatcctatttaaataagcctattttatcctttggcccgtcaactctgttatctgctgcttgtactggtgcctgtacttttctgactctcattgaccatattccacgaccatggttgtcatccattacttgatcctactttacatgtctagtctgtgtggttggtggtgaataggcttctttttacatggtgctgccagcccagctaattaatggtgcacgtggacttttagcaagcgggctcactggaagagactgaacctggcatggaattcctgaagatgtttggggttttttttctttcttaatcgaaagttaacattgtctgaaaagttttgttagaactactgcggaacctcaaaatcagtagatttggaagtgattcaaagctaaactttttccttggccctccttgtgttctaattgcttgcaagtgtaatactaggatgtccaagatgccagtttttgcttctttgttagttgtcagctgcttttatcaaatttcaggccattatccaacaaacactataaaaatgtttgaacaattggatttcaaacattttcgttttgtggagtggtgctcaccaagtggtacagccctaagcaagtgaacacaaacacatttaagtgtattttgtctgattagatgttagccagttatgctatttcattcaaatgtctgaaaaaatcaattgactattcccttttcctaaagggcagagacagataatctcacttccagagaaatgacttggagaaaaaaaagtgttggtctttttgctcttttgtaattaaatccggatgtacctcaaaagacttaagactgtggtgataagatgctttcctcagcagaaaggagggaaaaaaaacaactggaactcaaagcttgaaattctgtggcaaaacatgagatgtccaggattggaggttgaaaagatttcactacagtgttctgcaatagttggagcagataactttcagtgtagccacagccatggactccagatttccagattttcaagacctggacctggaacccgaaagagcttgtcacgatgcggcaggaacactggaggtagatttttttttatttttgaattttgggactgttgaccttgctgtgagaaaagagacaacgactgagcaagcactaccaccagcactgttactgggaattagaagacctgagtttctgtccagaccctcagtgcaaactgaggatgctccatccaaagtgaattatggtacttgccattttccaaaatgccttatcctttaccatctctgcacttttgttcatactctcattctactttggaactgctgctctgtggcttttcatctgtcaaaactgccattttctcagtatccaactcttatgccctcttttccatgagtctcctaactagccagaatagagctttaaagttttatgacatttcgttatgtatcctctatctgtatacaaaatcctgtaaaatagttacttgcctgcatttactgtctttgcagatagcagactccttgaaagcagggtccttgtttagtgcatctttgcccacatacaccacaacttatcaagatgcatttattaggaaggaggagtttagagagcaggctatcagaataaccacttcacctacagacctggtacctggatttttgcccgagatgattcctaccaccttactactgacgaagacacccattccagtggaccactgtgacccaggaggcattcagccatcatgatgtggcctttacctccactcctgtcttgttctacccagattcagcacagccctttatagtgaagtcagagtcctcaagccaaatagctaaagctgttttatcacaacaaaggcctagtttgttccatgagtgtgcatttcatttcttcagttaaagccttcagagacacacaataaatttggaccaggggattttttagttattaatgctctctgaagaaaggcaacatctttttgagagcagcattggaccacaccccacaatctcaaatgattgaaattcatgaacatctaggatcccatgaaggtcactggaccctgttttttctacttcaaatcctgtagtagcctactgaatgagaaaacatattctgacccattgggatcaaatcaaaggcacagtgaactcctcatagcatcttctttggaattactcaggaaccagaactttttacacaaatgtaagaaattctaccaaggagtccccttacctaacagcatctcacaaggctgcaccagattccagaaaaggcttctcttgatacatcaagcattttgtgaccgacttattcttagatcattggttttccaaaggctttgtggccatgaagccctttgagtgaaaactgtgcagaagcccagagtaaaagtgaagctgctctggatgaagtagtgaagcaagagtaggggcctgaatcctgctacaactatcttcctttaccaccgtggtgacacctaaggggacttccttacaacaccttgaactcttccgaacacagtttgaaaaccactgccccagacagcaatatgtttgacctgaatggcattccaatcttttctgtacctccactcagcacagttcatgttcagtagatgctgaacattcttagaaatactgtgtgtgaacttagaaaagtgcaagaagacaggcatgtctttgaccccaggaatgatcatttgctgaagatggtgtcaagtgaacctagattaacagccctccactccagatggatatccagtgattcctagaatgggatatagccagagaacaattctatgcaccctacactgacagactcccttaagcaacaccagatgctctactggtacttgaagtacatgactttgaagtcttgaccctccatgaatacctgaattatcagcaagcgggttttgaagctggtgcctcattgaggccatattagagcaacttgtacatttgacctcttgttatcagccatggtactctacttcgtgtgcaagagataactatgaaagccaaattcaaatactggcaacatttcctaaaggggctcaatatctatcattcgtcttcttttccaaactacacatcactgtatgactcaaccagtagcagttatattgccccttggtttttattcagtttaactactgtttccaagataaatgagctaataagctttaaaaaaaaaaaaaaaaaggctgaattcttttttcttcatcactggcatatctgcctattctccagaattattatgactattcagctcactttaacagttgaacttcaagcgacaatctttgaacaccccttctcatgtgatttaaaatgaaaccatttggaaaagtttcttctagccagtaatagattttttttttaattgctctgccttgtgccgagagatgttcttttaagatgaatcttttgatgtctgataccaccaaatataggtggtagggagagttggaggctggccctttgagcaggccattagcttacttgctgggcatttccgatagcttattgcctacctttttgctggaaacaaactgatttgaaaaacaaaatctatgaagactgcagctaaggattttatcggtagacttaagagcttttgtccttgtggatattttagtggaaccacatcagtctcaatactgtcattttacactgactcagagcagctgacttcattccttgccatgatatatatttaaggcaggcattgtaacagacataaagacaacttatctgtttcagcaggaaggattcagtttatgaactctcagaccagatcatgttgaacaaggagactttgatgtgtgtcatgagaaaactcattctttacttcccagtcaatttaaaggccagctatcctgagctactcgaatgaatgcactggttaaacattggaaatagtttgtttatatccttgtctctctctaggccaattgtgattacatgactcgactctacatctcgtcaaacaaggcctaggtctggttgctgtagactgctcgccctcaacaaataaaatctggttgactagcctccttgtatatacaactattatttgttaagaagaaattatcgtcaattttctactaccttccaattgtcagctctttttttcctctctggtttttcctatactttacagaaaaagacattgatctatactgccattccctctaatcctgccatactcagtcaaaaggaatgacttaagatgaagatgatcatctgctcgagtctaaaatatacattgtatataagaattggtgattagaaaagcaaaaaacctaaaacttaaatctaggagtctgtatactgtctccatgtctccatgcctcagatctcatctaaatctttgaacagcaccattcaaccaatctgaggccttgacttgcttgtaagatgattctcagagatcggctgagttaaaaaagatgacgacttgattaccaaagaaagtagggccaactttgacaaatctggctctgctgaccctgtcactcccagatgtagcatagactcctaaacagaacctcaagtctgattgaggataaggccttctcctgagctgaaagttctttggcagatgagcaagaaactgaaagctgatgtacctgactggctctgtaagatcagaaaactgtatccagaataagccctatggattaacccctgagtacccagagtaaaaactaatttacagaacttccttattgatctgctggttcttccagatcatattctggctattggtatggctggcctttctgaaggtaccctgcttgtctattttcctgactcagctcttgcctgcctttttcacatgttgctgcaattagactcaccgtgaggactacagtcaatttcagtctatcttgtgcccaatacaacaaggatttttaatagtaacaacccacacctcacccactaggactcaatgttcacaacaggaaggaccattgctgcatactccttgaccagcaacttttttgaagatatttttaagtgcagagtaggcctctattcctgtatgtaattgttcattttcagcacctggaacctcatctatcgggtctggaaggaatacagcagttcgaaagccgcgtccatttctctccttcagtagtgcagaaatgagtccgattcaccagtacacacagaactgtaccagttcaacctagcaaaagaagaaaagtttccactgtacttaaaatttacagctgactcaaattgcctcacagaattatttgatgtagaaggctagttgtcttacttcagatcagcaggacagttgggctctcagactcatgaccactgagtttgcttgtgttgaaactgtggtttcatccaacatatgctattggacatgattattattccattcaaatggattacagacttcttgaggacaggacaaacttatctctcatggtgtttttttagaatacttttataaccaaggaagaaaccatgccagctgttaccattcaacttcttaagcagagattaagctttttcatatctgttcttatcctgacgcgccatcgtgcgccttcggggatcctctag

SEQ ID NO: 309578 - DNA, 2036 bp, Homo sapiens
  misc_feature (39)..(40): n is a, c, g, or t
tacgaccgagctataccatgtccctagcgtcatatccanntagttgtgcccctggatccaaccgtgctgaagctagaatatcccctggacttttcagttatgtgaacaatctggttgactagcctccttgtatatacaactattatttgttaagaagaaattatcgtcaattttctactaccttccaattgtcagctctttttttcctctctggtttttcctatactttacagaaaaagacattgatctatactgccattccctctaatcctgccatactcagtcaaaaggaatgacttaagatgaagatgatcatctgctcgagtctaaaatatacattgtatataagaattggtgattagaaaagcaaaaaacctaaaacttaaatctaggagtctgtatactgtctccatgtctccatgcctcagatctcatctaaatctttgaacagcaccattcaaccaatctgaggccttgacttgcttgtaagatgattctcagagatcggctgagttaaaaaagatgacgacttgattaccaaagaaagtagggccaactttgacaaatctggctctgctgaccctgtcactcccagatgtagcatagactcctaaacagaacctcaagtctgattgaggataaggccttctcctgagctgaaagttctttggcagatgagcaagaaactgaaagctgatgtacctgactggctctgtaagatcagaaaactgtatccagaataagccctatggattaacccctgagtacccagagtaaaaactaatttacagaacttccttattgatctgctggttcttccagatcatattctggctattggtatggctggcctttctgaaggtaccctgcttgtctattttcctgactcagctcttgcctgcctttttcacatgttgctgcaattagactcaccgtgaggactacagtcaatttcagtctatcttgtgcccaatacaacaaggatttttaatagtaacaacccacacctcacccactaggactcaatgttcacaacaggaaggaccattgctgcatactccttgaccagcaacttttttgaagatatttttaagtgcagagtaggcctctattcctgtatgtaattgttcattttcagcacctggaacctcatctatcgggtctggaaggaatacagcagttcgaaagccgcgtccatttctctccttcagtagtgcagaaatgagtccgattcaccagtacacacagaactgtaccagttcaacctagcaaaagaagaaaagtttccactgtacttaaaatttacagctgactcaaattgcctcacagaattatttgatgtagaaggctagttgtcttacttcagatcagcaggacagttgggctctcagactcatgaccactgagtttgcttgtgttgaaactgtggtttcatccaacatatgctattggacatgattattattccattcaaatggattacagacttcttgaggacaggacaaacttatctctcatggtgtttttttagaatacttttataaccaaggaagaaaccatgccagctgttaccattcaacttcttaagcagagattaagctttttcatatctgttcttatcctggacatcagtagtttttaattgcccagcatccgttccatcttgtaacaactccctgatgtttcttaaaaccacctcttcctattttcagtctgtggtttggacagtctgacccaaccttgagctttgtgggtgaacatgtaattcagacctcatcaatcagcaaatccatctgaactgtggaggagaagctctctttactgagggtgctttagctttgtaggatgaaaacctcaaactaacagggcctaccatgtagagaatgaagccagtgcaggggaaagcagagccaaaatatggagagacttgaatcctgatgacagcgtttgtgcccctggatccaaccgtgcctgaagctagaatatcccctggacttttcagttatgtgaaccaataaatacccttttttgcttaa

SEQ ID NO: 309579 - DNA, 7372 bp, Homo sapiens
gcgcaagttgcagcttcaccacctcccaagtgaaaaagctcctaggcactcacgatttcttttttcaaagccggaccaaacccagttcagggtggtggtcagattacctcacacttggcccacataaacacctcacaaatgacccgcccacagcacctcgggcaggccgcgccccgcccccacgtccctcagacaacagcctcagcctcccaggcccttcccgggcctcggtcccgtggccgcctccccacgaagaggagctactcccggcttccaaggaccggatcgagggcagtggcgagcgcaccacctgaccgggcactacccggatctcacaactgcctttgtccctccccgcggaattggaacccaacagccgcagagcgctcttggaaccatgtgctgctgccgcctccgccgccgccgccgctgcctccgccgccgcccgcgcgccgcccgcgcgccgcgctagttgagatggtgacaggattcagcaacacgaaattcggcgtttagagctgctctgccgccgccgtcacagacaccacagccaccgctttgtctccgatagtgcacacagccccggccacctcgcacactccccgacgccccaagcccccgaggcctccgcggagcattcagccaatcacaaagctgcagctcctcccgcccccgccctgatgtacagcctcctgattggcgggctgcgtgtccccatgtgaccggatcttggttggccggtcccgcccctgtcacgtgacagcgtgcgcctctcttcctgctttcctgaccctctccgccatttaaagaaacagtaccgggggcgggccgagcgacgcagccgggacggtagctgcggtgcggaccggaggagccatcttgtctcgtcgccggggagtcaggcccctaaatcgaagaagccctggcgcgccctccccccctcccgggtctggtagggcgaaggaacgggcgtgcggtcgatcgagcgatcggttggcggctctttctcctgctctggcatccagctcttggggcgcaggcccggccgccgcggcgcgcgcccggtggccgttggcgctcgcgccgcgtctttcttctcgtacgcagaactcgggcggcggcctatgcgtttgcgattcgacgaggagtcgtccgggtggtcggcggcggcgggcagctgctccgccccgctccgggggaggcggcggcggcagcggccgcgggatttggagcggccggggaggcgggggtggccggggccggcttggaggcctggcgccacccttcggggcctgcaaggacccagttgggggggcaggagggggccggaggatggttggttgtgggatttctactttgccttttcctccttatgccgccttagtgaggggcgggagctctggcggcagccccggggtggggagacgagctccggagtcggaagagctgggttttcttccgggcctagccaccagttggcggagtgaccttaggcgagtcactctgtaatttgtctgcgcctcagtttcctcctctgcctatcaatgtgtgtggggttgaaatcgctttgtaaactataaagcgtgggtgtacgtaaaggatggttattgtttataattttttttgagttgtaagaaaacttagcagttccccaatccttgggttttgaacctgggaaccttggattggagttggggatccccaaacttcctgaaattgtgggaatgtgcggtttgggggaatgatgggaatttgtgggaatgtgcgttttaggggaatgatgatccatcgctagcaagttttccaagggggctgtgacccagaagagttaagaatcacaatttcttcatgctacagagaggaaactgaggcctagatgtcatttgggacccttcacaaccattttgaagccctgtttgagtccctgggatatgtgagctgtttctatgcataatggatattcggggttaacaacagtcccctgcttggcttctattctgaatccttttctttcaccatggggtgcctgaagggtggctgatgcatatggtacaatggcacccagtgtaaagcagctacaattaggagtggatgtgttctgtagcatcctatttaaataagcctattttatcctttggcccgtcaactctgttatctgctgcttgtactggtgcctgtacttttctgactctcattgaccatattccacgaccatggttgtcatccattacttgatcctactttacatgtctagtctgtgtggttggtggtgaataggcttctttttacatggtgctgccagcccagctaattaatggtgcacgtggacttttagcaagcgggctcactggaagagactgaacctggcatggaattcctgaagatgtttggggttttttttctttcttaatcgaaagttaacattgtctgaaaagttttgttagaactactgcggaacctcaaaatcagtagatttggaagtgattcaaagctaaactttttccttggccctccttgtgttctaattgcttgcaagtgtaatactaggatgtccaagatgccagtttttgcttctttgttagttgtcagctgcttttatcaaatttcaggccattatccaacaaacactataaaaatgtttgaacaattggatttcaaacattttcgttttgtggagtggtgctcaccaagtggtacagccctaagcaagtgaacacaaacacatttaagtgtattttgtctgattagatgttagccagttatgctatttcattcaaatgtctgaaaaaatcaattgactattcccttttcctaaagggcagagacagataatctcacttccagagaaatgacttggagaaaaaaaagtgttggtctttttgctcttttgtaattaaatccggatgtacctcaaaagacttaagactgtggtgataagatgctttcctcagcagaaaggagggaaaaaaaacaactggaactcaaagcttgaaattctgtggcaaaacatgagatgtccaggattggaggttgaaaagatttcactacagtgttctgcaatagttggagcagataactttcagtgtagccacagccatggactccagatttccagattttcaagacctggacctggaacccgaaagagcttgtcacgatgcggcaggaacactggaggtagatttttttttatttttgaattttgggactgttgaccttgctgtgagaaaagagacaacgactgagcaagcactaccaccagcactgttactgggaattagaagacctgagtttctgtccagaccctcagtgcaaactgaggatgctccatccaaagtgaattatggtacttgccattttccaaaatgccttatcctttaccatctctgcacttttgttcatactctcattctactttggaactgctgctctgtggcttttcatctgtcaaaactgccattttctcagtatccaactcttatgccctcttttccatgagtctcctaactagccagaatagagctttaaagttttatgacatttcgttatgtatcctctatctgtatacaaaatcctgtaaaatagttacttgcctgcatttactgtctttgcagatagcagactccttgaaagcagggtccttgtttagtgcatctttgcccacatacaccacaacttatcaagatgcatttattaggaaggaggagtttagagagcaggctatcagaataaccacttcacctacagacctggtacctggatttttgcccgagatgattcctaccaccttactactgacgaagacacccattccagtggaccactgtgacccaggaggcattcagccatcatgatgtggcctttacctccactcctgtcttgttctacccagattcagcacagccctttatagtgaagtcagagtcctcaagccaaatagctaaagctgttttatcacaacaaaggcctagtttgttccatgagtgtgcatttcatttcttcagttaaagccttcagagacacacaataaatttggaccaggggattttttagttattaatgctctctgaagaaaggcaacatctttttgagagcagcattggaccacaccccacaatctcaaatgattgaaattcatgaacatctaggatcccatgaaggtcactggaccctgttttttctacttcaaatcctgtagtagcctactgaatgagaaaacatattctgacccattgggatcaaatcaaaggcacagtgaactcctcatagcatcttctttggaattactcaggaaccagaactttttacacaaatgtaagaaattctaccaaggagtccccttacctaacagcatctcacaaggctgcaccagattccagaaaaggcttctcttgatacatcaagcattttgtgaccgacttattcttagatcattggttttccaaaggctttgtggccatgaagccctttgagtgaaaactgtgcagaagcccagagtaaaagtgaagctgctctggatgaagtagtgaagcaagagtaggggcctgaatcctgctacaactatcttcctttaccaccgtggtgacacctaaggggacttccttacaacaccttgaactcttccgaacacagtttgaaaaccactgccccagacagcaatatgtttgacctgaatggcattccaatcttttctgtacctccactcagcacagttcatgttcagtagatgctgaacattcttagaaatactgtgtgtgaacttagaaaagtgcaagaagacaggcatgtctttgaccccaggaatgatcatttgctgaagatggtgtcaagtgaacctagattaacagccctccactccagatggatatccagtgattcctagaatgggatatagccagagaacaattctatgcaccctacactgacagactcccttaagcaacaccagatgctctactggtacttgaagtacatgactttgaagtcttgaccctccatgaatacctgaattatcagcaagcgggttttgaagctggtgcctcattgaggccatattagagcaacttgtacatttgacctcttgttatcagccatggtactctacttcgtgtgcaagagataactatgaaagccaaattcaaatactggcaacatttcctaaaggggctcaatatctatcattcgtcttcttttccaaactacacatcactgtatgactcaaccagtagcagttatattgccccttggtttttattcagtttaactactgtttccaagataaatgagctaataagctttaaaaaaaaaaaaaaaaaggctgaattcttttttcttcatcactggcatatctgcctattctccagaattattatgactattcagctcactttaacagttgaacttcaagcgacaatctttgaacaccccttctcatgtgatttaaaatgaaaccatttggaaaagtttcttctagccagtaatagattttttttttaattgctctgccttgtgccgagagatgttcttttaagatgaatcttttgatgtctgataccaccaaatataggtggtagggagagttggaggctggccctttgagcaggccattagcttacttgctgggcatttccgatagcttattgcctacctttttgctggaaacaaactgatttgaaaaacaaaatctatgaagactgcagctaaggattttatcggtagacttaagagcttttgtccttgtggatattttagtggaaccacatcagtctcaatactgtcattttacactgactcagagcagctgacttcattccttgccatgatatatatttaaggcaggcattgtaacagacataaagacaacttatctgtttcagcaggaaggattcagtttatgaactctcagaccagatcatgttgaacaaggagactttgatgtgtgtcatgagaaaactcattctttacttcccagtcaatttaaaggccagctatcctgagctactcgaatgaatgcactggttaaacattggaaatagtttgtttatatccttgtctctctctaggccaattgtgattacatgactcgactctacatctcgtcaaacaaggcctaggtctggttgctgtagactgctcgccctcaacaaataaaatctggttgactagcctccttgtatatacaactattatttgttaagaagaaattatcgtcaattttctactaccttccaattgtcagctctttttttcctctctggtttttcctatactttacagaaaaagacattgatctatactgccattccctctaatcctgccatactcagtcaaaaggaatgacttaagatgaagatgatcatctgctcgagtctaaaatatacattgtatataagaattggtgattagaaaagcaaaaaacctaaaacttaaatctaggagtctgtatactgtctccatgtctccatgcctcagatctcatctaaatctttgaacagcaccattcaaccaatctgaggccttgacttgcttgtaagatgattctcagagatcggctgagttaaaaaagatgacgacttgattaccaaagaaagtagggccaactttgacaaatctggctctgctgaccctgtcactcccagatgtagcatagactcctaaacagaacctcaagtctgattgaggataaggccttctcctgagctgaaagttctttggcagatgagcaagaaactgaaagctgatgtacctgactggctctgtaagatcagaaaactgtatccagaataagccctatggattaacccctgagtacccagagtaaaaactaatttacagaacttccttattgatctgctggttcttccagatcatattctggctattggtatggctggcctttctgaaggtaccctgcttgtctattttcctgactcagctcttgcctgcctttttcacatgttgctgcaattagactcaccgtgaggactacagtcaatttcagtctatcttgtgcccaatacaacaaggatttttaatagtaacaacccacacctcacccactaggactcaatgttcacaacaggaaggaccattgctgcatactccttgaccagcaacttttttgaagatatttttaagtgcagagtaggcctctattcctgtatgtaattgttcattttcagcacctggaacctcatctatcgggtctggaaggaatacagcagttcgaaagccgcgtccatttctctccttcagtagtgcagaaatgagtccgattcaccagtacacacagaactgtaccagttcaacctagcgaagaccccaaaagagcgaaagaccccgaaagagcagagacccaaaaggggtccgagct

SEQ ID NO: 309580 - DNA, 4974 bp, Homo sapiens
gcgcaagttgcagcttcaccacctcccaagtgaaaaagctcctaggcactcacgatttcttttttcaaagccggaccaaacccagttcagggtggtggtcagattacctcacacttggcccacataaacacctcacaaatgacccgcccacagcacctcgggcaggccgcgccccgcccccacgtccctcagacaacagcctcagcctcccaggcccttcccgggcctcggtcccgtggccgcctccccacgaagaggagctactcccggcttccaaggaccggatcgagggcagtggcgagcgcaccacctgaccgggcactacccggatctcacaactgcctttgtccctccccgcggaattggaacccaacagccgcagagcgctcttggaaccatgtgctgctgccgcctccgccgccgccgccgctgcctccgccgccgcccgcgcgccgcccgcgcgccgcgctagttgagatggtgacaggattcagcaacacgaaattcggcgtttagagctgctctgccgccgccgtcacagacaccacagccaccgctttgtctccgatagtgcacacagccccggccacctcgcacactccccgacgccccaagcccccgaggcctccgcggagcattcagccaatcacaaagctgcagctcctcccgcccccgccctgatgtacagcctcctgattggcgggctgcgtgtccccatgtgaccggatcttggttggccggtcccgcccctgtcacgtgacagcgtgcgcctctcttcctgctttcctgaccctctccgccatttaaagaaacagtaccgggggcgggccgagcgacgcagccgggacggtagctgcggtgcggaccggaggagccatcttgtctcgtcgccggggagtcaggcccctaaatcgaagaagccctggcgcgccctccccccctcccgggtctggtagggcgaaggaacgggcgtgcggtcgatcgagcgatcggttggcggctctttctcctgctctggcatccagctcttggggcgcaggcccggccgccgcggcgcgcgcccggtggccgttggcgctcgcgccgcgtctttcttctcgtacgcagaactcgggcggcggcctatgcgtttgcgattcgacgaggagtcgtccgggtggtcggcggcggcgggcagctgctccgccccgctccgggggaggcggcggcggcagcggccgcgggatttggagcggccggggaggcgggggtggccggggccggcttggaggcctggcgccacccttcggggcctgcaaggacccagttgggggggcaggagggggccggaggatggttggttgtgggatttctactttgccttttcctccttatgccgccttagtgaggggcgggagctctggcggcagccccggggtggggagacgagctccggagtcggaagagctgggttttcttccgggcctagccaccagttggcggagtgaccttaggcgagtcactctgtaatttgtctgcgcctcagtttcctcctctgcctatcaatgtgtgtggggttgaaatcgctttgtaaactataaagcgtgggtgtacgtaaaggatggttattgtttataattttttttgagttgtaagaaaacttagcagttccccaatccttgggttttgaacctgggaaccttggattggagttggggatccccaaacttcctgaaattgtgggaatgtgcggtttgggggaatgatgggaatttgtgggaatgtgcgttttaggggaatgatgatccatcgctagcaagttttccaagggggctgtgacccagaagagttaagaatcacaatttcttcatgctacagagaggaaactgaggcctagatgtcatttgggacccttcacaaccattttgaagccctgtttgagtccctgggatatgtgagctgtttctatgcataatggatattcggggttaacaacagtcccctgcttggcttctattctgaatccttttctttcaccatggggtgcctgaagggtggctgatgcatatggtacaatggcacccagtgtaaagcagctacaattaggagtggatgtgttctgtagcatcctatttaaataagcctattttatcctttggcccgtcaactctgttatctgctgcttgtactggtgcctgtacttttctgactctcattgaccatattccacgaccatggttgtcatccattacttgatcctactttacatgtctagtctgtgtggttggtggtgaataggcttctttttacatggtgctgccagcccagctaattaatggtgcacgtggacttttagcaagcgggctcactggaagagactgaacctggcatggaattcctgaagatgtttggggttttttttctttcttaatcgaaagttaacattgtctgaaaagttttgttagaactactgcggaacctcaaaatcagtagatttggaagtgattcaaagctaaactttttccttggccctccttgtgttctaattgcttgcaagtgtaatactaggatgtccaagatgccagtttttgcttctttgttagttgtcagctgcttttatcaaatttcaggccattatccaacaaacactataaaaatgtttgaacaattggatttcaaacattttcgttttgtggagtggtgctcaccaagtggtacagccctaagcaagtgaacacaaacacatttaagtgtattttgtctgattagatgttagccagttatgctatttcattcaaatgtctgaaaaaatcaattgactattcccttttcctaaagggcagagacagataatctcacttccagagaaatgacttggagaaaaaaaagtgttggtctttttgctcttttgtaattaaatccggatgtacctcaaaagacttaagactgtggtgataagatgctttcctcagcagaaaggagggaaaaaaaacaactggaactcaaagcttgaaattctgtggcaaaacatgagatgtccaggattggaggttgaaaagatttcactacagtgttctgcaatagttggagcagataactttcagtgtagccacagccatggactccagatttccagattttcaagacctggacctggaacccgaaagagcttgtcacgatgcggcaggaacactggaggtagatttttttttatttttgaattttgggactgttgaccttgctgtgagaaaagagacaacgactgagcaagcactaccaccagcactgttactgggaattagaagacctgagtttctgtccagaccctcagtgcaaactgaggatgctccatccaaagtgaattatgtcctgtgcctcctgattgctgagtgttcacctggaccttctgactaccttccctgtgctattccatcagcctacagacctggtacctggatttttgcccgagatgattcctaccaccttactactgacgaagacacccattccagtggaccactgtgacccaggaggcattcagccatcatgatgtggcctttacctccactcctgtcttgttctacccagattcagcacagccctttatagtgaagtcagagtcctcaagccaaatagctaaagctgttttatcacaacaaaggcctagtttgttccatgagtgtgcatttcatttcttcagttaaagccttcagagacacacaataaatttggaccaggggattttttagttattaatgctctctgaagaaaggcaacatctttttgagagcagcattggaccacaccccacaatctcaaatgattgaaattcatgaacatctaggatcccatgaaggtcactggaccctgttttttctacttcaaatcctgtagtagcctactgaatgagaaaacatattctgacccattgggatcaaatcaaaggcacagtgaactcctcatagcatcttctttggaattactcaggaaccagaactttttacacaaatgtaagaaattctaccaaggagtccccttacctaacagcatctcacaaggctgcaccagattccagaaaaggcttctcttgatacatcaagcattttgtgaccgacttattcttagatcattggttttccaaaggctttgtggccatgaagccctttgagtgaaaactgtgcagaagcccagagtaaaagtgaagctgctctggatgaagtagtgaagcaagagtaggggcctgaatcctgctacaactatcttcctttaccaccgtggtgacacctaaggggacttccttacaacaccttgaactcttccgaacacagtttgaaaaccactgccccagacagcaatatgtttgacctgaatggcattccaatcttttctgtacctccactcagcacagttcatgttcagtagatgctgaacattcttagaaatactgtgtgtgaacttagaaaagtgcaagaagacaggcatgtctttgaccccaggaatgatcatttgctgaagatggtgtcaagtgaacctagattaacagccctccactccagatggatatccagtgattcctagaatgggatatagccagagaacaattctatgcaccctacactgacagactcccttaagcaacaccagatgctctactggtacttgaagtacatgactttgaagtcttgaccctccatgaatacctgaattatcagcaagcgggttttgaagctggtgcctcattgaggccatattagagcaacttgtacatttgacctcttgttatcagccatggtactctacttcgtgtgcaagagataactatgaaagccaaattcaaatactggcaacatttcctaaaggggctcaatatctatcattcgtcttcttttccaaactacacatcactgtatgactcaaccagtagcagttatattgccccttggtttttattcagtttaactactgtttccaagataaatgagctaataagcttta

SEQ ID NO: 309581 - DNA, 6895 bp, Homo sapiens
gcgcaagttgcagcttcaccacctcccaagtgaaaaagctcctaggcactcacgatttcttttttcaaagccggaccaaacccagttcagggtggtggtcagattacctcacacttggcccacataaacacctcacaaatgacccgcccacagcacctcgggcaggccgcgccccgcccccacgtccctcagacaacagcctcagcctcccaggcccttcccgggcctcggtcccgtggccgcctccccacgaagaggagctactcccggcttccaaggaccggatcgagggcagtggcgagcgcaccacctgaccgggcactacccggatctcacaactgcctttgtccctccccgcggaattggaacccaacagccgcagagcgctcttggaaccatgtgctgctgccgcctccgccgccgccgccgctgcctccgccgccgcccgcgcgccgcccgcgcgccgcgctagttgagatggtgacaggattcagcaacacgaaattcggcgtttagagctgctctgccgccgccgtcacagacaccacagccaccgctttgtctccgatagtgcacacagccccggccacctcgcacactccccgacgccccaagcccccgaggcctccgcggagcattcagccaatcacaaagctgcagctcctcccgcccccgccctgatgtacagcctcctgattggcgggctgcgtgtccccatgtgaccggatcttggttggccggtcccgcccctgtcacgtgacagcgtgcgcctctcttcctgctttcctgaccctctccgccatttaaagaaacagtaccgggggcgggccgagcgacgcagccgggacggtagctgcggtgcggaccggaggagccatcttgtctcgtcgccggggagtcaggcccctaaatcgaagaagccctggcgcgccctccccccctcccgggtctggtagggcgaaggaacgggcgtgcggtcgatcgagcgatcggttggcggctctttctcctgctctggcatccagctcttggggcgcaggcccggccgccgcggcgcgcgcccggtggccgttggcgctcgcgccgcgtctttcttctcgtacgcagaactcgggcggcggcctatgcgtttgcgattcgacgaggagtcgtccgggtggtcggcggcggcgggcagctgctccgccccgctccgggggaggcggcggcggcagcggccgcgggatttggagcggccggggaggcgggggtggccggggccggcttggaggcctggcgccacccttcggggcctgcaaggacccagttgggggggcaggagggggccggaggatggttggttgtgggatttctactttgccttttcctccttatgccgccttagtgaggggcgggagctctggcggcagccccggggtggggagacgagctccggagtcggaagagctgggttttcttccgggcctagccaccagttggcggagtgaccttaggcgagtcactctgtaatttgtctgcgcctcagtttcctcctctgcctatcaatgtgtgtggggttgaaatcgctttgtaaactataaagcgtgggtgtacgtaaaggatggttattgtttataattttttttgagttgtaagaaaacttagcagttccccaatccttgggttttgaacctgggaaccttggattggagttggggatccccaaacttcctgaaattgtgggaatgtgcggtttgggggaatgatgggaatttgtgggaatgtgcgttttaggggaatgatgatccatcgctagcaagttttccaagggggctgtgacccagaagagttaagaatcacaatttcttcatgctacagagaggaaactgaggcctagatgtcatttgggacccttcacaaccattttgaagccctgtttgagtccctgggatatgtgagctgtttctatgcataatggatattcggggttaacaacagtcccctgcttggcttctattctgaatccttttctttcaccatggggtgcctgaagggtggctgatgcatatggtacaatggcacccagtgtaaagcagctacaattaggagtggatgtgttctgtagcatcctatttaaataagcctattttatcctttggcccgtcaactctgttatctgctgcttgtactggtgcctgtacttttctgactctcattgaccatattccacgaccatggttgtcatccattacttgatcctactttacatgtctagtctgtgtggttggtggtgaataggcttctttttacatggtgctgccagcccagctaattaatggtgcacgtggacttttagcaagcgggctcactggaagagactgaacctggcatggaattcctgaagatgtttggggttttttttctttcttaatcgaaagttaacattgtctgaaaagttttgttagaactactgcggaacctcaaaatcagtagatttggaagtgattcaaagctaaactttttccttggccctccttgtgttctaattgcttgcaagtgtaatactaggatgtccaagatgccagtttttgcttctttgttagttgtcagctgcttttatcaaatttcaggccattatccaacaaacactataaaaatgtttgaacaattggatttcaaacattttcgttttgtggagtggtgctcaccaagtggtacagccctaagcaagtgaacacaaacacatttaagtgtattttgtctgattagatgttagccagttatgctatttcattcaaatgtctgaaaaaatcaattgactattcccttttcctaaagggcagagacagataatctcacttccagagaaatgacttggagaaaaaaaagtgttggtctttttgctcttttgtaattaaatccggatgtacctcaaaagacttaagactgtggtgataagatgctttcctcagcagaaaggagggaaaaaaaacaactggaactcaaagcttgaaattctgtggcaaaacatgagatgtccaggattggaggttgaaaagatttcactacagtgttctgcaatagttggagcagataactttcagtgtagccacagccatggactccagatttccagattttcaagacctggacctggaacccgaaagagcttgtcacgatgcggcaggaacactggaggtagatttttttttatttttgaattttgggactgttgaccttgctgtgagaaaagagacaacgactgagcaagcactaccaccagcactgttactgggaattagaagacctgagtttctgtccagaccctcagtgcaaactgaggatgctccatccaaagtgaattatggtacttgccattttccaaaatgccttatcctttaccatctctgcacttttgttcatactctcattctactttggaactgctgctctgtggcttttcatctgtcaaaactgccattttctcagtatccaactcttatgccctcttttccatgagtctcctaactagccagaatagagctttaaagttttatgacatttcgttatgtatcctctatctgtatacaaaatcctgtaaaatagttacttgcctgcatttactgtctttgcagatagcagactccttgaaagcagggtccttgtttagtgcatctttgcccacatacaccacaacttatcaagatgcatttattaggaaggaggagtttagagagcaggctatcagaataaccacttcacctacagacctggtacctggatttttgcccgagatgattcctaccaccttactactgacgaagacacccattccagtggaccactgtgacccaggaggcattcagccatcatgatgtggcctttacctccactcctgtcttgttctacccagattcagcacagccctttatagtgaagtcagagtcctcaagccaaatagctaaagctgttttatcacaacaaaggcctagtttgttccatgagtgtgcatttcatttcttcagttaaagccttcagagacacacaataaatttggaccaggggattttttagttattaatgctctctgaagaaaggcaacatctttttgagagcagcattggaccacaccccacaatctcaaatgattgaaattcatgaacatctaggatcccatgaaggtcactggaccctgttttttctacttcaaatcctgtagtagcctactgaatgagaaaacatattctgacccattgggatcaaatcaaaggcacagtgaactcctcatagcatcttctttggaattactcaggaaccagaactttttacacaaatgtaagaaattctaccaaggagtccccttacctaacagcatctcacaaggctgcaccagattccagaaaaggcttctcttgatacatcaagcattttgtgaccgacttattcttagatcattggttttccaaaggctttgtggccatgaagccctttgagtgaaaactgtgcagaagcccagagtaaaagtgaagctgctctggatgaagtagtgaagcaagagtaggggcctgaatcctgctacaactatcttcctttaccaccgtggtgacacctaaggggacttccttacaacaccttgaactcttccgaacacagtttgaaaaccactgccccagacagcaatatgtttgacctgaatggcattccaatcttttctgtacctccactcagcacagttcatgttcagtagatgctgaacattcttagaaatactgtgtgtgaacttagaaaagtgcaagaagacaggcatgtctttgaccccaggaatgatcatttgctgaagatggtgtcaagtgaacctagattaacagccctccactccagatggatatccagtgattcctagaatgggatatagccagagaacaattctatgcaccctacactgacagactcccttaagcaacaccagatgctctactggtacttgaagtacatgactttgaagtcttgaccctccatgaatacctgaattatcagcaagcgggttttgaagctggtgcctcattgaggccatattagagcaacttgtacatttgacctcttgttatcagccatggtactctacttcgtgtgcaagagataactatgaaagccaaattcaaatactggcaacatttcctaaaggggctcaatatctatcattcgtcttcttttccaaactacacatcactgtatgactcaaccagtagcagttatattgccccttggtttttattcagtttaactactgtttccaagataaatgagctaataagctttaaaaaaaaaaaaaaaaaggctgaattcttttttcttcatcactggcatatctgcctattctccagaattattatgactattcagctcactttaacagttgaacttcaagcgacaatctttgaacaccccttctcatgtgatttaaaatgaaaccatttggaaaagtttcttctagccagtaatagattttttttttaattgctctgccttgtgccgagagatgttcttttaagatgaatcttttgatgtctgataccaccaaatataggtggtagggagagttggaggctggccctttgagcaggccattagcttacttgctgggcatttccgatagcttattgcctacctttttgctggaaacaaactgatttgaaaaacaaaatctatgaagactgcagctaaggattttatcggtagacttaagagcttttgtccttgtggatattttagtggaaccacatcagtctcaatactgtcattttacactgactcagagcagctgacttcattccttgccatgatatatatttaaggcaggcattgtaacagacataaagacaacttatctgtttcagcaggaaggattcagtttatgaactctcagaccagatcatgttgaacaaggagactttgatgtgtgtcatgagaaaactcattctttacttcccagtcaatttaaaggccagctatcctgagctactcgaatgaatgcactggttaaacattggaaatagtttgtttatatccttgtctctctctaggccaattgtgattacatgactcgactctacatctcgtcaaacaaggcctaggtctggttgctgtagactgctcgccctcaacaaataaaatctggttgactagcctccttgtatatacaactattatttgttaagaagaaattatcgtcaattttctactaccttccaattgtcagctctttttttcctctctggtttttcctatactttacagaaaaagacattgatctatactgccattccctctaatcctgccatactcagtcaaaaggaatgacttaagatgaagatgatcatctgctcgagtctaaaatatacattgtatataagaattggtgattagaaaagcaaaaaacctaaaacttaaatctaggagtctgtatactgtctccatgtctccatgcctcagatctcatctaaatctttgaacagcaccattcaaccaatctgaggccttgacttgcttgtaagatgattctcagagatcggctgagttaaaaaagatgacgacttgattaccaaagaaagtagggccaactttgacaaatctggctctgctgaccctgtcactcccagatgtacaaatccatctgaactgtggaggagaagctctctttactgagggtgctttagctttgtaggatgaaaacctcaaactaacagggcctaccatgtagagaatgaagccagtgcaggggaaagcagagccaaaatatggagagacttgaatcctgatgacagcgtttgtgcccctggatccaaccgtgcctgaagctagaatatcccctggacttttcagttatgtgaaccaataaatacccttttttgcttaa

SEQ ID NO: 309582 - DNA, 6700 bp, Homo sapiens
gcgcaagttgcagcttcaccacctcccaagtgaaaaagctcctaggcactcacgatttcttttttcaaagccggaccaaacccagttcagggtggtggtcagattacctcacacttggcccacataaacacctcacaaatgacccgcccacagcacctcgggcaggccgcgccccgcccccacgtccctcagacaacagcctcagcctcccaggcccttcccgggcctcggtcccgtggccgcctccccacgaagaggagctactcccggcttccaaggaccggatcgagggcagtggcgagcgcaccacctgaccgggcactacccggatctcacaactgcctttgtccctccccgcggaattggaacccaacagccgcagagcgctcttggaaccatgtgctgctgccgcctccgccgccgccgccgctgcctccgccgccgcccgcgcgccgcccgcgcgccgcgctagttgagatggtgacaggattcagcaacacgaaattcggcgtttagagctgctctgccgccgccgtcacagacaccacagccaccgctttgtctccgatagtgcacacagccccggccacctcgcacactccccgacgccccaagcccccgaggcctccgcggagcattcagccaatcacaaagctgcagctcctcccgcccccgccctgatgtacagcctcctgattggcgggctgcgtgtccccatgtgaccggatcttggttggccggtcccgcccctgtcacgtgacagcgtgcgcctctcttcctgctttcctgaccctctccgccatttaaagaaacagtaccgggggcgggccgagcgacgcagccgggacggtagctgcggtgcggaccggaggagccatcttgtctcgtcgccggggagtcaggcccctaaatcgaagaagccctggcgcgccctccccccctcccgggtctggtagggcgaaggaacgggcgtgcggtcgatcgagcgatcggttggcggctctttctcctgctctggcatccagctcttggggcgcaggcccggccgccgcggcgcgcgcccggtggccgttggcgctcgcgccgcgtctttcttctcgtacgcagaactcgggcggcggcctatgcgtttgcgattcgacgaggagtcgtccgggtggtcggcggcggcgggcagctgctccgccccgctccgggggaggcggcggcggcagcggccgcgggatttggagcggccggggaggcgggggtggccggggccggcttggaggcctggcgccacccttcggggcctgcaaggacccagttgggggggcaggagggggccggaggatggttggttgtgggatttctactttgccttttcctccttatgccgccttagtgaggggcgggagctctggcggcagccccggggtggggagacgagctccggagtcggaagagctgggttttcttccgggcctagccaccagttggcggagtgaccttaggcgagtcactctgtaatttgtctgcgcctcagtttcctcctctgcctatcaatgtgtgtggggttgaaatcgctttgtaaactataaagcgtgggtgtacgtaaaggatggttattgtttataattttttttgagttgtaagaaaacttagcagttccccaatccttgggttttgaacctgggaaccttggattggagttggggatccccaaacttcctgaaattgtgggaatgtgcggtttgggggaatgatgggaatttgtgggaatgtgcgttttaggggaatgatgatccatcgctagcaagttttccaagggggctgtgacccagaagagttaagaatcacaatttcttcatgctacagagaggaaactgaggcctagatgtcatttgggacccttcacaaccattttgaagccctgtttgagtccctgggatatgtgagctgtttctatgcataatggatattcggggttaacaacagtcccctgcttggcttctattctgaatccttttctttcaccatggggtgcctgaagggtggctgatgcatatggtacaatggcacccagtgtaaagcagctacaattaggagtggatgtgttctgtagcatcctatttaaataagcctattttatcctttggcccgtcaactctgttatctgctgcttgtactggtgcctgtacttttctgactctcattgaccatattccacgaccatggttgtcatccattacttgatcctactttacatgtctagtctgtgtggttggtggtgaataggcttctttttacatggtgctgccagcccagctaattaatggtgcacgtggacttttagcaagcgggctcactggaagagactgaacctggcatggaattcctgaagatgtttggggttttttttctttcttaatcgaaagttaacattgtctgaaaagttttgttagaactactgcggaacctcaaaatcagtagatttggaagtgattcaaagctaaactttttccttggccctccttgtgttctaattgcttgcaagtgtaatactaggatgtccaagatgccagtttttgcttctttgttagttgtcagctgcttttatcaaatttcaggccattatccaacaaacactataaaaatgtttgaacaattggatttcaaacattttcgttttgtggagtggtgctcaccaagtggtacagccctaagcaagtgaacacaaacacatttaagtgtattttgtctgattagatgttagccagttatgctatttcattcaaatgtctgaaaaaatcaattgactattcccttttcctaaagggcagagacagataatctcacttccagagaaatgacttggagaaaaaaaagtgttggtctttttgctcttttgtaattaaatccggatgtacctcaaaagacttaagactgtggtgataagatgctttcctcagcagaaaggagggaaaaaaaacaactggaactcaaagcttgaaattctgtggcaaaacatgagatgtccaggattggaggttgaaaagatttcactacagtgttctgcaatagttggagcagataactttcagtgtagccacagccatggactccagatttccagattttcaagacctggacctggaacccgaaagagcttgtcacgatgcggcaggaacactggaggtagatttttttttatttttgaattttgggactgttgaccttgctgtgagaaaagagacaacgactgagcaagcactaccaccagcactgttactgggaattagaagacctgagtttctgtccagaccctcagtgcaaactgaggatgctccatccaaagtgaattatggtacttgccattttccaaaatgccttatcctttaccatctctgcacttttgttcatactctcattctactttggaactgctgctctgtggcttttcatctgtcaaaactgccattttctcagtatccaactcttatgccctcttttccatgagtctcctaactagccagaatagagctttaaagttttatgacatttcgttatgtatcctctatctgtatacaaaatcctgtaaaatagttacttgcctgcatttactgtctttgcagatagcagactccttgaaagcagggtccttgtttagtgcatctttgcccacatacaccacaacttatcaagatgcatttattaggaaggaggagtttagagagcaggctatcagaataaccacttcacctacagacctggtacctggatttttgcccgagatgattcctaccaccttactactgacgaagacacccattccagtggaccactgtgacccaggaggcattcagccatcatgatgtggcctttacctccactcctgtcttgttctacccagattcagcacagccctttatagtgaagtcagagtcctcaagccaaatagctaaagctgttttatcacaacaaaggcctagtttgttccatgagtgtgcatttcatttcttcagttaaagccttcagagacacacaataaatttggaccaggggattttttagttattaatgctctctgaagaaaggcaacatctttttgagagcagcattggaccacaccccacaatctcaaatgattgaaattcatgaacatctaggatcccatgaaggtcactggaccctgttttttctacttcaaatcctgtagtagcctactgaatgagaaaacatattctgacccattgggatcaaatcaaaggcacagtgaactcctcatagcatcttctttggaattactcaggaaccagaactttttacacaaatgtaagaaattctaccaaggagtccccttacctaacagcatctcacaaggctgcaccagattccagaaaaggcttctcttgatacatcaagcattttgtgaccgacttattcttagatcattggttttccaaaggctttgtggccatgaagccctttgagtgaaaactgtgcagaagcccagagtaaaagtgaagctgctctggatgaagtagtgaagcaagagtaggggcctgaatcctgctacaactatcttcctttaccaccgtggtgacacctaaggggacttccttacaacaccttgaactcttccgaacacagtttgaaaaccactgccccagacagcaatatgtttgacctgaatggcattccaatcttttctgtacctccactcagcacagttcatgttcagtagatgctgaacattcttagaaatactgtgtgtgaacttagaaaagtgcaagaagacaggcatgtctttgaccccaggaatgatcatttgctgaagatggtgtcaagtgaacctagattaacagccctccactccagatggatatccagtgattcctagaatgggatatagccagagaacaattctatgcaccctacactgacagactcccttaagcaacaccagatgctctactggtacttgaagtacatgactttgaagtcttgaccctccatgaatacctgaattatcagcaagcgggttttgaagctggtgcctcattgaggccatattagagcaacttgtacatttgacctcttgttatcagccatggtactctacttcgtgtgcaagagataactatgaaagccaaattcaaatactggcaacatttcctaaaggggctcaatatctatcattcgtcttcttttccaaactacacatcactgtatgactcaaccagtagcagttatattgccccttggtttttattcagtttaactactgtttccaagataaatgagctaataagctttaaaaaaaaaaaaaaaaaggctgaattcttttttcttcatcactggcatatctgcctattctccagaattattatgactattcagctcactttaacagttgaacttcaagcgacaatctttgaacaccccttctcatgtgatttaaaatgaaaccatttggaaaagtttcttctagccagtaatagattttttttttaattgctctgccttgtgccgagagatgttcttttaagatgaatcttttgatgtctgataccaccaaatataggtggtagggagagttggaggctggccctttgagcaggccattagcttacttgctgggcatttccgatagcttattgcctacctttttgctggaaacaaactgatttgaaaaacaaaatctatgaagactgcagctaaggattttatcggtagacttaagagcttttgtccttgtggatattttagtggaaccacatcagtctcaatactgtcattttacactgactcagagcagctgacttcattccttgccatgatatatatttaaggcaggcattgtaacagacataaagacaacttatctgtttcagcaggaaggattcagtttatgaactctcagaccagatcatgttgaacaaggagactttgatgtgtgtcatgagaaaactcattctttacttcccagtcaatttaaaggccagctatcctgagctactcgaatgaatgcactggttaaacattggaaatagtttgtttatatccttgtctctctctaggccaattgtgattacatgactcgactctacatctcgtcaaacaaggcctaggtctggttgctgtagactgctcgccctcaacaaataaaatctggttgactagcctccttgtatatacaactattatttgttaagaagaaattatcgtcaattttctactaccttccaattgtcagctctttttttcctctctggtttttcctatactttacagaaaaagacattgatctatactgccattccctctaatcctgccatactcagtcaaaaggaatgacttaagatgaagatgatcatctgctcgagtctaaaatatacattgtatataagaattggtgattagaaaagcaaaaaacctaaaacttaaatctaggagtctgtatactgtctccatgtctccatgcctcagatctcatctaaatctttgaacagcaccattcaaccaatctgaggccttgacttgcttgtaagatgattctcagagatcggctgagttaaaaaagatgacgacttgattaccaaagaactttcagctcaggagaaggccttatcctcaatcagacttgaggttctgtttaggagtctatgctacatctgggagtgacagggtcagcagagccagatttgtcaaagttggc

SEQ ID NO: 309583 - DNA, 5031 bp, Homo sapiens
gcgcaagttgcagcttcaccacctcccaagtgaaaaagctcctaggcactcacgatttcttttttcaaagccggaccaaacccagttcagggtggtggtcagattacctcacacttggcccacataaacacctcacaaatgacccgcccacagcacctcgggcaggccgcgccccgcccccacgtccctcagacaacagcctcagcctcccaggcccttcccgggcctcggtcccgtggccgcctccccacgaagaggagctactcccggcttccaaggaccggatcgagggcagtggcgagcgcaccacctgaccgggcactacccggatctcacaactgcctttgtccctccccgcggaattggaacccaacagccgcagagcgctcttggaaccatgtgctgctgccgcctccgccgccgccgccgctgcctccgccgccgcccgcgcgccgcccgcgcgccgcgctagttgagatggtgacaggattcagcaacacgaaattcggcgtttagagctgctctgccgccgccgtcacagacaccacagccaccgctttgtctccgatagtgcacacagccccggccacctcgcacactccccgacgccccaagcccccgaggcctccgcggagcattcagccaatcacaaagctgcagctcctcccgcccccgccctgatgtacagcctcctgattggcgggctgcgtgtccccatgtgaccggatcttggttggccggtcccgcccctgtcacgtgacagcgtgcgcctctcttcctgctttcctgaccctctccgccatttaaagaaacagtaccgggggcgggccgagcgacgcagccgggacggtagctgcggtgcggaccggaggagccatcttgtctcgtcgccggggagtcaggcccctaaatcgaagaagccctggcgcgccctccccccctcccgggtctggtagggcgaaggaacgggcgtgcggtcgatcgagcgatcggttggcggctctttctcctgctctggcatccagctcttggggcgcaggcccggccgccgcggcgcgcgcccggtggccgttggcgctcgcgccgcgtctttcttctcgtacgcagaactcgggcggcggcctatgcgtttgcgattcgacgaggagtcgtccgggtggtcggcggcggcgggcagctgctccgccccgctccgggggaggcggcggcggcagcggccgcgggatttggagcggccggggaggcgggggtggccggggccggcttggaggcctggcgccacccttcggggcctgcaaggacccagttgggggggcaggagggggccggaggatggttggttgtgggatttctactttgccttttcctccttatgccgccttagtgaggggcgggagctctggcggcagccccggggtggggagacgagctccggagtcggaagagctgggttttcttccgggcctagccaccagttggcggagtgaccttaggcgagtcactctgtaatttgtctgcgcctcagtttcctcctctgcctatcaatgtgtgtggggttgaaatcgctttgtaaactataaagcgtgggtgtacgtaaaggatggttattgtttataattttttttgagttgtaagaaaacttagcagttccccaatccttgggttttgaacctgggaaccttggattggagttggggatccccaaacttcctgaaattgtgggaatgtgcggtttgggggaatgatgggaatttgtgggaatgtgcgttttaggggaatgatgatccatcgctagcaagttttccaagggggctgtgacccagaagagttaagaatcacaatttcttcatgctacagagaggaaactgaggcctagatgtcatttgggacccttcacaaccattttgaagccctgtttgagtccctgggatatgtgagctgtttctatgcataatggatattcggggttaacaacagtcccctgcttggcttctattctgaatccttttctttcaccatggggtgcctgaagggtggctgatgcatatggtacaatggcacccagtgtaaagcagctacaattaggagtggatgtgttctgtagcatcctatttaaataagcctattttatcctttggcccgtcaactctgttatctgctgcttgtactggtgcctgtacttttctgactctcattgaccatattccacgaccatggttgtcatccattacttgatcctactttacatgtctagtctgtgtggttggtggtgaataggcttctttttacatggtgctgccagcccagctaattaatggtgcacgtggacttttagcaagcgggctcactggaagagactgaacctggcatggaattcctgaagatgtttggggttttttttctttcttaatcgaaagttaacattgtctgaaaagttttgttagaactactgcggaacctcaaaatcagtagatttggaagtgattcaaagctaaactttttccttggccctccttgtgttctaattgcttgcaagtgtaatactaggatgtccaagatgccagtttttgcttctttgttagttgtcagctgcttttatcaaatttcaggccattatccaacaaacactataaaaatgtttgaacaattggatttcaaacattttcgttttgtggagtggtgctcaccaagtggtacagccctaagcaagtgaacacaaacacatttaagtgtattttgtctgattagatgttagccagttatgctatttcattcaaatgtctgaaaaaatcaattgactattcccttttcctaaagggcagagacagataatctcacttccagagaaatgacttggagaaaaaaaagtgttggtctttttgctcttttgtaattaaatccggatgtacctcaaaagacttaagactgtggtgataagatgctttcctcagcagaaaggagggaaaaaaaacaactggaactcaaagcttgaaattctgtggcaaaacatgagatgtccaggattggaggttgaaaagatttcactacagtgttctgcaatagttggagcagataactttcagtgtagccacagccatggactccagatttccagattttcaagacctggacctggaacccgaaagagcttgtcacgatgcggcaggaacactggaggtagatttttttttatttttgaattttgggactgttgaccttgctgtgagaaaagagacaacgactgagcaagcactaccaccagcactgttactgggaattagaagacctgagtttctgtccagaccctcagtgcaaactgaggatgctccatccaaagtgaattatgatagcagactccttgaaagcagggtccttgtttagtgcatctttgcccacatacaccacaacttatcaagatgcatttattaggaaggaggagtttagagagcaggctatcagaataaccacttcacctacagacctggtacctggatttttgcccgagatgattcctaccaccttactactgacgaagacacccattccagtggaccactgtgacccaggaggcattcagccatcatgatgtggcctttacctccactcctgtcttgttctacccagattcagcacagccctttatagtgaagtcagagtcctcaagccaaatagctaaagctgttttatcacaacaaaggcctagtttgttccatgagtgtgcatttcatttcttcagttaaagccttcagagacacacaataaatttggaccaggggattttttagttattaatgctctctgaagaaaggcaacatctttttgagagcagcattggaccacaccccacaatctcaaatgattgaaattcatgaacatctaggatcccatgaaggtcactggaccctgttttttctacttcaaatcctgtagtagcctactgaatgagaaaacatattctgacccattgggatcaaatcaaaggcacagtgaactcctcatagcatcttctttggaattactcaggaaccagaactttttacacaaatgtaagaaattctaccaaggagtccccttacctaacagcatctcacaaggctgcaccagattccagaaaaggcttctcttgatacatcaagcattttgtgaccgacttattcttagatcattggttttccaaaggctttgtggccatgaagccctttgagtgaaaactgtgcagaagcccagagtaaaagtgaagctgctctggatgaagtagtgaagcaagagtaggggcctgaatcctgctacaactatcttcctttaccaccgtggtgacacctaaggggacttccttacaacaccttgaactcttccgaacacagtttgaaaaccactgccccagacagcaatatgtttgacctgaatggcattccaatcttttctgtacctccactcagcacagttcatgttcagtagatgctgaacattcttagaaatactgtgtgtgaacttagaaaagtgcaagaagacaggcatgtctttgaccccaggaatgatcatttgctgaagatggtgtcaagtgaacctagattaacagccctccactccagatggatatccagtgattcctagaatgggatatagccagagaacaattctatgcaccctacactgacagactcccttaagcaacaccagatgctctactggtacttgaagtacatgactttgaagtcttgaccctccatgaatacctgaattatcagcaagcgggttttgaagctggtgcctcattgaggccatattagagcaacttgtacatttgacctcttgttatcagccatggtactctacttcgtgtgcaagagataactatgaaagccaaattcaaatactggcaacatttcctaaaggggctcaatatctatcattcgtcttcttttccaaactacacatcactgtatgactcaaccagtagcagttatattgccccttggtttttattcagtttaactactgtttccaagataaatgagctaataagcttta

SEQ ID NO: 309584 - DNA, 6275 bp, Homo sapiens
gcgcaagttgcagcttcaccacctcccaagtgaaaaagctcctaggcactcacgatttcttttttcaaagccggaccaaacccagttcagggtggtggtcagattacctcacacttggcccacataaacacctcacaaatgacccgcccacagcacctcgggcaggccgcgccccgcccccacgtccctcagacaacagcctcagcctcccaggcccttcccgggcctcggtcccgtggccgcctccccacgaagaggagctactcccggcttccaaggaccggatcgagggcagtggcgagcgcaccacctgaccgggcactacccggatctcacaactgcctttgtccctccccgcggaattggaacccaacagccgcagagcgctcttggaaccatgtgctgctgccgcctccgccgccgccgccgctgcctccgccgccgcccgcgcgccgcccgcgcgccgcgctagttgagatggtgacaggattcagcaacacgaaattcggcgtttagagctgctctgccgccgccgtcacagacaccacagccaccgctttgtctccgatagtgcacacagccccggccacctcgcacactccccgacgccccaagcccccgaggcctccgcggagcattcagccaatcacaaagctgcagctcctcccgcccccgccctgatgtacagcctcctgattggcgggctgcgtgtccccatgtgaccggatcttggttggccggtcccgcccctgtcacgtgacagcgtgcgcctctcttcctgctttcctgaccctctccgccatttaaagaaacagtaccgggggcgggccgagcgacgcagccgggacggtagctgcggtgcggaccggaggagccatcttgtctcgtcgccggggagtcaggcccctaaatcgaagaagccctggcgcgccctccccccctcccgggtctggtagggcgaaggaacgggcgtgcggtcgatcgagcgatcggttggcggctctttctcctgctctggcatccagctcttggggcgcaggcccggccgccgcggcgcgcgcccggtggccgttggcgctcgcgccgcgtctttcttctcgtacgcagaactcgggcggcggcctatgcgtttgcgattcgacgaggagtcgtccgggtggtcggcggcggcgggcagctgctccgccccgctccgggggaggcggcggcggcagcggccgcgggatttggagcggccggggaggcgggggtggccggggccggcttggaggcctggcgccacccttcggggcctgcaaggacccagttgggggggcaggagggggccggaggatggttggttgtgggatttctactttgccttttcctccttatgccgccttagtgaggggcgggagctctggcggcagccccggggtggggagacgagctccggagtcggaagagctgggttttcttccgggcctagccaccagttggcggagtgaccttaggcgagtcactctgtaatttgtctgcgcctcagtttcctcctctgcctatcaatgtgtgtggggttgaaatcgctttgtaaactataaagcgtgggtgtacgtaaaggatggttattgtttataattttttttgagttgtaagaaaacttagcagttccccaatccttgggttttgaacctgggaaccttggattggagttggggatccccaaacttcctgaaattgtgggaatgtgcggtttgggggaatgatgggaatttgtgggaatgtgcgttttaggggaatgatgatccatcgctagcaagttttccaagggggctgtgacccagaagagttaagaatcacaatttcttcatgctacagagaggaaactgaggcctagatgtcatttgggacccttcacaaccattttgaagccctgtttgagtccctgggatatgtgagctgtttctatgcataatggatattcggggttaacaacagtcccctgcttggcttctattctgaatccttttctttcaccatggggtgcctgaagggtggctgatgcatatggtacaatggcacccagtgtaaagcagctacaattaggagtggatgtgttctgtagcatcctatttaaataagcctattttatcctttggcccgtcaactctgttatctgctgcttgtactggtgcctgtacttttctgactctcattgaccatattccacgaccatggttgtcatccattacttgatcctactttacatgtctagtctgtgtggttggtggtgaataggcttctttttacatggtgctgccagcccagctaattaatggtgcacgtggacttttagcaagcgggctcactggaagagactgaacctggcatggaattcctgaagatgtttggggttttttttctttcttaatcgaaagttaacattgtctgaaaagttttgttagaactactgcggaacctcaaaatcagtagatttggaagtgattcaaagctaaactttttccttggccctccttgtgttctaattgcttgcaagtgtaatactaggatgtccaagatgccagtttttgcttctttgttagttgtcagctgcttttatcaaatttcaggccattatccaacaaacactataaaaatgtttgaacaattggatttcaaacattttcgttttgtggagtggtgctcaccaagtggtacagccctaagcaagtgaacacaaacacatttaagtgtattttgtctgattagatgttagccagttatgctatttcattcaaatgtctgaaaaaatcaattgactattcccttttcctaaagggcagagacagataatctcacttccagagaaatgacttggagaaaaaaaagtgttggtctttttgctcttttgtaattaaatccggatgtacctcaaaagacttaagactgtggtgataagatgctttcctcagcagaaaggagggaaaaaaaacaactggaactcaaagcttgaaattctgtggcaaaacatgagatgtccaggattggaggttgaaaagatttcactacagtgttctgcaatagttggagcagataactttcagtgtagccacagccatggactccagatttccagattttcaagacctggacctggaacccgaaagagcttgtcacgatgcggcaggaacactggaggtagatttttttttatttttgaattttgggactgttgaccttgctgtgagaaaagagacaacgactgagcaagcactaccaccagcactgttactgggaattagaagacctgagtttctgtccagaccctcagtgcaaactgaggatgctccatccaaagtgaattatggtacttgccattttccaaaatgccttatcctttaccatctctgcacttttgttcatactctcattctactttggaactgctgctctgtggcttttcatctgtcaaaactgccattttctcagtatccaactcttatgccctcttttccatgagtctcctaactagccagaatagagctttaaagttttatgacatttcgttatgtatcctctatctgtatacaaaatcctgtaaaatagttacttgcctgcatttactgtctttgcagatagcagactccttgaaagcagggtccttgtttagtgcatctttgcccacatacaccacaacttatcaagatgcatttattaggaaggaggagtttagagagcaggctatcagaataaccacttcacctacagacctggtacctggatttttgcccgagatgattcctaccaccttactactgacgaagacacccattccagtggaccactgtgacccaggaggcattcagccatcatgatgtggcctttacctccactcctgtcttgttctacccagattcagcacagccctttatagtgaagtcagagtcctcaagccaaatagctaaagctgttttatcacaacaaaggcctagtttgttccatgagtgtgcatttcatttcttcagttaaagccttcagagacacacaataaatttggaccaggggattttttagttattaatgctctctgaagaaaggcaacatctttttgagagcagcattggaccacaccccacaatctcaaatgattgaaattcatgaacatctaggatcccatgaaggtcactggaccctgttttttctacttcaaatcctgtagtagcctactgaatgagaaaacatattctgacccattgggatcaaatcaaaggcacagtgaactcctcatagcatcttctttggaattactcaggaaccagaactttttacacaaatgtaagaaattctaccaaggagtccccttacctaacagcatctcacaaggctgcaccagattccagaaaaggcttctcttgatacatcaagcattttgtgaccgacttattcttagatcattggttttccaaaggctttgtggccatgaagccctttgagtgaaaactgtgcagaagcccagagtaaaagtgaagctgctctggatgaagtagtgaagcaagagtaggggcctgaatcctgctacaactatcttcctttaccaccgtggtgacacctaaggggacttccttacaacaccttgaactcttccgaacacagtttgaaaaccactgccccagacagcaatatgtttgacctgaatggcattccaatcttttctgtacctccactcagcacagttcatgttcagtagatgctgaacattcttagaaatactgtgtgtgaacttagaaaagtgcaagaagacaggcatgtctttgaccccaggaatgatcatttgctgaagatggtgtcaagtgaacctagattaacagccctccactccagatggatatccagtgattcctagaatgggatatagccagagaacaattctatgcaccctacactgacagactcccttaagcaacaccagatgctctactggtacttgaagtacatgactttgaagtcttgaccctccatgaatacctgaattatcagcaagcgggttttgaagctggtgcctcattgaggccatattagagcaacttgtacatttgacctcttgttatcagccatggtactctacttcgtgtgcaagagataactatgaaagccaaattcaaatactggcaacatttcctaaaggggctcaatatctatcattcgtcttcttttccaaactacacatcactgtatgactcaaccagtagcagttatattgccccttggtttttattcagtttaactactgtttccaagataaatgagctaataagctttaaaaaaaaaaaaaaaaaggctgaattcttttttcttcatcactggcatatctgcctattctccagaattattatgactattcagctcactttaacagttgaacttcaagcgacaatctttgaacaccccttctcatgtgatttaaaatgaaaccatttggaaaagtttcttctagccagtaatagattttttttttaattgctctgccttgtgccgagagatgttcttttaagatgaatcttttgatgtctgataccaccaaatataggtggtagggagagttggaggctggccctttgagcaggccattagcttacttgctgggcatttccgatagcttattgcctacctttttgctggaaacaaactgatttgaaaaacaaaatctatgaagactgcagctaaggattttatcggtagacttaagagcttttgtccttgtggatattttagtggaaccacatcagtctcaatactgtcattttacactgactcagagcagctgacttcattccttgccatgatatatatttaaggcaggcattgtaacagacataaagacaacttatctgtttcagcaggaaggattcagtttatgaactctcagaccagatcatgttgaacaaggagactttgatgtgtgtcatgagaaaactcattctttacttcccagtcaatttaaaggccagctatcctgagctactcgaatgaatgcactggttaaacattggaaatagtttgtttatatccttgtctctctctaggccaattgtgattacatgactcgactctacatctcgtcaaacaaggcctaggtctggttgctgtagactgctcgccctcaacaaataacaaaatatggagagacttgaatcctgatgacagcgtttgtgcccctggatccaaccgtgcctgaagctagaatatcccctggacttttcagttatgtgaaccaataaatacccttttttgcttaa

SEQ ID NO: 309585 - DNA, 920 bp, Homo sapiens
tacaggactcgacacatagaatgcagcagaacctcatctatcgggtctggaaggaatacagcagttcgaaagccgcgtccatttctctccttcagtagtgcagaaatgagtccgattcaccagtacacacagaactgtaccagttcaacctagcaaaagaagaaaagtttccactgtacttaaaatttacagctgactcaaattgcctcacagaattatttgatgtagaaggctagttgtcttacttcagatcagcaggacagttgggctctcagactcatgaccactgagtttgcttgtgttgaaactgtggtttcatccaacatatgctattggacatgattattattccattcaaatggattacagacttcttgaggacaggacaaacttatctctcatggtgtttttttagaatacttttataaccaaggaagaaaccatgccagctgttaccattcaacttcttaagcagagattaagctttttcatatctgttcttatcctggacatcagtagtttttaattgcccagcatccgttccatcttgtaacaactccctgatgtttcttaaaaccacctcttcctattttcagtctgtggtttggacagtctgacccaaccttgagctttgtgggtgaacatgtaattcagacctcatcaatcagcaaatccatctgaactgtggaggagaagctctctttactgagggtgctttagctttgtaggatgaaaacctcaaactaacagggcctaccatgtagagaatgaagccagtgcaggggaaagcagagccaaaatatggagagacttgaatcctgatgacagcgtttgtgcccctggatccaaccgtgcctgaagctagaatatcccctggacttttcagttatgtgaaccaataaatacccttttttgcttaa

SEQ ID NO: 309586 - DNA, 5035 bp, Homo sapiens
gcgcaagttgcagcttcaccacctcccaagtgaaaaagctcctaggcactcacgatttcttttttcaaagccggaccaaacccagttcagggtggtggtcagattacctcacacttggcccacataaacacctcacaaatgacccgcccacagcacctcgggcaggccgcgccccgcccccacgtccctcagacaacagcctcagcctcccaggcccttcccgggcctcggtcccgtggccgcctccccacgaagaggagctactcccggcttccaaggaccggatcgagggcagtggcgagcgcaccacctgaccgggcactacccggatctcacaactgcctttgtccctccccgcggaattggaacccaacagccgcagagcgctcttggaaccatgtgctgctgccgcctccgccgccgccgccgctgcctccgccgccgcccgcgcgccgcccgcgcgccgcgctagttgagatggtgacaggattcagcaacacgaaattcggcgtttagagctgctctgccgccgccgtcacagacaccacagccaccgctttgtctccgatagtgcacacagccccggccacctcgcacactccccgacgccccaagcccccgaggcctccgcggagcattcagccaatcacaaagctgcagctcctcccgcccccgccctgatgtacagcctcctgattggcgggctgcgtgtccccatgtgaccggatcttggttggccggtcccgcccctgtcacgtgacagcgtgcgcctctcttcctgctttcctgaccctctccgccatttaaagaaacagtaccgggggcgggccgagcgacgcagccgggacggtagctgcggtgcggaccggaggagccatcttgtctcgtcgccggggagtcaggcccctaaatcgaagaagccctggcgcgccctccccccctcccgggtctggtagggcgaaggaacgggcgtgcggtcgatcgagcgatcggttggcggctctttctcctgctctggcatccagctcttggggcgcaggcccggccgccgcggcgcgcgcccggtggccgttggcgctcgcgccgcgtctttcttctcgtacgcagaactcgggcggcggcctatgcgtttgcgattcgacgaggagtcgtccgggtggtcggcggcggcgggcagctgctccgccccgctccgggggaggcggcggcggcagcggccgcgggatttggagcggccggggaggcgggggtggccggggccggcttggaggcctggcgccacccttcggggcctgcaaggacccagttgggggggcaggagggggccggaggatggttggttgtgggatttctactttgccttttcctccttatgccgccttagtgaggggcgggagctctggcggcagccccggggtggggagacgagctccggagtcggaagagctgggttttcttccgggcctagccaccagttggcggagtgaccttaggcgagtcactctgtaatttgtctgcgcctcagtttcctcctctgcctatcaatgtgtgtggggttgaaatcgctttgtaaactataaagcgtgggtgtacgtaaaggatggttattgtttataattttttttgagttgtaagaaaacttagcagttccccaatccttgggttttgaacctgggaaccttggattggagttggggatccccaaacttcctgaaattgtgggaatgtgcggtttgggggaatgatgggaatttgtgggaatgtgcgttttaggggaatgatgatccatcgctagcaagttttccaagggggctgtgacccagaagagttaagaatcacaatttcttcatgctacagagaggaaactgaggcctagatgtcatttgggacccttcacaaccattttgaagccctgtttgagtccctgggatatgtgagctgtttctatgcataatggatattcggggttaacaacagtcccctgcttggcttctattctgaatccttttctttcaccatggggtgcctgaagggtggctgatgcatatggtacaatggcacccagtgtaaagcagctacaattaggagtggatgtgttctgtagcatcctatttaaataagcctattttatcctttggcccgtcaactctgttatctgctgcttgtactggtgcctgtacttttctgactctcattgaccatattccacgaccatggttgtcatccattacttgatcctactttacatgtctagtctgtgtggttggtggtgaataggcttctttttacatggtgctgccagcccagctaattaatggtgcacgtggacttttagcaagcgggctcactggaagagactgaacctggcatggaattcctgaagatgtttggggttttttttctttcttaatcgaaagttaacattgtctgaaaagttttgttagaactactgcggaacctcaaaatcagtagatttggaagtgattcaaagctaaactttttccttggccctccttgtgttctaattgcttgcaagtgtaatactaggatgtccaagatgccagtttttgcttctttgttagttgtcagctgcttttatcaaatttcaggccattatccaacaaacactataaaaatgtttgaacaattggatttcaaacattttcgttttgtggagtggtgctcaccaagtggtacagccctaagcaagtgaacacaaacacatttaagtgtattttgtctgattagatgttagccagttatgctatttcattcaaatgtctgaaaaaatcaattgactattcccttttcctaaagggcagagacagataatctcacttccagagaaatgacttggagaaaaaaaagtgttggtctttttgctcttttgtaattaaatccggatgtacctcaaaagacttaagactgtggtgataagatgctttcctcagcagaaaggagggaaaaaaaacaactggaactcaaagcttgaaattctgtggcaaaacatgagatgtccaggattggaggttgaaaagatttcactacagtgttctgcaatagttggagcagataactttcagtgtagccacagccatggactccagatttccagattttcaagacctggacctggaacccgaaagagcttgtcacgatgcggcaggaacactggaggtagatttttttttatttttgaattttgggactgttgaccttgctgtgagaaaagagacaacgactgagcaagcactaccaccagcactgttactgggaattagaagacctgagtttctgtccagaccctcagtgcaaactgaggatgctccatccaaagtgaattatggtacttgccattttccaaaatgccttatcctttaccatctctgcacttttgttcatactctcattctactttggaactgctgctctgtggcttttcatctgtcaaaactgccattttctcagtatccaactcttatgccctcttttccatgagtctcctaactagccagaatagagctttaaagttttatgacatttcgttatgtatcctctatctgtatacaaaatcctgtaaaatagttacttgcctgcatttactgtctttgcagatagcagactccttgaaagcagggtccttgtttagtgcatctttgcccacatacaccacaacttatcaagatgcatttattaggaaggaggagtttagagagcaggctatcagaataaccacttcacctacagacctggtacctggatttttgcccgagatgattcctaccaccttactactgacgaagacacccattccagtggaccactgtgacccaggaggcattcagccatcatgatgtggcctttacctccactcctgtcttgttctacccagattcagcacagccctttatagtgaagtcagagtcctcaagccaaatagctaaagctgttttatcacaacaaaggcctagtttgttccatgagtgtgcatttcatttcttcagttaaagccttcagagacacacaataaatttggaccaggggattttttagttattaatgctctctgaagaaaggcaacatctttttgagagcagcattggaccacaccccacaatctcaaatgattgaaattcatgaacatctaggatcccatgaaggtcactggaccctgttttttctacttcaaatcctgtagtagcctactgaatgagaaaacatattctgacccattgggatcaaatcaaaggcacagtgaactcctcatagcatcttctttggaattactcaggaaccagaactttttacacaaatgtaagaaattctaccaaggagtccccttacctaacagcatctcacaaggctgcaccagattccagaaaaggcttctcttgatacatcaagcattttgtgaccgacttattcttagatcattggttttccaaaggctttgtggccatgaagccctttgagtgaaaactgtgcagaagcccagagtaaaagtgaagctgctctggatgaagtagtgaagcaagagtaggggcctgaatcctgctacaactatcttcctttaccaccgtggtgacacctaaggggacttccttacaacaccttgaactcttccgaacacagtttgaaaaccactgccccagacagcaatatgtttgacctgaatggcattccaatcttttctgtacctccactcagcacagttcatgttcagtagatgctgaacattcttagaaatactgtgtgtgaacttagaaaagtgcaagaagacaggcatgtctttgaccccaggaatgatcatttgctgaagatggtgtcaagtgaacctagattaacagccctccactccagatggatatccagtgattcctagaatgggatatagccagagaacaattctatgcaccctacactgacagactcccttaagcaacaccagatgctctactggtacttgaagtacatgactcctcccccttatactaatagctagccaatcccacctatcaaaagaaatcacaacccg

SEQ ID NO: 309587 - DNA, 1414 bp, Homo sapiens
  misc_feature (39)..(40): n is a, c, g, or t
tacgaccgagctataccatgtccctagcgtcatatccanntagttgtgcccctggatccaaccgtgctgaagctagaatatcccctggacttttcagttatgtgaacaatctggttgactagcctccttgtatatacaactattatttgttaagaagaaattatcgtcaattttctactaccttccaattgtcagctctttttttcctctctggtttttcctatactttacagaaaaagacattgatctatactgccattccctctaatcctgccatactcagtcaaaaggaatgacttaagatgaagatgatcatctgctcgagtctaaaatatacattgtatataagaattggtgattagaaaagcaaaaaacctaaaacttaaatctaggagtctgtatactgtctccatgtctccatgcctcagatctcatctaaatctttgaacagcaccattcaaccaatctgaggccttgacttgcttgtaagatgattctcagagatcggctgagttaaaaaagatgacgacttgattaccaaagaaagtagggccaactttgacaaatctggctctgctgaccctgtcactcccagatgtacaaatccatctgaactgtggaggagaagctctctttactgagggtgctttagctttgtaggatgaaaacctcaaactaacagggcctaccatgtagagaatgaagccagtgcaggggaaagcagagccaaaatatggagagacttgaatcctgatgacagcgtttgtgcccctggatccaaccgtgcctgaagctagaatatcccctggacttttcagttatgtgaaccaataaatacccttttttgcttaagttactttgagttgggtttctgttacttgaaattgaatccacactaatatatctaccaacattgagacttgacagatccaagtatttattaagctagaggtcatggtcactgaaattactttccaaagtggaagacaaaatgaaacaggaactgagggaatatttaagatcccacagaagcgtaaaaatgacatggtagaaagtaatagaaaacctaaatgtctgtcattaaaggataggttaaggtgtggttcagccatataggaatatctcgtatctgttaaaatgaataaagtacattcattgtgtatggaaaaatggccatgatacattaggtgaaacaagttattaatagaaaagtgtacagtgtgaactcattttaaaatgtgtgtgcttatgtttataaatgcatagaaaggtctattcacagctttctttgaacagtgtagatcacatgaaactttcaactttatacatttctgtattaatattttacactacccacattatttttaaactttattttaaataaagaatttttaaaattaaaaatagtgcttac

SEQ ID NO: 309588 - DNA, 1972 bp, Homo sapiens
aggaaacggtttattaggagggagtggtggagctgggccaggcaggaagacgctggaataagaaacatttttgctccagcccccatcccagtcccgggaggctgccgcgccagctgcgccgagcgagcccctccccggctccagcccggtccggggccgcgcccggaccccagcccgccgtccagcgctggcggtgcaactgcggccgcgcggtggaggggaggtggccccggtccgccgaaggctagcgccccgccacccgcagagcgggcccagagggaccatgaccttgggctcccccaggaaaggccttctgatgctgctgatggccttggtgacccagggagaccctgtgaagccgtctcggggcccgctggtgacctgcacgtgtgagagcccacattgcaaggggcctacctgccggggggcctggtgcacagtagtgctggtgcgggaggaggggaggcacccccaggaacatcggggctgcgggaacttgcacagggagctctgcagggggcgccccaccgagttcgtcaaccactactgctgcgacagccacctctgcaaccacaacgtgtccctggtgctggaggccacccaacctccttcggagcagccgggaacagatggccagctggccctgatcctgggccccgtgctggccttgctggccctggtggccctgggtgtcctgggcctgtggcatgtccgacggaggcaggagaagcagcgtggcctgcacagcgagctgggagagtccagtctcatcctgaaagcatctgagcagggcgacagcatgttgggggacctcctggacagtgactgcaccacagggagtggctcagggctccccttcctggtgcagaggacagtggcacggcaggttgccttggtggagtgtgtgggaaaaggccgctatggcgaagtgtggcggggcttgtggcacggtgagagtgtggccgtcaagatcttctcctcgagggatgaacagtcctggttccgggagactgagatctataacacagtgttgctcagacacgacaacatcctaggcttcatcgcctcagacatgacctcccgcaactcgagcacgcagctgtggctcatcacgcactaccacgagcacggctccctctacgactttctgcagagacagacgctggagccccatctggctctgaggctagctgtgtccgcggcatgcggcctggcgcacctgcacgtggagatcttcggtacacagggcaaaccagccattgcccaccgcgacttcaagagccgcaatgtgctggtcaagagcaacctgcagtgttgcatcgccgacctgggcctggctgtgatgcactcacagggcagcgattacctggacatcggcaacaacccgagagtgggcaccaagcggtacatggcacccgaggtgctggacgagcagatccgcacggactgctttgagtcctacaagtggactgacatctgggcctttggcctggtgctgtgggagattgcccgccggaccatcgtgaatggcatcgtggaggactatagaccacccttctatgatgtggtgcccaatgaccccagctttgaggacatgaagaaggtggtgtgtgtggatcagcagacccccaccatccctaaccggctggctgcagacccggtcctctcaggcctagctcagatgatgcgggagtgctggtacccaaacccctctgcccgactcaccgcgctgcggatcaagaagacactacaaaaaattagcaacagtccagagaagcctaaagtgattcaatagcccaggagcacctgattcctttctgcctgcagggggctgggggggtggggggcagtggatggtgccctatctgggtagaggtagtgtgagtgtggtgtgtgctggggatgggcagctgcgcctgcctgctcggcccccagcccacccagccaaaaatacagctgggctgaaacctga

SEQ ID NO: 309589 - DNA, 1818 bp, Homo sapiens
gaggcggcctccctgcctcccctccaaaaaaaactctgtgatttcctctgggcaggagggagccacggccagcggctgtcacacttcatggctcttactccacctctcttgctcctctctgcagggaccatgaccttgggctcccccaggaaaggccttctgatgctgctgatggccttggtgacccagggagaccctgtgaagccgtctcggggcccgctggtgacctgcacgtgtgagagcccacattgcaaggggcctacctgccggggggcctggtgcacagtagtgctggtgcgggaggaggggaggcacccccaggaacatcggggctgcgggaacttgcacagggagctctgcagggggcgccccaccgagttcgtcaaccactactgctgcgacagccacctctgcaaccacaacgtgtccctggtgctggaggccacccaacctccttcggagcagccgggaacagatggccagctggccctgatcctgggccccgtgctggccttgctggccctggtggccctgggtgtcctgggcctgtggcatgtccgacggaggcaggagaagcagcgtggcctgcacagcgagctgggagagtccagtctcatcctgaaagcatctgagcagggcgacagcatgttgggggacctcctggacagtgactgcaccacagggagtggctcagggctccccttcctggtgcagaggacagtggcacggcaggttgccttggtggagtgtgtgggaaaaggccgctatggcgaagtgtggcggggcttgtggcacggtgagagtgtggccgtcaagatcttctcctcgagggatgaacagtcctggttccgggagactgagatctataacacagtgttgctcagacacgacaacatcctaggcttcatcgcctcagacatgacctcccgcaactcgagcacgcagctgtggctcatcacgcactaccacgagcacggctccctctacgactttctgcagagacagacgctggagccccatctggctctgaggctagctgtgtccgcggcatgcggcctggcgcacctgcacgtggagatcttcggtacacagggcaaaccagccattgcccaccgcgacttcaagagccgcaatgtgctggtcaagagcaacctgcagtgttgcatcgccgacctgggcctggctgtgatgcactcacagggcagcgattacctggacatcggcaacaacccgagagtgggcaccaagcggtacatggcacccgaggtgctggacgagcagatccgcacggactgctttgagtcctacaagtggactgacatctgggcctttggcctggtgctgtgggagattgcccgccggaccatcgtgaatggcatcgtggaggactatagaccacccttctatgatgtggtgcccaatgaccccagctttgaggacatgaagaaggtggtgtgtgtggatcagcagacccccaccatccctaaccggctggctgcagacccggtcctctcaggcctagctcagatgatgcgggagtgctggtacccaaacccctctgcccgactcaccgcgctgcggatcaagaagacactacaaaaaattagcaacagtccagagaagcctaaagtgattcaatagcccaggagcacctgattcctttctgcctgcagggggctgggggggtggggggcagtggatggtgccctatctgggtagaggtagtgtgagtgtggtgtgtgctggggatgggcagctgcgcctgcctgctcggcccccagcccacccagccaaaaatacagctgggctgaaacctga

SEQ ID NO: 309590 - DNA, 1084 bp, Homo sapiens
aggaaacggtttattaggagggagtggtggagctgggccaggcaggaagacgctggaataagaaacatttttgctccagcccccatcccagtcccgggaggctgccgcgccagctgcgccgagcgagcccctccccggctccagcccggtccggggccgcgcccggaccccagcccgccgtccagcgctggcggtgcaactgcggccgcgcggtggaggggaggtggccccggtccgccgaaggctagcgccccgccacccgcagagcgggcccagagggaccatgaccttgggctcccccaggaaaggccttctgatgctgctgatggccttggtgacccagggagaccctgtgaagccgtctcgggccattgcccaccgcgacttcaagagccgcaatgtgctggtcaagagcaacctgcagtgttgcatcgccgacctgggcctggctgtgatgcactcacagggcagcgattacctggacatcggcaacaacccgagagtgggcaccaagcggtacatggcacccgaggtgctggacgagcagatccgcacggactgctttgagtcctacaagtggactgacatctgggcctttggcctggtgctgtgggagattgcccgccggaccatcgtgaatggcatcgtggaggactatagaccacccttctatgatgtggtgcccaatgaccccagctttgaggacatgaagaaggtggtgtgtgtggatcagcagacccccaccatccctaaccggctggctgcagacccggtcctctcaggcctagctcagatgatgcgggagtgctggtacccaaacccctctgcccgactcaccgcgctgcggatcaagaagacactacaaaaaattagcaacagtccagagaagcctaaagtgattcaatagcccaggagcacctgattcctttctgcctgcagggggctgggggggtggggggcagtggatggtgccctatctgggtagaggtagtgtgagtgtggtgtgtgctggggatgggcagctgcgcctgcctgctcggcccccagcccacccagccaaaaatacagctgggctgaaacctga

SEQ ID NO: 309591 - DNA, 2330 bp, Homo sapiens
gaggcggcctccctgcctcccctccaaaaaaaactctgtgatttcctctgggcaggagggagccacggccagcggctgtcacacttcatggctcttactccacctctcttgctcctctctgcagggaccatgaccttgggctcccccaggaaaggccttctgatgctgctgatggccttggtgacccagggagaccctgtgaagccgtctcggggcccgctggtgacctgcacgtgtgagagcccacattgcaaggggcctacctgccggggggcctggtgcacagtagtgctggtgcgggaggaggggaggcacccccaggaacatcggggctgcgggaacttgcacagggagctctgcagggggcgccccaccgagttcgtcaaccactactgctgcgacagccacctctgcaaccacaacgtgtccctggtgctggaggccacccaacctccttcggagcagccgggaacagatggccagctggccctgatcctgggccccgtgctggccttgctggccctggtggccctgggtgtcctgggcctgtggcatgtccgacggaggcaggagaagcagcgtggcctgcacagcgagctgggagagtccagtctcatcctgaaagcatctgagcagggcgacagcatgttgggggacctcctggacagtgactgcaccacagggagtggctcagggctccccttcctggtgcagaggacagtggcacggcaggttgccttggtggagtgtgtgggaaaaggccgctatggcgaagtgtggcggggcttgtggcacggtgagagtgtggccgtcaagatcttctcctcgagggatgaacagtcctggttccgggagactgagatctataacacagtgttgctcagacacgacaacatcctaggcttcatcgcctcagacatgacctcccgcaactcgagcacgcagctgtggctcatcacgcactaccacgagcacggctccctctacgactttctgcagagacagacgctggagccccatctggctctgaggctagctgtgtccgcggcatgcggcctggcgcacctgcacgtggagatcttcggtacacagggcaaaccagccattgcccaccgcgacttcaagagccgcaatgtgctggtcaagagcaacctgcagtgttgcatcgccgacctgggcctggctgtgatgcactcacagggcagcgattacctggacatcggcaacaacccgagagtgggcaccaagcggtacatggcacccgaggtgctggacgagcagatccgcacggactgctttgagtcctacaagtggactgacatctgggcctttggcctggtgctgtgggagattgcccgccggaccatcgtgaatggcatcgtggaggactatagaccacccttctatgatgtggtgcccaatgaccccagctttgaggacatgaagaaggtggtgtgtgtggatcagcagacccccaccatccctaaccggctggctgcagacccggtgaggcctctgctgggactaggatggcgtggggtggtggctcatggctgggatttctgggcccaggaacttgtgtctgaggcctctgcttcatctcatagatactgagtgtcctggttagggcacctctctaggtactccctctttcaaccctggcccatgctccctgcccccagggccatctggtcattctgggattttaagaaccttcaccttccctgtgaaaagtcagaggctatctgtggctctgtctgtgtgtgtgtgtgtgtgtgtgtgtgtgtgtgtgtgtgtttgagagtcagggttttgtttgctcttgtcacccaggctggggtgcagtggcacagtcatagctcactgtaacctcaaactcctcggctcaactgatcctactgcctcagcctccccagtagctaggtgtagtgcacaccaccacacctggctaatttttaaaattttttgtagagacaaggtcttttatgttgctcaggcttatctcaaactcttgggctcaagtgatcctcctgcctcagcctcccaaagtgttgggattataggtgtgagcctccacacctgaccactgtggtatttttgttgctatttgtctttgtttgttgctgttttgttgttgtttgtccttgttttttctcaaaacacttcacttgtacaaagacacacacacgtatatcaacacatacaagcgtgaatatccttctgaacatacactcacagaaatatacacatgcgcatatatgccagactgttggccccgtgaggacaaagaacgtgtcttttgctcacccttatgtccctattacctatca

SEQ ID NO: 309592 - DNA, 1904 bp, Homo sapiens
gaggcggcctccctgcctcccctccaaaaaaaactctgtgatttcctctgggcaggagggagccacggccagcggctgtcacacttcatggctcttactccacctctcttgctcctctctgcagggaccatgaccttgggctcccccaggaaaggccttctgatgctgctgatggccttggtgacccagggagaccctgtgaagccgtctcggggcccgctggtgacctgcacgtgtgagagcccacattgcaaggggcctacctgccggggggcctggtgcacagtagtgctggtgcgggaggaggggaggcacccccaggaacatcggggctgcgggaacttgcacagggagctctgcagggggcgccccaccgagttcgtcaaccactactgctgcgacagccacctctgcaaccacaacgtgtccctggtgctggaggccacccaacctccttcggagcagccgggaacagatggccagctggccctgatcctgggccccgtgctggccttgctggccctggtggccctgggtgtcctgggcctgtggcatgtccgacggaggcaggagaagcagcgtggcctgcacagcgagctgggagagtccagtctcatcctgaaagcatctgagcagggcgacagcatgttgggggacctcctggacagtgactgcaccacagggagtggctcagggctccccttcctggtgcagaggacagtggcacggcaggttgccttggtggagtgtgtgggaaaaggccgctatggcgaagtgtggcggggcttgtggcacggtgagagtgtggccgtcaagatcttctcctcgagggatgaacagtcctggttccgggagactgagatctataacacagtgttgctcagacacgacaacatcctaggcttcatcgcctcagacatgacctcccgcaactcgagcacgcagctgtggctcatcacgcactaccacgagcacggctccctctacgactttctgcagagacagacgctggagccccatctggctctgaggctagctgtgtccgcggcatgcggcctggcgcacctgcacgtggagatcttcggtacacagggcaaaccagccattgcccaccgcgacttcaagagccgcaatgtgctggtcaagagcaacctgcagtgttgcatcgccgacctgggcctggctgtgatgcactcacagggcagcgattacctggacatcggcaacaacccgagagtgggcaccaagcggtacatggcacccgaggtgctggacgagcagatccgcacggactgctttgagtcctacaagtggactgacatctgggcctttggcctggtgctgtgggagattgcccgccggaccatcgtgaatggcatcgtggaggactatagaccacccttctatgatgtggtgcccaatgaccccagctttgaggacatgaagaaggtggtgtgtgtggatcagcagacccccaccatccctaaccggctggctgcagacccggtgaggcctctgctgggactaggatggcgtggggtggtggctcatggctgggatttctgggcccaggaacttgtgtctgaggcctctgcttcatctcatagatactgagtgtcctggttagggcacctctctaggtactccctctttcaaccctggcccatgctccctgcccccagggccatctggtcattctgggattttaagaaccttcaccttccctgtgaaaagtcagaggctatctgtggctctgtctgtgtgtgtgtgtgtgtgtgtgtgtgtgtgtgtgtgtgtttgagagtcagggttttgtttgctcttgtcacccaggaggcggaggttgcagtaagctgagatcatgccactgcactccagcctaggtaatagacccaatttaaaaa

SEQ ID NO: 309593 - DNA, 1098 bp, Homo sapiens
  misc_feature (1059)..(1059): n is a, c, g, or t
aggaaacggtttattaggagggagtggtggagctgggccaggcaggaagacgctggaataagaaacatttttgctccagcccccatcccagtcccgggaggctgccgcgccagctgcgccgagcgagcccctccccggctccagcccggtccggggccgcgcccggaccccagcccgccgtccagcgctggcggtgcaactgcggccgcgcggtggaggggaggtggccccggtccgccgaaggctagcgccccgccacccgcagagcgggcccagagggaccatgaccttgggctcccccaggaaaggccttctgatgctgctgatggccttggtgacccagggagaccctgtgaagccgtctcggggcccgctggtgacctgcacgtgtgagagcccacattgcaaggggcctacctgccggggggcctggtgcacagtagtgctggtgcgggaggaggggaggcacccccaggaacatcggggctgcgggaacttgcacagggagctctgcagggggcgccccaccgagttcgtcaaccactactgctgcgacagccacctctgcaaccacaacgtgtccctggtgctggaggccacccaacctccttcggagcagccgggaacagatggccagctggccctgatcctgggccccgtgctggccttgctggccctggtggccctgggtgtcctgggcctgtggcatgtccgacggaggcaggagaagcagcgtggcctgcacagcgagctgggagagtccagtctcatcctgaaagcatctgagcagggcgacagcatgttgggggacctcctggacagtgactgcaccacagggagtggctcagggctccccttcctggtgcagaggacagtggcacggcaggttgccttggtggagtgtgtgggaaaaggccgctatggcgaagtgtggcggggcttgtggcacggtgagagtgtggccgtcaagatcttctcctcgagggatgaacagtcctggttccgggagactgagatctataacacagtgtttgccccaagaacacgaacaaacaatcncctaagggctttattccggccttcaagaaccattggacc

SEQ ID NO: 309594 - DNA, 1476 bp, Homo sapiens
ggagaaaggaggcaggagccaggaacctgggttctcatcctggtttcgccagcctccaggtctgctctgtgaagtgggctcataatgcctgccttgcccactcacatctcgctgggttcttgggaacctagagagcactacacaagcaaagagtacctggggccatggttctctctgtggccactgccttccagcccatctccgtgcacgtctccatctgccttcccctctctgtcccactgtttctctcagtccccaccttgcctgccccctggatcccaggtttgggagaggggcaggagtgacaggcctcacccccacaggcctggctgtgatgcactcacagggcagcgattacctggacatcggcaacaacccgagagtgggcaccaagcggtacatggcacccgaggtgctggacgagcagatccgcacggactgctttgagtcctacaagtggactgacatctgggcctttggcctggtgctgtgggagattgcccgccggaccatcgtgaatggcatcgtggaggactatagaccacccttctatgatgtggtgcccaatgaccccagctttgaggacatgaagaaggtggtgtgtgtggatcagcagacccccaccatccctaaccggctggctgcagacccggtgaggcctctgctgggactaggatggcgtggggtggtggctcatggctgggatttctgggcccaggaacttgtgtctgaggcctctgcttcatctcatagatactgagtgtcctggttagggcacctctctaggtactccctctttcaaccctggcccatgctccctgcccccagggccatctggtcattctgggattttaagaaccttcaccttccctgtgaaaagtcagaggctatctgtggctctgtctgtgtgtgtgtgtgtgtgtgtgtgtgtgtgtgtgtgtgtttgagagtcagggttttgtttgctcttgtcacccaggctggggtgcagtggcacagtcatagctcactgtaacctcaaactcctcggctcaactgatcctactgcctcagcctccccagtagctaggtgtagtgcacaccaccacacctggctaatttttaaaattttttgtagagacaaggtcttttatgttgctcaggcttatctcaaactcttgggctcaagtgatcctcctgcctcagcctcccaaagtgttgggattataggtgtgagcctccacacctgaccactgtggtatttttgttgctatttgtctttgtttgttgctgttttgttgttgtttgtccttgttttttctcaaaacacttcacttgtacaaagacacacacacgtatatcaacacatacaagcgtgaatatccttctgaacatacactcacagaaatatacacatgcgcatatatgccagactgttggccccgtgaggacaaagaacgtgtcttttgctcacccttatgtccctattacctatca

SEQ ID NO: 309595 - DNA, 226 bp, Homo sapiens
gctgggaccacagtggctgagcttccggtgtgtcttccaggagaccctgtgaagccgtctcggggcccgctggtgacctgcacgtgtgagagcccacattgcaaggggcctacctgccggggggcctggtgcacagtagtgctggtgcgggaggaggggaggcacccccaggaacatcggggctgcgggaacttgcacagggagctctgcagggggcgccccaccg

SEQ ID NO: 309596 - DNA, 2595 bp, Homo sapiens
agcggggagtgcgcccggagccggcgccgcgggccgagtgtcctggtgaagacctagttcttgccggagacaattccactgcagaagcactttacttaaaaggacttgccaggctggacaatgcccgttgacttggggcaggccctaggcctgctgccatcgctggcgaaggccgaggactcccagttctcagaatcagatgctgcccttcaagaggaactctccagccctgagaccgcacgccagcttttcaggcagttccgttaccaggtgatgtctgggcctcatgagaccttgaagcaacttcggaagctctgtttccagtggctacagccagaggttcacaccaaagagcagatcctagagatcctcatgttggagcagtttctgaccatcctgcctggggagatccagatgtgggtgcggaaacagtgtccaggaagtggagaagaggcagtgacccttgtggaaagcttgaagggggacccccagagactgtggcaatggatcagtatccaggttctaggacaggacatcttatcagagaagatggaatctccaagctgccaagtgggggaagtggagccccatcttgaagtggtgcctcaggagttgggacttgagaattcatcctcagggcctggggagcttctgagccacatcgtgaaagaggaatctgacacagaagcagaactagccctggctgcctcccagcctgcccgactggaggaaaggctgatcagagaccaggacctcggagcctcactgctcccagcagcacctcaggaacagtggagacaactggattccactcaaaaggagcaatactgggatctcatgctggagacctatgggaaaatggtctcaggcaggcatttcccatcccaaatctgacctgactaattcaatagaatttggggaagagctggcaggaatataccttcatgtcaatgagaagatcccaagacccacctgcataggagatagacaagagaatgacaaggagaacctaaatttggagaatcacagggaccaggagctcctgcatgcttcctgtcaagcttcaggagaggttccttctcaggcttccttgaggggcttcttcactgaggatgagccaggatgctttggagaaggagagaatctccctgaggctctgcaaaacattcaggatgagggaacaggggaacagctgtctcctcaagaaaggatttctgagaaacaactaggtcagcatttgcctaatcctcattcaggagaaatgtccaccatgtggcttgaggagaagagagagacctcccagaaggggcagccaagagcccccatggcccagaagctccccacctgcagggagtgtgggaagaccttttataggaattctcagcttatttttcaccaaagaactcacaccggagagacatactttcagtgcaccatctgcaaaaaagcctttctgcggagttcagactttgtgaagcatcagagaactcacacgggagagaagccctgtaaatgtgattactgtgggaaaggctttagtgacttctcaggattgcgccaccacgagaaaatccacacaggagagaaaccctataaatgtcctatctgtgagaaaagtttcattcagagatcaaactttaatagacatcagagggttcacactggagagaaaccttataaatgttcgcactgtgggaaaagtttcagctggagctcgagccttgacaaacatcaaagatcccacttaggaaagaagccctttcaatagccagtaaccaaactctctttccccatttctatctcccagcccagtcacaaaaatactcagctccatcaagaggaattgtgtctaagaggatacccctgttaatctccttttttcttggattggagaggagagaatctggacatggctttggacttggaggatatcttggattggattgcacaatggcttaaattcttgattctgcctcaggagaaagaatagtcttcatgtttccactcatccttcctttggacccatcggggaaaaagtctaaattggagatccagttttagaagtgctttctgggaagcatttaatgggattagctgtagtcactgcttatgggaagaacctcagatcagccccttaaaatgagttctagagcaggtcttctgttccagaaggggagaagcatagagggcctgtgagctcacgtgtgttctttgtcataggggtgaaaaactaacttcaagtgtcccttgtttgaaataaacttagcagagtcactttctatcttatttgtttgttcactgtgtgtttgactgtatttcaaagcacattatttcatagaagaccctaggcagttgaactccaaagtcagcccctataaacctcaagttcataatgtagcagaacagtaataggaaagtcctaggctaatgttcagacgatcggagcttggccagtgctggcaacacctttatctcagtgcctactcagctgtgaatcctctgaagttcattttttcatatcaatattgtatttttcatctctataaattccatttgcgtcttttaataaatatcttacatgttctacattatact

SEQ ID NO: 309597 - DNA, 2553 bp, Homo sapiens
agcggggagtgcgcccggagccggcgccgcgggccgagtgtcctggtgaagacctagttcttgccggagacaattccactgcagaagcactttacttaaaaggacttgccaggctggacaatgcccgttgacttggggcaggccctaggcctgctgccatcgctggcgaaggccgaggactcccagttctcagaatcagatgctgcccttcaagaggaactctccagccctgagaccgcacgccagcttttcaggcagttccgttaccaggtgatgtctgggcctcatgagaccttgaagcaacttcggaagctctgtttccagtggctacagccagaggttcacaccaaagagcagatcctagagatcctcatgttggagcagtttctgaccatcctgcctggggagatccagatgtgggtgcggaaacagtgtccaggaagtggagaagaggcagtgacccttgtggaaagcttgaagggggacccccagagactgtggcaatggatcagtatccaggttctaggacaggacatcttatcagagaagatggaatctccaagctgccaagtgggggaagtggagccccatcttgaagtggtgcctcaggagttgggacttgagaattcatcctcagggcctggggagcttctgagccacatcgtgaaagaggaatctgacacagaagcagaactagccctggctgcctcccagcctgcccgactggaggaaaggctgatcagagaccaggacctcggagcctcactgctcccagcagcacctcaggaacagtggagacaactggattccactcaaaaggagcaatactgggatctcatgctggagacctatgggaaaatggtctcaggaatttggggaagagctggcaggaatataccttcatgtcaatgagaagatcccaagacccacctgcataggagatagacaagagaatgacaaggagaacctaaatttggagaatcacagggaccaggagctcctgcatgcttcctgtcaagcttcaggagaggttccttctcaggcttccttgaggggcttcttcactgaggatgagccaggatgctttggagaaggagagaatctccctgaggctctgcaaaacattcaggatgagggaacaggggaacagctgtctcctcaagaaaggatttctgagaaacaactaggtcagcatttgcctaatcctcattcaggagaaatgtccaccatgtggcttgaggagaagagagagacctcccagaaggggcagccaagagcccccatggcccagaagctccccacctgcagggagtgtgggaagaccttttataggaattctcagcttatttttcaccaaagaactcacaccggagagacatactttcagtgcaccatctgcaaaaaagcctttctgcggagttcagactttgtgaagcatcagagaactcacacgggagagaagccctgtaaatgtgattactgtgggaaaggctttagtgacttctcaggattgcgccaccacgagaaaatccacacaggagagaaaccctataaatgtcctatctgtgagaaaagtttcattcagagatcaaactttaatagacatcagagggttcacactggagagaaaccttataaatgttcgcactgtgggaaaagtttcagctggagctcgagccttgacaaacatcaaagatcccacttaggaaagaagccctttcaatagccagtaaccaaactctctttccccatttctatctcccagcccagtcacaaaaatactcagctccatcaagaggaattgtgtctaagaggatacccctgttaatctccttttttcttggattggagaggagagaatctggacatggctttggacttggaggatatcttggattggattgcacaatggcttaaattcttgattctgcctcaggagaaagaatagtcttcatgtttccactcatccttcctttggacccatcggggaaaaagtctaaattggagatccagttttagaagtgctttctgggaagcatttaatgggattagctgtagtcactgcttatgggaagaacctcagatcagccccttaaaatgagttctagagcaggtcttctgttccagaaggggagaagcatagagggcctgtgagctcacgtgtgttctttgtcataggggtgaaaaactaacttcaagtgtcccttgtttgaaataaacttagcagagtcactttctatcttatttgtttgttcactgtgtgtttgactgtatttcaaagcacattatttcatagaagaccctaggcagttgaactccaaagtcagcccctataaacctcaagttcataatgtagcagaacagtaataggaaagtcctaggctaatgttcagacgatcggagcttggccagtgctggcaacacctttatctcagtgcctactcagctgtgaatcctctgaagttcattttttcatatcaatattgtatttttcatctctataaattccatttgcgtcttttaataaatatcttacatgttctacattatact

SEQ ID NO: 309598 - DNA, 2766 bp, Homo sapiens
gggaaatggtggctgtttagatacagtatcagtagtttgctttgtggcttcaagtttataatctttcaaaatagaatcgtgtatccattgagcaatttcaaaagctccatagttgaccccatggcttctcgggtagggcatgtgaatttgttctttctgaaaatgtgtccccttcctctgtgtagcactcaatctcattccctttttagtgtcctggtgaagacctagttcttgccggagacaattccactgcagaagcactttacttaaaaggacttgccaggctggacaatgcccgttgacttggggcaggccctaggcctgctgccatcgctggcgaaggccgaggactcccagttctcagaatcagatgctgcccttcaagaggaactctccagccctgagaccgcacgccagcttttcaggcagttccgttaccaggtgatgtctgggcctcatgagaccttgaagcaacttcggaagctctgtttccagtggctacagccagaggttcacaccaaagagcagatcctagagatcctcatgttggagcagtttctgaccatcctgcctggggagatccagatgtgggtgcggaaacagtgtccaggaagtggagaagaggcagtgacccttgtggaaagcttgaagggggacccccagagactgtggcaatggatcagtatccaggttctaggacaggacatcttatcagagaagatggaatctccaagctgccaagtgggggaagtggagccccatcttgaagtggtgcctcaggagttgggacttgagaattcatcctcagggcctggggagcttctgagccacatcgtgaaagaggaatctgacacagaagcagaactagccctggctgcctcccagcctgcccgactggaggaaaggctgatcagagaccaggacctcggagcctcactgctcccagcagcacctcaggaacagtggagacaactggattccactcaaaaggagcaatactgggatctcatgctggagacctatgggaaaatggtctcaggcaggcatttcccatcccaaatctgacctgactaattcaatagaatttggggaagagctggcaggaatataccttcatgtcaatgagaagatcccaagacccacctgcataggagatagacaagagaatgacaaggagaacctaaatttggagaatcacagggaccaggagctcctgcatgcttcctgtcaagcttcaggagaggttccttctcaggcttccttgaggggcttcttcactgaggatgagccaggatgctttggagaaggagagaatctccctgaggctctgcaaaacattcaggatgagggaacaggggaacagctgtctcctcaagaaaggatttctgagaaacaactaggtcagcatttgcctaatcctcattcaggagaaatgtccaccatgtggcttgaggagaagagagagacctcccagaaggggcagccaagagcccccatggcccagaagctccccacctgcagggagtgtgggaagaccttttataggaattctcagcttatttttcaccaaagaactcacaccggagagacatactttcagtgcaccatctgcaaaaaagcctttctgcggagttcagactttgtgaagcatcagagaactcacacgggagagaagccctgtaaatgtgattactgtgggaaaggctttagtgacttctcaggattgcgccaccacgagaaaatccacacaggagagaaaccctataaatgtcctatctgtgagaaaagtttcattcagagatcaaactttaatagacatcagagggttcacactggagagaaaccttataaatgttcgcactgtgggaaaagtttcagctggagctcgagccttgacaaacatcaaagatcccacttaggaaagaagccctttcaatagccagtaaccaaactctctttccccatttctatctcccagcccagtcacaaaaatactcagctccatcaagaggaattgtgtctaagaggatacccctgttaatctccttttttcttggattggagaggagagaatctggacatggctttggacttggaggatatcttggattggattgcacaatggcttaaattcttgattctgcctcaggagaaagaatagtcttcatgtttccactcatccttcctttggacccatcggggaaaaagtctaaattggagatccagttttagaagtgctttctgggaagcatttaatgggattagctgtagtcactgcttatgggaagaacctcagatcagccccttaaaatgagttctagagcaggtcttctgttccagaaggggagaagcatagagggcctgtgagctcacgtgtgttctttgtcataggggtgaaaaactaacttcaagtgtcccttgtttgaaataaacttagcagagtcactttctatcttatttgtttgttcactgtgtgtttgactgtatttcaaagcacattatttcatagaagaccctaggcagttgaactccaaagtcagcccctataaacctcaagttcataatgtagcagaacagtaataggaaagtcctaggctaatgttcagacgatcggagcttggccagtgctggcaacacctttatctcagtgcctactcagctgtgaatcctctgaagttcattttttcatatcaatattgtatttttcatctctataaattccatttgcgtcttttaataaatatcttacatgttctacattatact

SEQ ID NO: 309599 - DNA, 2613 bp, Homo sapiens
cttcaggcaagctgttcagaggacatgggtcgctggctcgggctgctgctggtggagatgggctccagagtcactccggaggcgctgcactatgactacgtggatgtggagaccttaaccagcatcgtcagtgctgggcgcaactccttcctatatgcaagatcctgccagaatcagtggcctgagccccgagtctatgatgatgttccttatgaaaagatgcaggacgaggagcccgagcgccccacaggggcccaggtgaagcgtcacgcctcctcctgcagtgagaagtcccatcgtgtggacccgcaggtcaaagtcaaacgccacgcctccagtgccaatcaatacaagtatggcaagaaccgagccgaggaggatgcccggaggtacttggtagaaaaagagaagctggagaaagagaaagagacgattcggacagagctgatagcactgagacaggagaagagggaactgaaggaagccattcggagcagcccaggagcaaaattaaaggctctggaagaagccgtggccaccctggaagctcagtgtcgggcaaaggaggagcgccggattgacctggagctgaagctggtggctgtgaaggagcgcttgcagcagtccctggcaggagggccagccctggggctctccgtgagcagcaagcccaagagtggggaaactgcaaataaaccccagaacagcgttccagagcaacctctccctgtcaactgtgtttctgagctgaggaagaggagcccatccatcgtagcctccaaccaaggaagggtgctacagaaagccaaggaatgggaacatgaagaagacctaggaagaggatgaggatttcattccaaaggaaataccagcttgtccacctgaggaagaaatgcttttttcacaaggagacaccaagagaagactaggaagtagccctcgttctccagggcacccaaaataccagcctttattgtctgcatgattttaggggatatggggagggaacaagtagaagggaagagggaaatggagagcatccttatgactttacaaagggtggaaatgaggatggagggatacagaagtctgcacagctgtaaaggttttatagatgtctttgccttcccttctgaggaagggaagaagtaatgaaagcacatgtgaataaccccttccatcccattcacagcatcgcactcccagtccttaaggcaaagggaggcagtgctgaagcattggtggtgcagtgtaaagagacaagacctgatcatctgatcacacttgtgccaacttgattcatattgggcattactaacaacccctgggcaaggtaaataggttgaacaatcaataacattatccctgcctgcatacatgtgaacaaaagctatagaggacatgcaaattctacagtcattcctcatatgctttagacagagtgcagctactggaatcttccagatttcagtgttttaaaatcagagctctgaatacacaaaaggaaagagaaatggagcagctgacatattttaagctcacagtgatactcagtgacaggagcacagagctctaatgtccacaggatgttgtagggtagggtctctcagtaaatcaagtcccttacctatgttctgacactgaggctcttggagctatgggttagaaatccaggaggcaatatgtctttattctaatgaagtcctcatcttgcactcagaggcccactagtttgcccttctatatattaagtaaaaccaagagaaattaagaggatgatggcttctttctgtcacatgggtgctaaaccttttacaaacacttgatacttctatagagggaccaaggacctcaagtcctgggcagtctccttactgtgctactcactactgtctcaacactgtagtgagtctgtctttaacacatttccttccaataaagataaaaccacttaactcttaagtgccagtgcttagctcaagaggaaagaaggaaaatcccagaataaccgtggccactttgctataggggttacatattttaacccacctaaggttttacagactttagcctcactcaaactttatcaccctctgaggtagctggagaccacagcaggaaaaataacctgaccagtaatcacccactgattagtggcagagcgtaggacttaggggttataagcccagatccagatagggctaggtttgagccatgcctctaatgaccagctgggtgaccttgggaaagtcacttgattgctctgattcttgttttccttatctgtgaaatgggactaacaattgttacttttctcccaagattgttgggaagatttaataagataatatatagtaggcatcttgcatagtgtctgagaaataagaaatgctcagtcaatagtggctctcattagccaggcatggtggtactcgcctgtagtcccagctactcaggaggctgaggcaggaggaccgcttgagcccaggagtttgagactgtagtgcactatgatcacgcctgtgaattgccactgcactccagcctaagcaaatagcaagaccccatctattaaaaaaaaaaagtggctattattagctatatcagaaatgt

SEQ ID NO: 309600 - DNA, 1954 bp, Homo sapiens
cttcaggcaagctgttcagaggacatgggtcgctggctcgggctgctgctggtggagatgggctccagagtcactccggaggcgctgcactatgactacgtggatgtggagaccttaaccagcatcgtcagtgctgggcgcaactccttcctatatgcaagatcctgccagaatcagtggcctgagccccgagtctatgatgatgttccttatgaaaagatgcaggacgaggagcccgagcgccccacaggggcccaggtgaagcgtcacgcctcctcctgcagtgagaagtcccatcgtgtggacccgcaggtcaaagtcaaacgccacgcctccagtgccaatcaatacaagtatggcaagaaccgagccgaggaggatgcccggaggtacttggtagaaaaagagaagctggagaaagagaaagagacgattcggacagagctgatagcactgagacaggagaagagggaactgaaggaagccattcggagcagcccaggagcaaaattaaaggctctggaagaagccgtggccaccctggaagctcagtgtcgggcaaaggaggagcgccggattgacctggagctgaagctggtggctgtgaaggagcgcttgcagcagtccctggcaggagggccagccctggggctctccgtgagcagcaagcccaagagtggggaaactgcaaataaaccccagaacagcgttccagagcaacctctccctgtcaactgtgtttctgagctgaggaagaggagcccatccatcgtagcctccaaccaaggaagggtgctacagaaagccaaggaatgggaacatgaagaagacctaggaagaggatgaggatttcattccaaaggaaataccagcttgtccacctgaggaagaaatgcttttttcacaaggagacaccaagagaagactaggaagtagccctcgttctccagggcacccaaaataccagcctttattgtctgcatgattttaggggatatggggagggaacaagtagaagggaagagggaaatggagagcatccttatgactttacaaagggtggaaatgaggatggagggatacagaagtctgcacagctgtaaaggttttatagatgtctttgccttcccttctgaggaagggaagaagtaatgaaagcacatgtgaataaccccttccatcccattcacagcatcgcactcccagtccttaaggcaaagggaggcagtgctgaagcattggtggtgcagtgtaaagagacaagacctgatcatctgatcacacttgtgccaacttgattcatattgggcattactaacaacccctgggcaaggtaaataggttgaacaatcaataacattatccctgcctgcatacatgtgaacaaaagctatagaggacatgcaaattctacagtcattcctcatatgctttagacagagtgcagctactggaatcttccagatttcagtgttttaaaatcagagctctgaatacacaaaaggaaagagaaatggagcagctgacatattttaagctcacagtgatactcagtgacaggagcacagagctctaatgtccacaggatgttgtagggtagggtctctcagtaaatcaagtcccttacctatgttctgacactgaggctcttggagctatgggttagaaatccaggaggcaatatgtctttattctaatgaagtcctcatcttgcactcagaggcccactagtttgcccttctatatattaagtaaaaccaagagaaattaagaggatgatggcttctttctgtcacatgggtgctaaaccttttacaaacacttgatacttctatagagggaccaaggacctcaagtcctgggcagtctccttactgtgctactcactactgtctcaacactgtagtgagtctgtctttaacacatttccttccaataaagataaaaccactta

SEQ ID NO: 309601 - DNA, 2559 bp, Homo sapiens
cttcaggcaagctgttcagaggacatgggtcgctggctcgggctgctgctggtggagatgggctccagagtcactccggaggcgctgcactatgactacgtggatgtggagaccttaaccagcatcgtcagtgctgggcgcaactccttcctatatgcaagatcctgccagaatcagtggcctgagccccgagtctatgatgatgttccttatgaaaagatgcaggacgaggagcccgagcgccccacaggggcccaggtgaagcgtcacgcctcctcctgcagtgagaagtcccatcgtgtggacccgcaggtcaaagtcaaacgccacgcctccagtgccaatcaatacaagtatggcaagaaccgagccgaggaggatgcccggaggtacttggtagaaaaagagaagctggagaaagagaaagagacgattcggacagagctgatagcactgagacaggagaagagggaactgaaggaagccattcggagcagcccaggagcaaaattaaaggctctggaagaagccgtggccaccctggaagctcagtgtcgggcaaaggaggagcgccggattgacctggagctgaagctggtggctgtgaaggagcgcttgcagcagtccctggcaggagggccagccctggggctctccgtgagcagcaagcccaagagtggggaaactgcaaataaaccccagaacagcgttccagagcaacctctccctgtcaactgtgtttctgagctgaggaagaggagcccatccatcgtagcctccaaccaaggaagggtgctacagaaagccaaggaatgggaacatgaagaagacctaggaagaggatgaggatttcattccaaaggaaataccagcttgtccacctgaggaagaaatgcttttttcacaaggagacaccaagagaagactaggaagtagccctcgttctccagggcacccaaaataccagcctttattgtctgcatgattttaggggatatggggagggaacaagtagaagggaagagggaaatggagagcatccttatgactttacaaagggtggaaatgaggatggagggatacagaagtctgcacagctgtaaaggttttatagatgtctttgccttcccttctgaggaagggaagaagtaatgaaagcacatgtgaataaccccttccatcccattcacagcatcgcactcccagtccttaaggcaaagggaggcagtgctgaagcattggtggtgcagtgtaaagagacaagacctgatcatctgatcacacttgtgccaacttgattcatattgggcattactaacaacccctgggcaaggtaaataggttgaacaatcaataacattatccctgcctgcatacatgtgaacaaaagctatagaggacatgcaaattctacagtcattcctcatatgctttagacagagtgcagctactggaatcttccagatttcagtgttttaaaatcagagctctgaatacacatgacaggagcacagagctctaatgtccacaggatgttgtagggtagggtctctcagtaaatcaagtcccttacctatgttctgacactgaggctcttggagctatgggttagaaatccaggaggcaatatgtctttattctaatgaagtcctcatcttgcactcagaggcccactagtttgcccttctatatattaagtaaaaccaagagaaattaagaggatgatggcttctttctgtcacatgggtgctaaaccttttacaaacacttgatacttctatagagggaccaaggacctcaagtcctgggcagtctccttactgtgctactcactactgtctcaacactgtagtgagtctgtctttaacacatttccttccaataaagataaaaccacttaactcttaagtgccagtgcttagctcaagaggaaagaaggaaaatcccagaataaccgtggccactttgctataggggttacatattttaacccacctaaggttttacagactttagcctcactcaaactttatcaccctctgaggtagctggagaccacagcaggaaaaataacctgaccagtaatcacccactgattagtggcagagcgtaggacttaggggttataagcccagatccagatagggctaggtttgagccatgcctctaatgaccagctgggtgaccttgggaaagtcacttgattgctctgattcttgttttccttatctgtgaaatgggactaacaattgttacttttctcccaagattgttgggaagatttaataagataatatatagtaggcatcttgcatagtgtctgagaaataagaaatgctcagtcaatagtggctctcattagccaggcatggtggtactcgcctgtagtcccagctactcaggaggctgaggcaggaggaccgcttgagcccaggagtttgagactgtagtgcactatgatcacgcctgtgaattgccactgcactccagcctaagcaaatagcaagaccccatctattaaaaaaaaaaagtggctattattagctatatcagaaatgt

SEQ ID NO: 309602 - DNA, 1651 bp, Homo sapiens
cttcaggcaagctgttcagaggacatgggtcgctggctcgggctgctgctggtggagatgggctccagagtcactccggaggcgctgcactatgactacgtggatgtggagaccttaaccagcatcgtcagtgctgggcgcaactccttcctatatgcaagatcctgccagaatcagtggcctgagccccgagtctatgatgatgttccttatgaaaagatgcaggacgaggagcccgagcgccccacaggggcccaggtgaagcgtcacgcctcctcctgcagtgagaagtcccatcgtgtggacccgcaggtcaaagtcaaacgccacgcctccagtgccaatcaatacaagtatggcaagaaccgagccgaggaggatgcccggaggtacttggtagaaaaagagaagctggagaaagagaaagagacgattcggacagagctgatagcactgagacaggagaagagggaactgaaggaagccattcggagcagcccaggagcaaaattaaaggctctggaagaagccgtggccaccctggaagctcagtgtcgggcaaaggaggagcgccggattgacctggagctgaagctggtggctgtgaaggagcgcttgcagcagtccctggcaggagggccagccctggggctctccgtgagcagcaagcccaagagtggggaaactgcaaataaaccccagaacagcgttccagagcaacctctccctgtcaactgtgtttctgagctgaggaagaggagcccatccatcgtagcctccaaccaaggaagggtgctacagaaagccaaggaatgggaacatgaagaagacctaggaagaggatgaggatttcattccaaaggaaataccagcttgtccacctgaggaagaaatgcttttttcacaaggagacaccaagagaagactaggaagtagccctcgttctccagggcacccaaaataccagcctttattgtctgcatgattttaggggatatggggagggaacaagtagaagggaagagggaaatggagagcatccttatgactttacaaagggtggaaatgaggatggagggatacagaagtctgcacagctgtaaaggttttatagatgtctttgccttcccttctgaggaagggaagaagtaatgaaagcacatgtgaataaccccttccatcccattcacagcatcgcactcccagtccttaaggcaaagggaggcagtgctgaagcattggtggtgcagtgtaaagagacaagacctgatcatctgatcacacttgtgccaacttgattcatattgggcattactaacaacccctgggcaaggtaaataggttgaacaatcaataacattatccctgcctgcatacatgtgaacaaaagctatagaggacatgcaaattctacagtcattcctcatatgctttagacagagtgcagctactggaatcttccagatttcagtgttttaaaatcagagctctgaatacacaaaaggaaagagaaatggagcagctgacatattttaagctcacagtgatactcagtgatacgattgctgcgtgcctgaattcacgcctgtatgttttcttcaacccaaaggttaaagaagactggaagttactgaagcgacgtgttaccaag

SEQ ID NO: 309603 - DNA, 529 bp, Homo sapiens
gctcctagtccgtgtgccctgtggcctcccttttgcttcttatttccttagaggattcacactaaatatatctaagggactaggtctaaatatttccatttcatagatggagaagttggggctgaaagagaagctgacaccacacaagtacctttgccagaggtcagaactgagggcctttcccttccccatatctctgcaggtgccaatcaatacaagtatggcaagaaccgagccgaggaggatgcccggaggtacttggtagaaaaagagaagctggagaaagagaaagagacgattcggacagagctgatagcactgagacaggagaagagggaactgaaggaagccattcggagcagcccaggtacctatgtgggtgtggtcctgagcacctatgggtggccagctcatccttgggtacagtaaagggaggtctcttgcacaagtcacctggtttcttacccaagagaagtgggcttctcctcccctcctccttctcctcctcctcctcttcttctcctcttca

SEQ ID NO: 309604 - DNA, 728 bp, Homo sapiens
tagcagttgatagtatttatttgttatcattgtaatagcatataccattcaaggtatagctattttttctcttctccccaaaaccttaattttttttttatactgagatcttcttattcaacccatatcaatttgactggacttgtagcattcaaatattaacacagatttcaaattttagaaagatatttgtactagaatacttgtcaggtaactctgtggtatttctattagtatggaaattgtttataaagacacactctgaatttttgtggtcaagtagggtttgtagaatctttgatagcccagcatgttaaaatgtaaatgttctagaaaaataatctttcactttccctgtgaaaagaccccgcaaaaaagttttttgaggggtgtgttaaatatataaattttgaaagacgtagacaaaatagttaactatctacttatgatatttaatagtttggccaggcatggcaactcatgcctgttgtaatcccagcgtattgggcggctgaggtaggaggattgtgtgagcccaggcgtttgagactgcagtgagctatggatcctgcctggatgacagggcaagaccccaagtcaaaaaaaaaaaaaaagtaatagtttaatgaacatttaaaaacacattgtttggaataatgtgtgttagtcttcagttatgtctttgacattcaaattttcatcctgagaaccactttttgagacatcta

SEQ ID NO: 309605 - DNA, 4156 bp, Homo sapiens
ctcgcgagagaggacggaagcctgtgggagcccgtggcctttaaagtgccgttcagccttttcctccaggggtgctttgtaaacacggctgtgctcagggctcgcgggtgaccgaaaggatcatgaactagtgacctggaaagggtactagatggaaacttgagaaaggactgcttattgataacagctaaggtattcctggaagcagagtaaataaagctcatggcccaccagctagaaagtattcttgccatgagaaaaagaatgtgataagttattcaacttatgaaattcaagttacatgtgaattctgccaggcaatacaaggacctgtggaatatgagtgatgacaaaccctttctatgtactgcgcctggatgtggccagcgttttaccaacgaggatcatttggctgtccataaacataaacatgagatgacactgaaatttggtccagcacgtaatgacagtgtcattgtggctgatcagaccccaacaccaacaagattcttgaaaaactgtgaagaagtgggtttgtttaatgagttggcgagtccatttgagaatgaattcaagaaagcttcagaagatgacattaaaaaaatgcctctagatttatcccctcttgcaacacctatcataagaagcaaaattgaggagccttctgttgtagaaacaactcaccaggatagtcctttacctcacccagagtctactaccagtgatgagaaggaagtaccattggcacaaactgcacagcccacatcagctattgttcgtccagcatcattacaggttcccaatgtgctgcttacaagttctgactcaagtgtaattattcagcaggcagtaccttcaccaacctcaagtactgtaatcacccaggcaccatcctctaacaggccaattgtccctgtaccaggcccatttcctcttctgttacatcttcctaatggacaaaccatgcctgttgctattcctgcatcaattacaagttctaatgtgcatgttccagctgcagtcccactcgttcgaccagtcaccatggtgcctagtgttccaggaatcccaggtccttcctctccccaaccagtacagtcagaagcaaaaatgagattaaaagctgctttgacccagcaacatcctccagttaccaatggtgatactgtcaaaggtcatggtagcggattggttaggactcagtcagaggaatctcgaccgcagtcattacaacagccagccacatccactacagaaactccggcttctccagctcacacaactccacagacccaaagtacaagtggtcgtcggagaagagcagctaacgaagatcctgatgaaaaaaggagaaagtttttagagcgaaatagagcagcagcttcaagatgccgacaaaaaaggaaagtctgggttcagtctttagagaagaaagctgaagacttgagttcattaaatggtcagctgcagagtgaagtcaccctgctgagaaatgaagtggcacagctgaaacagcttcttctggctcataaagattgccctgtaaccgccatgcagaagaaatctggctatcatactgctgataaagatgatagttcagaagacatttcagtgccgagtagtccacatacagaagctatacagcatagttcggtcagcacatccaatggagtcagttcaacctccaaggcagaagctgtagccacttcagtcctcacccagatggcggaccagagtacagagcctgctctttcacagatcgttatggctccttcctcccagtcacagccctcaggaagttgattaaaaacctgcagtacaacagttttagatactcattagtgacttcaaagggaaatcaaggaaagaccagtttccatttatgcgaaatctgtggttgtaaattttttttttttacttgaaattaaatttggctctaaagttggtgtagcagcagttgatcagactgaaaaacggtttttagtctctggaaaaagactgattttgctttttttataaatattattagatttattaatttttctgtgctcaatgtgtaaattgtattataattcattgtgatttatttcacttttaatttgctggtgttttaataaatgggggtgttactgaatctttcttcccacttccatttcttttgaccaccccttaaccctcaactgtgacggtagtagtattatcatttataccaaagttttgcatagtccctgttgactttgtaatgttaacggagtcataaaagcactaggcaagagaaagatagaaatttgcttttaatctttttgccttttattttgcacattatgcaaaaggaaaaacattaaagaacacttttttttaagtgagtgaaaacatggtaaagacatacagtgcttttatgcacattgttaagctaaatcaaggtcatttataatcattttccttttttatttaagattttaagtaaacaaattttagaattttcagcatttcaaaaatgattttatttttcaagtcttaaattcaatattttacacctatgttttgaggctaaaaatatgaaattatataatgtatgatacagggttatcaaatatctaataatttttgaaattagctcttgtttttggtttttttgttgttgtttttacagatttcaggttacaaactgcaaagtttatgcataattaagtatggtatggttgccagaaaagcctaaaattactacttagaaaatttaagactgtttacccccattgtcttgtacttgcgagctaacttgtactattcttgtgaaagcactgtcatcttttagtagcaaattttgataatgtttctcgtggaaaaaaaaatcagtatctatctttagaacaatgtaattataatgtgggaagtgtgcatgaatgagagagagtgtgtgtgtatctgtgtgtgtgtgcgcgtgtgtgtgtgtcttttaatagtttatgccagcaatctttgcttgaatgtttaacgatgccttcagtgtgatgctggccaatagatgattgcagtttaaaatgtcattattgtgcaggcttggataactaacattccatgatgtagcttgtttctgatgagatgattgtaggtacatttttctcattatccaatcatctgtgggatacttagttttctaatgtgccattatctatttttattctgcagttatgttcaaaatacagtacatattttaaaatagaataaattgttaaacataaaattttaaaagtagtagatgtgcgtaagaaaactttgtaaaatagttatgagtcctacccagtagcaacttctggcattcaagcaggattccactatgtaaatatctgtaatgcatttataataagttgtgtagtttgtcctgcatccatactacactatttgctaaagtctcagtgccatctcctaatgagactgacattttaaaagtctgtatggaatatccttgataattcaaggaaatatccctcctgcctaagttccaaactgggaaacattcaaattatataaatgacatttcaggactttaagtatgaagataatgggaattttattgttttgctttttaaaatgagagcatttttatttgataattttttttaaatttttaatttttaactaatttcattattttaaagtaatcagtttttcaaatcatgattttgatatcattattctaaggagttatctcaaaggcacaaaatatgaattctgcaagaaggctattttttattgtagtttgaatgggttaggaaaagcctcaatttttcactcttaagtccttcagtacatttttctttcatcttattacttatgcaagttaaggttctttggtaacagaattcttgcaactgtaaaataaaactacatagatgtaagaagtcatgtaaacggttaacaagcttaccaaggttagcaaaactttcattgtaaatcagtctgtactgagcaaataaaaatcattattagttgtataaacacaaattccattttgactttcaggatgtcatactacttctgtacctagcattttcagtccttatatttgcaatgttacacaaactgtactattttcttttatgtgcagtttgcatgagtaaaccatcagagaataaattctatctttaaattatgt

SEQ ID NO: 309606 - DNA, 3402 bp, Homo sapiens
cggggcagtttattatttttagaagaggcatatgaagtgtgtaggagtaaggggtcccaatgtctacagcttattttgtaattattcagcaggcagtaccttcaccaacctcaagtactgtaatcacccaggcaccatcctctaacaggccaattgtccctgtaccaggcccatttcctcttctgttacatcttcctaatggacaaaccatgcctgttgctattcctgcatcaattacaagttctaatgtgcatgttccagctgcagtcccactcgttcgaccagtcaccatggtgcctagtgttccaggaatcccaggtccttcctctccccaaccagtacagtcagaagcaaaaatgagattaaaagctgctttgacccagcaacatcctccagttaccaatggtgatactgtcaaaggtcatggtagcggattggttaggactcagtcagaggaatctcgaccgcagtcattacaacagccagccacatccactacagaaactccggcttctccagctcacacaactccacagacccaaagtacaagtggtcgtcggagaagagcagctaacgaagatcctgatgaaaaaaggagaaagtttttagagcgaaatagagcagcagcttcaagatgccgacaaaaaaggaaagtctgggttcagtctttagagaagaaagctgaagacttgagttcattaaatggtcagctgcagagtgaagtcaccctgctgagaaatgaagtggcacagctgaaacagcttcttctggctcataaagattgccctgtaaccgccatgcagaagaaatctggctatcatactgctgataaagatgatagttcagaagacatttcagtgccgagtagtccacatacagaagctatacagcatagttcggtcagcacatccaatggagtcagttcaacctccaaggcagaagctgtagccacttcagtcctcacccagatggcggaccagagtacagagcctgctctttcacagatcgttatggctccttcctcccagtcacagccctcaggaagttgattaaaaacctgcagtacaacagttttagatactcattagtgacttcaaagggaaatcaaggaaagaccagtttccatttatgcgaaatctgtggttgtaaattttttttttttacttgaaattaaatttggctctaaagttggtgtagcagcagttgatcagactgaaaaacggtttttagtctctggaaaaagactgattttgctttttttataaatattattagatttattaatttttctgtgctcaatgtgtaaattgtattataattcattgtgatttatttcacttttaatttgctggtgttttaataaatgggggtgttactgaatctttcttcccacttccatttcttttgaccaccccttaaccctcaactgtgacggtagtagtattatcatttataccaaagttttgcatagtccctgttgactttgtaatgttaacggagtcataaaagcactaggcaagagaaagatagaaatttgcttttaatctttttgccttttattttgcacattatgcaaaaggaaaaacattaaagaacacttttttttaagtgagtgaaaacatggtaaagacatacagtgcttttatgcacattgttaagctaaatcaaggtcatttataatcattttccttttttatttaagattttaagtaaacaaattttagaattttcagcatttcaaaaatgattttatttttcaagtcttaaattcaatattttacacctatgttttgaggctaaaaatatgaaattatataatgtatgatacagggttatcaaatatctaataatttttgaaattagctcttgtttttggtttttttgttgttgtttttacagatttcaggttacaaactgcaaagtttatgcataattaagtatggtatggttgccagaaaagcctaaaattactacttagaaaatttaagactgtttacccccattgtcttgtacttgcgagctaacttgtactattcttgtgaaagcactgtcatcttttagtagcaaattttgataatgtttctcgtggaaaaaaaaatcagtatctatctttagaacaatgtaattataatgtgggaagtgtgcatgaatgagagagagtgtgtgtgtatctgtgtgtgtgtgcgcgtgtgtgtgtgtcttttaatagtttatgccagcaatctttgcttgaatgtttaacgatgccttcagtgtgatgctggccaatagatgattgcagtttaaaatgtcattattgtgcaggcttggataactaacattccatgatgtagcttgtttctgatgagatgattgtaggtacatttttctcattatccaatcatctgtgggatacttagttttctaatgtgccattatctatttttattctgcagttatgttcaaaatacagtacatattttaaaatagaataaattgttaaacataaaattttaaaagtagtagatgtgcgtaagaaaactttgtaaaatagttatgagtcctacccagtagcaacttctggcattcaagcaggattccactatgtaaatatctgtaatgcatttataataagttgtgtagtttgtcctgcatccatactacactatttgctaaagtctcagtgccatctcctaatgagactgacattttaaaagtctgtatggaatatccttgataattcaaggaaatatccctcctgcctaagttccaaactgggaaacattcaaattatataaatgacatttcaggactttaagtatgaagataatgggaattttattgttttgctttttaaaatgagagcatttttatttgataattttttttaaatttttaatttttaactaatttcattattttaaagtaatcagtttttcaaatcatgattttgatatcattattctaaggagttatctcaaaggcacaaaatatgaattctgcaagaaggctattttttattgtagtttgaatgggttaggaaaagcctcaatttttcactcttaagtccttcagtacatttttctttcatcttattacttatgcaagttaaggttctttggtaacagaattcttgcaactgtaaaataaaactacatagatgtaagaagtcatgtaaacggttaacaagcttaccaaggttagcaaaactttcattgtaaatcagtctgtactgagcaaataaaaatcattattagttgtataaacacaaattccattttgactttcaggatgtcatactacttctgtacctagcattttcagtccttatatttgcaatgttacacaaactgtactattttcttttatgtgcagtttgcatgagtaaaccatcagagaataaattctatctttaaattatgt

SEQ ID NO: 309607 - DNA, 4059 bp, Homo sapiens
ctcgcgagagaggacggaagcctgtgggagcccgtggcctttaaagtgccgttcagccttttcctccaggggtgctttgtaaacacggctgtgctcagggctcgcgggtgaccgaaaggatcatgaactagtgacctggaaagggtactagatggaaacttgagaaaggactgcttattgataacagctaaggtattcctggaagcagagtaaataaagctcatggcccaccagctagaaagtattcttgccatgagaaaaagaatgtgataagttattcaacttatgaaattcaagttacatgtgaattctgccaggcaatacaaggacctgtggaatatgagtgatgacaaaccctttctatgtactgcgcctggatgtggccagatcagaccccaacaccaacaagattcttgaaaaactgtgaagaagtgggtttgtttaatgagttggcgagtccatttgagaatgaattcaagaaagcttcagaagatgacattaaaaaaatgcctctagatttatcccctcttgcaacacctatcataagaagcaaaattgaggagccttctgttgtagaaacaactcaccaggatagtcctttacctcacccagagtctactaccagtgatgagaaggaagtaccattggcacaaactgcacagcccacatcagctattgttcgtccagcatcattacaggttcccaatgtgctgcttacaagttctgactcaagtgtaattattcagcaggcagtaccttcaccaacctcaagtactgtaatcacccaggcaccatcctctaacaggccaattgtccctgtaccaggcccatttcctcttctgttacatcttcctaatggacaaaccatgcctgttgctattcctgcatcaattacaagttctaatgtgcatgttccagctgcagtcccactcgttcgaccagtcaccatggtgcctagtgttccaggaatcccaggtccttcctctccccaaccagtacagtcagaagcaaaaatgagattaaaagctgctttgacccagcaacatcctccagttaccaatggtgatactgtcaaaggtcatggtagcggattggttaggactcagtcagaggaatctcgaccgcagtcattacaacagccagccacatccactacagaaactccggcttctccagctcacacaactccacagacccaaagtacaagtggtcgtcggagaagagcagctaacgaagatcctgatgaaaaaaggagaaagtttttagagcgaaatagagcagcagcttcaagatgccgacaaaaaaggaaagtctgggttcagtctttagagaagaaagctgaagacttgagttcattaaatggtcagctgcagagtgaagtcaccctgctgagaaatgaagtggcacagctgaaacagcttcttctggctcataaagattgccctgtaaccgccatgcagaagaaatctggctatcatactgctgataaagatgatagttcagaagacatttcagtgccgagtagtccacatacagaagctatacagcatagttcggtcagcacatccaatggagtcagttcaacctccaaggcagaagctgtagccacttcagtcctcacccagatggcggaccagagtacagagcctgctctttcacagatcgttatggctccttcctcccagtcacagccctcaggaagttgattaaaaacctgcagtacaacagttttagatactcattagtgacttcaaagggaaatcaaggaaagaccagtttccatttatgcgaaatctgtggttgtaaattttttttttttacttgaaattaaatttggctctaaagttggtgtagcagcagttgatcagactgaaaaacggtttttagtctctggaaaaagactgattttgctttttttataaatattattagatttattaatttttctgtgctcaatgtgtaaattgtattataattcattgtgatttatttcacttttaatttgctggtgttttaataaatgggggtgttactgaatctttcttcccacttccatttcttttgaccaccccttaaccctcaactgtgacggtagtagtattatcatttataccaaagttttgcatagtccctgttgactttgtaatgttaacggagtcataaaagcactaggcaagagaaagatagaaatttgcttttaatctttttgccttttattttgcacattatgcaaaaggaaaaacattaaagaacacttttttttaagtgagtgaaaacatggtaaagacatacagtgcttttatgcacattgttaagctaaatcaaggtcatttataatcattttccttttttatttaagattttaagtaaacaaattttagaattttcagcatttcaaaaatgattttatttttcaagtcttaaattcaatattttacacctatgttttgaggctaaaaatatgaaattatataatgtatgatacagggttatcaaatatctaataatttttgaaattagctcttgtttttggtttttttgttgttgtttttacagatttcaggttacaaactgcaaagtttatgcataattaagtatggtatggttgccagaaaagcctaaaattactacttagaaaatttaagactgtttacccccattgtcttgtacttgcgagctaacttgtactattcttgtgaaagcactgtcatcttttagtagcaaattttgataatgtttctcgtggaaaaaaaaatcagtatctatctttagaacaatgtaattataatgtgggaagtgtgcatgaatgagagagagtgtgtgtgtatctgtgtgtgtgtgcgcgtgtgtgtgtgtcttttaatagtttatgccagcaatctttgcttgaatgtttaacgatgccttcagtgtgatgctggccaatagatgattgcagtttaaaatgtcattattgtgcaggcttggataactaacattccatgatgtagcttgtttctgatgagatgattgtaggtacatttttctcattatccaatcatctgtgggatacttagttttctaatgtgccattatctatttttattctgcagttatgttcaaaatacagtacatattttaaaatagaataaattgttaaacataaaattttaaaagtagtagatgtgcgtaagaaaactttgtaaaatagttatgagtcctacccagtagcaacttctggcattcaagcaggattccactatgtaaatatctgtaatgcatttataataagttgtgtagtttgtcctgcatccatactacactatttgctaaagtctcagtgccatctcctaatgagactgacattttaaaagtctgtatggaatatccttgataattcaaggaaatatccctcctgcctaagttccaaactgggaaacattcaaattatataaatgacatttcaggactttaagtatgaagataatgggaattttattgttttgctttttaaaatgagagcatttttatttgataattttttttaaatttttaatttttaactaatttcattattttaaagtaatcagtttttcaaatcatgattttgatatcattattctaaggagttatctcaaaggcacaaaatatgaattctgcaagaaggctattttttattgtagtttgaatgggttaggaaaagcctcaatttttcactcttaagtccttcagtacatttttctttcatcttattacttatgcaagttaaggttctttggtaacagaattcttgcaactgtaaaataaaactacatagatgtaagaagtcatgtaaacggttaacaagcttaccaaggttagcaaaactttcattgtaaatcagtctgtactgagcaaataaaaatcattattagttgtataaacacaaattccattttgactttcaggatgtcatactacttctgtacctagcattttcagtccttatatttgcaatgttacacaaactgtactattttcttttatgtgcagtttgcatgagtaaaccatcagagaataaattctatctttaaattatgt

SEQ ID NO: 309608 - DNA, 3989 bp, Homo sapiens
tgccgaagacccgccttcttctccttaagcctgacggaatcacctgactcggaggcgctccctcagaaggaagggtactagatggaaacttgagaaaggactgcttattgataacagctaaggtattcctggaagcagagtaaataaagctcatggcccaccagctagaaagtattcttgccatgagaaaaagaatgtgataagttattcaacttatgaaattcaagttacatgtgaattctgccaggcaatacaaggacctgtggaatatgagtgatgacaaaccctttctatgtactgcgcctggatgtggccagatcagaccccaacaccaacaagattcttgaaaaactgtgaagaagtgggtttgtttaatgagttggcgagtccatttgagaatgaattcaagaaagcttcagaagatgacattaaaaaaatgcctctagatttatcccctcttgcaacacctatcataagaagcaaaattgaggagccttctgttgtagaaacaactcaccaggatagtcctttacctcacccagagtctactaccagtgatgagaaggaagtaccattggcacaaactgcacagcccacatcagctattgttcgtccagcatcattacaggttcccaatgtgctgcttacaagttctgactcaagtgtaattattcagcaggcagtaccttcaccaacctcaagtactgtaatcacccaggcaccatcctctaacaggccaattgtccctgtaccaggcccatttcctcttctgttacatcttcctaatggacaaaccatgcctgttgctattcctgcatcaattacaagttctaatgtgcatgttccagctgcagtcccactcgttcgaccagtcaccatggtgcctagtgttccaggaatcccaggtccttcctctccccaaccagtacagtcagaagcaaaaatgagattaaaagctgctttgacccagcaacatcctccagttaccaatggtgatactgtcaaaggtcatggtagcggattggttaggactcagtcagaggaatctcgaccgcagtcattacaacagccagccacatccactacagaaactccggcttctccagctcacacaactccacagacccaaagtacaagtggtcgtcggagaagagcagctaacgaagatcctgatgaaaaaaggagaaagtttttagagcgaaatagagcagcagcttcaagatgccgacaaaaaaggaaagtctgggttcagtctttagagaagaaagctgaagacttgagttcattaaatggtcagctgcagagtgaagtcaccctgctgagaaatgaagtggcacagctgaaacagcttcttctggctcataaagattgccctgtaaccgccatgcagaagaaatctggctatcatactgctgataaagatgatagttcagaagacatttcagtgccgagtagtccacatacagaagctatacagcatagttcggtcagcacatccaatggagtcagttcaacctccaaggcagaagctgtagccacttcagtcctcacccagatggcggaccagagtacagagcctgctctttcacagatcgttatggctccttcctcccagtcacagccctcaggaagttgattaaaaacctgcagtacaacagttttagatactcattagtgacttcaaagggaaatcaaggaaagaccagtttccatttatgcgaaatctgtggttgtaaattttttttttttacttgaaattaaatttggctctaaagttggtgtagcagcagttgatcagactgaaaaacggtttttagtctctggaaaaagactgattttgctttttttataaatattattagatttattaatttttctgtgctcaatgtgtaaattgtattataattcattgtgatttatttcacttttaatttgctggtgttttaataaatgggggtgttactgaatctttcttcccacttccatttcttttgaccaccccttaaccctcaactgtgacggtagtagtattatcatttataccaaagttttgcatagtccctgttgactttgtaatgttaacggagtcataaaagcactaggcaagagaaagatagaaatttgcttttaatctttttgccttttattttgcacattatgcaaaaggaaaaacattaaagaacacttttttttaagtgagtgaaaacatggtaaagacatacagtgcttttatgcacattgttaagctaaatcaaggtcatttataatcattttccttttttatttaagattttaagtaaacaaattttagaattttcagcatttcaaaaatgattttatttttcaagtcttaaattcaatattttacacctatgttttgaggctaaaaatatgaaattatataatgtatgatacagggttatcaaatatctaataatttttgaaattagctcttgtttttggtttttttgttgttgtttttacagatttcaggttacaaactgcaaagtttatgcataattaagtatggtatggttgccagaaaagcctaaaattactacttagaaaatttaagactgtttacccccattgtcttgtacttgcgagctaacttgtactattcttgtgaaagcactgtcatcttttagtagcaaattttgataatgtttctcgtggaaaaaaaaatcagtatctatctttagaacaatgtaattataatgtgggaagtgtgcatgaatgagagagagtgtgtgtgtatctgtgtgtgtgtgcgcgtgtgtgtgtgtcttttaatagtttatgccagcaatctttgcttgaatgtttaacgatgccttcagtgtgatgctggccaatagatgattgcagtttaaaatgtcattattgtgcaggcttggataactaacattccatgatgtagcttgtttctgatgagatgattgtaggtacatttttctcattatccaatcatctgtgggatacttagttttctaatgtgccattatctatttttattctgcagttatgttcaaaatacagtacatattttaaaatagaataaattgttaaacataaaattttaaaagtagtagatgtgcgtaagaaaactttgtaaaatagttatgagtcctacccagtagcaacttctggcattcaagcaggattccactatgtaaatatctgtaatgcatttataataagttgtgtagtttgtcctgcatccatactacactatttgctaaagtctcagtgccatctcctaatgagactgacattttaaaagtctgtatggaatatccttgataattcaaggaaatatccctcctgcctaagttccaaactgggaaacattcaaattatataaatgacatttcaggactttaagtatgaagataatgggaattttattgttttgctttttaaaatgagagcatttttatttgataattttttttaaatttttaatttttaactaatttcattattttaaagtaatcagtttttcaaatcatgattttgatatcattattctaaggagttatctcaaaggcacaaaatatgaattctgcaagaaggctattttttattgtagtttgaatgggttaggaaaagcctcaatttttcactcttaagtccttcagtacatttttctttcatcttattacttatgcaagttaaggttctttggtaacagaattcttgcaactgtaaaataaaactacatagatgtaagaagtcatgtaaacggttaacaagcttaccaaggttagcaaaactttcattgtaaatcagtctgtactgagcaaataaaaatcattattagttgtataaacacaaattccattttgactttcaggatgtcatactacttctgtacctagcattttcagtccttatatttgcaatgttacacaaactgtactattttcttttatgtgcagtttgcatgagtaaaccatcagagaataaattctatctttaaattatgt

SEQ ID NO: 309609 - DNA, 3816 bp, Homo sapiens
aacgaggatcatgtttatgtttatggacagccaaatgatcctcgttggtaaaacgctggccacatccaggcgctgtccataaacataaacatgagatgacactgaaatttggtccagcacgtaatgacagtgtcattgtggctgatcagaccccaacaccaacaagattcttgaaaaactgtgaagaagtgggtttgtttaatgagttggcgagtccatttgagaatgaattcaagaaagcttcagaagatgacattaaaaaaatgcctctagatttatcccctcttgcaacacctatcataagaagcaaaattgaggagccttctgttgtagaaacaactcaccaggatagtcctttacctcacccagagtctactaccagtgatgagaaggaagtaccattggcacaaactgcacagcccacatcagctattgttcgtccagcatcattacaggttcccaatgtgctgcttacaagttctgactcaagtgtaattattcagcaggcagtaccttcaccaacctcaagtactgtaatcacccaggcaccatcctctaacaggccaattgtccctgtaccaggcccatttcctcttctgttacatcttcctaatggacaaaccatgcctgttgctattcctgcatcaattacaagttctaatgtgcatgttccagctgcagtcccactcgttcgaccagtcaccatggtgcctagtgttccaggaatcccaggtccttcctctccccaaccagtacagtcagaagcaaaaatgagattaaaagctgctttgacccagcaacatcctccagttaccaatggtgatactgtcaaaggtcatggtagcggattggttaggactcagtcagaggaatctcgaccgcagtcattacaacagccagccacatccactacagaaactccggcttctccagctcacacaactccacagacccaaagtacaagtggtcgtcggagaagagcagctaacgaagatcctgatgaaaaaaggagaaagtttttagagcgaaatagagcagcagcttcaagatgccgacaaaaaaggaaagtctgggttcagtctttagagaagaaagctgaagacttgagttcattaaatggtcagctgcagagtgaagtcaccctgctgagaaatgaagtggcacagctgaaacagcttcttctggctcataaagattgccctgtaaccgccatgcagaagaaatctggctatcatactgctgataaagatgatagttcagaagacatttcagtgccgagtagtccacatacagaagctatacagcatagttcggtcagcacatccaatggagtcagttcaacctccaaggcagaagctgtagccacttcagtcctcacccagatggcggaccagagtacagagcctgctctttcacagatcgttatggctccttcctcccagtcacagccctcaggaagttgattaaaaacctgcagtacaacagttttagatactcattagtgacttcaaagggaaatcaaggaaagaccagtttccatttatgcgaaatctgtggttgtaaattttttttttttacttgaaattaaatttggctctaaagttggtgtagcagcagttgatcagactgaaaaacggtttttagtctctggaaaaagactgattttgctttttttataaatattattagatttattaatttttctgtgctcaatgtgtaaattgtattataattcattgtgatttatttcacttttaatttgctggtgttttaataaatgggggtgttactgaatctttcttcccacttccatttcttttgaccaccccttaaccctcaactgtgacggtagtagtattatcatttataccaaagttttgcatagtccctgttgactttgtaatgttaacggagtcataaaagcactaggcaagagaaagatagaaatttgcttttaatctttttgccttttattttgcacattatgcaaaaggaaaaacattaaagaacacttttttttaagtgagtgaaaacatggtaaagacatacagtgcttttatgcacattgttaagctaaatcaaggtcatttataatcattttccttttttatttaagattttaagtaaacaaattttagaattttcagcatttcaaaaatgattttatttttcaagtcttaaattcaatattttacacctatgttttgaggctaaaaatatgaaattatataatgtatgatacagggttatcaaatatctaataatttttgaaattagctcttgtttttggtttttttgttgttgtttttacagatttcaggttacaaactgcaaagtttatgcataattaagtatggtatggttgccagaaaagcctaaaattactacttagaaaatttaagactgtttacccccattgtcttgtacttgcgagctaacttgtactattcttgtgaaagcactgtcatcttttagtagcaaattttgataatgtttctcgtggaaaaaaaaatcagtatctatctttagaacaatgtaattataatgtgggaagtgtgcatgaatgagagagagtgtgtgtgtatctgtgtgtgtgtgcgcgtgtgtgtgtgtcttttaatagtttatgccagcaatctttgcttgaatgtttaacgatgccttcagtgtgatgctggccaatagatgattgcagtttaaaatgtcattattgtgcaggcttggataactaacattccatgatgtagcttgtttctgatgagatgattgtaggtacatttttctcattatccaatcatctgtgggatacttagttttctaatgtgccattatctatttttattctgcagttatgttcaaaatacagtacatattttaaaatagaataaattgttaaacataaaattttaaaagtagtagatgtgcgtaagaaaactttgtaaaatagttatgagtcctacccagtagcaacttctggcattcaagcaggattccactatgtaaatatctgtaatgcatttataataagttgtgtagtttgtcctgcatccatactacactatttgctaaagtctcagtgccatctcctaatgagactgacattttaaaagtctgtatggaatatccttgataattcaaggaaatatccctcctgcctaagttccaaactgggaaacattcaaattatataaatgacatttcaggactttaagtatgaagataatgggaattttattgttttgctttttaaaatgagagcatttttatttgataattttttttaaatttttaatttttaactaatttcattattttaaagtaatcagtttttcaaatcatgattttgatatcattattctaaggagttatctcaaaggcacaaaatatgaattctgcaagaaggctattttttattgtagtttgaatgggttaggaaaagcctcaatttttcactcttaagtccttcagtacatttttctttcatcttattacttatgcaagttaaggttctttggtaacagaattcttgcaactgtaaaataaaactacatagatgtaagaagtcatgtaaacggttaacaagcttaccaaggttagcaaaactttcattgtaaatcagtctgtactgagcaaataaaaatcattattagttgtataaacacaaattccattttgactttcaggatgtcatactacttctgtacctagcattttcagtccttatatttgcaatgttacacaaactgtactattttcttttatgtgcagtttgcatgagtaaaccatcagagaataaattctatctttaaattatgt

SEQ ID NO: 309610 - DNA, 3594 bp, Homo sapiens
  misc_feature (39)..(39): n is a, c, g, or t
tcagctcggtcctgatttggttctgaagatacattaaanaaatgcctctagatttatcccctcttgcaacacctatcataagaagcaaaattgaggagccttctgttgtagaaacaactcaccaggatagtcctttacctcacccagagtctactaccagtgatgagaaggaagtaccattggcacaaactgcacagcccacatcagctattgttcgtccagcatcattacaggttcccaatgtgctgcttacaagttctgactcaagtgtaattattcagcaggcagtaccttcaccaacctcaagtactgtaatcacccaggcaccatcctctaacaggccaattgtccctgtaccaggcccatttcctcttctgttacatcttcctaatggacaaaccatgcctgttgctattcctgcatcaattacaagttctaatgtgcatgttccagctgcagtcccactcgttcgaccagtcaccatggtgcctagtgttccaggaatcccaggtccttcctctccccaaccagtacagtcagaagcaaaaatgagattaaaagctgctttgacccagcaacatcctccagttaccaatggtgatactgtcaaaggtcatggtagcggattggttaggactcagtcagaggaatctcgaccgcagtcattacaacagccagccacatccactacagaaactccggcttctccagctcacacaactccacagacccaaagtacaagtggtcgtcggagaagagcagctaacgaagatcctgatgaaaaaaggagaaagtttttagagcgaaatagagcagcagcttcaagatgccgacaaaaaaggaaagtctgggttcagtctttagagaagaaagctgaagacttgagttcattaaatggtcagctgcagagtgaagtcaccctgctgagaaatgaagtggcacagctgaaacagcttcttctggctcataaagattgccctgtaaccgccatgcagaagaaatctggctatcatactgctgataaagatgatagttcagaagacatttcagtgccgagtagtccacatacagaagctatacagcatagttcggtcagcacatccaatggagtcagttcaacctccaaggcagaagctgtagccacttcagtcctcacccagatggcggaccagagtacagagcctgctctttcacagatcgttatggctccttcctcccagtcacagccctcaggaagttgattaaaaacctgcagtacaacagttttagatactcattagtgacttcaaagggaaatcaaggaaagaccagtttccatttatgcgaaatctgtggttgtaaattttttttttttacttgaaattaaatttggctctaaagttggtgtagcagcagttgatcagactgaaaaacggtttttagtctctggaaaaagactgattttgctttttttataaatattattagatttattaatttttctgtgctcaatgtgtaaattgtattataattcattgtgatttatttcacttttaatttgctggtgttttaataaatgggggtgttactgaatctttcttcccacttccatttcttttgaccaccccttaaccctcaactgtgacggtagtagtattatcatttataccaaagttttgcatagtccctgttgactttgtaatgttaacggagtcataaaagcactaggcaagagaaagatagaaatttgcttttaatctttttgccttttattttgcacattatgcaaaaggaaaaacattaaagaacacttttttttaagtgagtgaaaacatggtaaagacatacagtgcttttatgcacattgttaagctaaatcaaggtcatttataatcattttccttttttatttaagattttaagtaaacaaattttagaattttcagcatttcaaaaatgattttatttttcaagtcttaaattcaatattttacacctatgttttgaggctaaaaatatgaaattatataatgtatgatacagggttatcaaatatctaataatttttgaaattagctcttgtttttggtttttttgttgttgtttttacagatttcaggttacaaactgcaaagtttatgcataattaagtatggtatggttgccagaaaagcctaaaattactacttagaaaatttaagactgtttacccccattgtcttgtacttgcgagctaacttgtactattcttgtgaaagcactgtcatcttttagtagcaaattttgataatgtttctcgtggaaaaaaaaatcagtatctatctttagaacaatgtaattataatgtgggaagtgtgcatgaatgagagagagtgtgtgtgtatctgtgtgtgtgtgcgcgtgtgtgtgtgtcttttaatagtttatgccagcaatctttgcttgaatgtttaacgatgccttcagtgtgatgctggccaatagatgattgcagtttaaaatgtcattattgtgcaggcttggataactaacattccatgatgtagcttgtttctgatgagatgattgtaggtacatttttctcattatccaatcatctgtgggatacttagttttctaatgtgccattatctatttttattctgcagttatgttcaaaatacagtacatattttaaaatagaataaattgttaaacataaaattttaaaagtagtagatgtgcgtaagaaaactttgtaaaatagttatgagtcctacccagtagcaacttctggcattcaagcaggattccactatgtaaatatctgtaatgcatttataataagttgtgtagtttgtcctgcatccatactacactatttgctaaagtctcagtgccatctcctaatgagactgacattttaaaagtctgtatggaatatccttgataattcaaggaaatatccctcctgcctaagttccaaactgggaaacattcaaattatataaatgacatttcaggactttaagtatgaagataatgggaattttattgttttgctttttaaaatgagagcatttttatttgataattttttttaaatttttaatttttaactaatttcattattttaaagtaatcagtttttcaaatcatgattttgatatcattattctaaggagttatctcaaaggcacaaaatatgaattctgcaagaaggctattttttattgtagtttgaatgggttaggaaaagcctcaatttttcactcttaagtccttcagtacatttttctttcatcttattacttatgcaagttaaggttctttggtaacagaattcttgcaactgtaaaataaaactacatagatgtaagaagtcatgtaaacggttaacaagcttaccaaggttagcaaaactttcattgtaaatcagtctgtactgagcaaataaaaatcattattagttgtataaacacaaattccattttgactttcaggatgtcatactacttctgtacctagcattttcagtccttatatttgcaatgttacacaaactgtactattttcttttatgtgcagtttgcatgagtaaaccatcagagaataaattctatctttaaattatgt

SEQ ID NO: 309611 - DNA, 4230 bp, Homo sapiens
ctcgcgagagaggacggaagcctgtgggagcccgtggcctttaaagtgccgttcagccttttcctccaggggtgctttgtaaacacggctgtgctcagggctcgcgggtgaccgaaaggatcatgaactagtgacctggaaagggtactagatggaaacttgagaaaggactgcttattgataacagctaaggtattcctggaagcagagtaaataaagctcatggcccaccagctagaaagtattcttgccatgagaaaaagaatgtgataagttattcaacttatgaaattcaagttacatgtgaattctgccaggcaatacaaggacctgtggaatatgagtgatgacaaaccctttctatgtactgcgcctggatgtggccagcgttttaccaacgaggatcatttggctgtccataaacataaacatgagatgacactgaaatttggtccagcacgtaatgacagtgtcattgtggctgatcagaccccaacaccaacaagattcttgaaaaactgtgaagaagtgggtttgtttaatgagttggcgagtccatttgagaatgaattcaagaaagcttcagaagatgacattaaaaaaatgcctctagatttatcccctcttgcaacacctatcataagaagcaaaattgaggagccttctgttgtagaaacaactcaccaggatagtcctttacctcacccagagtctactaccagtgatgagaaggaagtaccattggcacaaactgcacagcccacatcagctattgttcgtccagcatcattacaggttcccaatgtgctgcttacaagttctgactcaagtgtaattattcagcaggcagtaccttcaccaacctcaagtactgtaatcacccaggcaccatcctctaacaggccaattgtccctgtaccaggcccatttcctcttctgttacatcttcctaatggacaaaccatgcctgttgctattcctgcatcaattacaagttctaatgtgcatgttccagctgcagtcccactcgttcgaccagtcaccatggtgcctagtgttccaggaatcccaggtccttcctctccccaaccagtacagtcagaagcaaaaatgagattaaaagctgctttgacccagcaacatcctccagttaccaatggtgatactgtcaaaggtcatggtagcggattggttaggactcagtcagaggaatctcgaccgcagtcattacaacagccagccacatccactacagaaactccggcttctccagctcacacaactccacagacccaaagtacaagtggtcgtcggagaagagcagctaacgaagatcctgatgaaaaaaggagaaagtttttagagcgaaatagagcagcagcttcaagatgccgacaaaaaaggaaagtctgggttcagtctttagagaagaaagctgaagacttgagttcattaaatggtcagctgcagtgaatatattgctcgtgaaaggtgccagattgacagctttggaaactgaaggactctaattatccacagaccagagtgaagtcaccctgctgagaaatgaagtggcacagctgaaacagcttcttctggctcataaagattgccctgtaaccgccatgcagaagaaatctggctatcatactgctgataaagatgatagttcagaagacatttcagtgccgagtagtccacatacagaagctatacagcatagttcggtcagcacatccaatggagtcagttcaacctccaaggcagaagctgtagccacttcagtcctcacccagatggcggaccagagtacagagcctgctctttcacagatcgttatggctccttcctcccagtcacagccctcaggaagttgattaaaaacctgcagtacaacagttttagatactcattagtgacttcaaagggaaatcaaggaaagaccagtttccatttatgcgaaatctgtggttgtaaattttttttttttacttgaaattaaatttggctctaaagttggtgtagcagcagttgatcagactgaaaaacggtttttagtctctggaaaaagactgattttgctttttttataaatattattagatttattaatttttctgtgctcaatgtgtaaattgtattataattcattgtgatttatttcacttttaatttgctggtgttttaataaatgggggtgttactgaatctttcttcccacttccatttcttttgaccaccccttaaccctcaactgtgacggtagtagtattatcatttataccaaagttttgcatagtccctgttgactttgtaatgttaacggagtcataaaagcactaggcaagagaaagatagaaatttgcttttaatctttttgccttttattttgcacattatgcaaaaggaaaaacattaaagaacacttttttttaagtgagtgaaaacatggtaaagacatacagtgcttttatgcacattgttaagctaaatcaaggtcatttataatcattttccttttttatttaagattttaagtaaacaaattttagaattttcagcatttcaaaaatgattttatttttcaagtcttaaattcaatattttacacctatgttttgaggctaaaaatatgaaattatataatgtatgatacagggttatcaaatatctaataatttttgaaattagctcttgtttttggtttttttgttgttgtttttacagatttcaggttacaaactgcaaagtttatgcataattaagtatggtatggttgccagaaaagcctaaaattactacttagaaaatttaagactgtttacccccattgtcttgtacttgcgagctaacttgtactattcttgtgaaagcactgtcatcttttagtagcaaattttgataatgtttctcgtggaaaaaaaaatcagtatctatctttagaacaatgtaattataatgtgggaagtgtgcatgaatgagagagagtgtgtgtgtatctgtgtgtgtgtgcgcgtgtgtgtgtgtcttttaatagtttatgccagcaatctttgcttgaatgtttaacgatgccttcagtgtgatgctggccaatagatgattgcagtttaaaatgtcattattgtgcaggcttggataactaacattccatgatgtagcttgtttctgatgagatgattgtaggtacatttttctcattatccaatcatctgtgggatacttagttttctaatgtgccattatctatttttattctgcagttatgttcaaaatacagtacatattttaaaatagaataaattgttaaacataaaattttaaaagtagtagatgtgcgtaagaaaactttgtaaaatagttatgagtcctacccagtagcaacttctggcattcaagcaggattccactatgtaaatatctgtaatgcatttataataagttgtgtagtttgtcctgcatccatactacactatttgctaaagtctcagtgccatctcctaatgagactgacattttaaaagtctgtatggaatatccttgataattcaaggaaatatccctcctgcctaagttccaaactgggaaacattcaaattatataaatgacatttcaggactttaagtatgaagataatgggaattttattgttttgctttttaaaatgagagcatttttatttgataattttttttaaatttttaatttttaactaatttcattattttaaagtaatcagtttttcaaatcatgattttgatatcattattctaaggagttatctcaaaggcacaaaatatgaattctgcaagaaggctattttttattgtagtttgaatgggttaggaaaagcctcaatttttcactcttaagtccttcagtacatttttctttcatcttattacttatgcaagttaaggttctttggtaacagaattcttgcaactgtaaaataaaactacatagatgtaagaagtcatgtaaacggttaacaagcttaccaaggttagcaaaactttcattgtaaatcagtctgtactgagcaaataaaaatcattattagttgtataaacacaaattccattttgactttcaggatgtcatactacttctgtacctagcattttcagtccttatatttgcaatgttacacaaactgtactattttcttttatgtgcagtttgcatgagtaaaccatcagagaataaattctatctttaaattatgt

SEQ ID NO: 309612 - DNA, 4045 bp, Homo sapiens
agcttacttatagtaacattccaacactttcggtgagattacccccaagaatattactaggattaatgtttgatatttatatctttttttaattaactaattcttccacgtgatctttcaaactatccaaaattagcattgattgacgtaatttcaagataatgtgccttctttaaaaagaactttgttcaaaatgcattatttgagagactttgtaaggactcagatataaggtatctgcttcctctttactgagaatatttttttgaggagggaaacattcttgccttgtttttgagattctgattatcctgttacatgtacctagtgatgaaagcaaccggaaatgaaagaaaagatatgctttatttatacagtaactgtgttcactcagtgttaggtttaagaaaaaaaggaaaaaaccaaaatggtaaaacctgttacagattatttcagaaattattacagtgtgttatttgttattatgtggaatgtataagaaaattcattgtatatatttttagaaaagcaaaattcattgttgaaattattttttatgcctaagtgtcacaagttttgacattcttcctttcatattcaaaatggaagtttgacagatctttgagaatttttgcattaatcactttgaatattatgaatttctaacagggaccattaagaaagaaattgtagaaactgaaaattaggaaagcacacgtctcagaaattgacaacttttgaaggataagtcaggatataagaccaaataaggatttggtatagagataaaatcagctggtgataaatttacaatgttctgattcttaaagtctcaaattattacaacagcagtaaagtacaaatctcattttgaatatattctctagcaattatttttccttatgtcatgcatagctcgttcgaccagtcaccatggtgcctagtgttccaggaatcccaggtccttcctctccccaaccagtacagtcagaagcaaaaatgagattaaaagctgctttgacccagcaacatcctccagttaccaatggtgatactgtcaaaggtcatggtagcggattggttaggactcagtcagaggaatctcgaccgcagtcattacaacagccagccacatccactacagaaactccggcttctccagctcacacaactccacagacccaaagtacaagtggtcgtcggagaagagcagctaacgaagatcctgatgaaaaaaggagaaagtttttagagcgaaatagagcagcagcttcaagatgccgacaaaaaaggaaagtctgggttcagtctttagagaagaaagctgaagacttgagttcattaaatggtcagctgcagagtgaagtcaccctgctgagaaatgaagtggcacagctgaaacagcttcttctggctcataaagattgccctgtaaccgccatgcagaagaaatctggctatcatactgctgataaagatgatagttcagaagacatttcagtgccgagtagtccacatacagaagctatacagcatagttcggtcagcacatccaatggagtcagttcaacctccaaggcagaagctgtagccacttcagtcctcacccagatggcggaccagagtacagagcctgctctttcacagatcgttatggctccttcctcccagtcacagccctcaggaagttgattaaaaacctgcagtacaacagttttagatactcattagtgacttcaaagggaaatcaaggaaagaccagtttccatttatgcgaaatctgtggttgtaaattttttttttttacttgaaattaaatttggctctaaagttggtgtagcagcagttgatcagactgaaaaacggtttttagtctctggaaaaagactgattttgctttttttataaatattattagatttattaatttttctgtgctcaatgtgtaaattgtattataattcattgtgatttatttcacttttaatttgctggtgttttaataaatgggggtgttactgaatctttcttcccacttccatttcttttgaccaccccttaaccctcaactgtgacggtagtagtattatcatttataccaaagttttgcatagtccctgttgactttgtaatgttaacggagtcataaaagcactaggcaagagaaagatagaaatttgcttttaatctttttgccttttattttgcacattatgcaaaaggaaaaacattaaagaacacttttttttaagtgagtgaaaacatggtaaagacatacagtgcttttatgcacattgttaagctaaatcaaggtcatttataatcattttccttttttatttaagattttaagtaaacaaattttagaattttcagcatttcaaaaatgattttatttttcaagtcttaaattcaatattttacacctatgttttgaggctaaaaatatgaaattatataatgtatgatacagggttatcaaatatctaataatttttgaaattagctcttgtttttggtttttttgttgttgtttttacagatttcaggttacaaactgcaaagtttatgcataattaagtatggtatggttgccagaaaagcctaaaattactacttagaaaatttaagactgtttacccccattgtcttgtacttgcgagctaacttgtactattcttgtgaaagcactgtcatcttttagtagcaaattttgataatgtttctcgtggaaaaaaaaatcagtatctatctttagaacaatgtaattataatgtgggaagtgtgcatgaatgagagagagtgtgtgtgtatctgtgtgtgtgtgcgcgtgtgtgtgtgtcttttaatagtttatgccagcaatctttgcttgaatgtttaacgatgccttcagtgtgatgctggccaatagatgattgcagtttaaaatgtcattattgtgcaggcttggataactaacattccatgatgtagcttgtttctgatgagatgattgtaggtacatttttctcattatccaatcatctgtgggatacttagttttctaatgtgccattatctatttttattctgcagttatgttcaaaatacagtacatattttaaaatagaataaattgttaaacataaaattttaaaagtagtagatgtgcgtaagaaaactttgtaaaatagttatgagtcctacccagtagcaacttctggcattcaagcaggattccactatgtaaatatctgtaatgcatttataataagttgtgtagtttgtcctgcatccatactacactatttgctaaagtctcagtgccatctcctaatgagactgacattttaaaagtctgtatggaatatccttgataattcaaggaaatatccctcctgcctaagttccaaactgggaaacattcaaattatataaatgacatttcaggactttaagtatgaagataatgggaattttattgttttgctttttaaaatgagagcatttttatttgataattttttttaaatttttaatttttaactaatttcattattttaaagtaatcagtttttcaaatcatgattttgatatcattattctaaggagttatctcaaaggcacaaaatatgaattctgcaagaaggctattttttattgtagtttgaatgggttaggaaaagcctcaatttttcactcttaagtccttcagtacatttttctttcatcttattacttatgcaagttaaggttctttggtaacagaattcttgcaactgtaaaataaaactacatagatgtaagaagtcatgtaaacggttaacaagcttaccaaggttagcaaaactttcattgtaaatcagtctgtactgagcaaataaaaatcattattagttgtataaacacaaattccattttgactttcaggatgtcatactacttctgtacctagcattttcagtccttatatttgcaatgttacacaaactgtactattttcttttatgtgcagtttgcatgagtaaaccatcagagaataaattctatctttaaattatgt

SEQ ID NO: 309613 - DNA, 3003 bp, Homo sapiens
tgccgaagacccgccttcttctccttaagcctgacggaatcacctgactcggaggcgctccctcagaaggaagggtactagatggaaacttgagaaaggactgcttattgataacagctaaggtattcctggaagcagagtaaataaagctcatggcccaccagctagaaagtattcttgccatgagaaaaagaatgtgataagttattcaacttatgaaattcaagttacatgtgaattctgccaggcaatacaaggacctgtggaatatgagtgatgacaaaccctttctatgtactgcgcctggatgtggccagagtgaagtcaccctgctgagaaatgaagtggcacagctgaaacagcttcttctggctcataaagattgccctgtaaccgccatgcagaagaaatctggctatcatactgctgataaagatgatagttcagaagacatttcagtgccgagtagtccacatacagaagctatacagcatagttcggtcagcacatccaatggagtcagttcaacctccaaggcagaagctgtagccacttcagtcctcacccagatggcggaccagagtacagagcctgctctttcacagatcgttatggctccttcctcccagtcacagccctcaggaagttgattaaaaacctgcagtacaacagttttagatactcattagtgacttcaaagggaaatcaaggaaagaccagtttccatttatgcgaaatctgtggttgtaaattttttttttttacttgaaattaaatttggctctaaagttggtgtagcagcagttgatcagactgaaaaacggtttttagtctctggaaaaagactgattttgctttttttataaatattattagatttattaatttttctgtgctcaatgtgtaaattgtattataattcattgtgatttatttcacttttaatttgctggtgttttaataaatgggggtgttactgaatctttcttcccacttccatttcttttgaccaccccttaaccctcaactgtgacggtagtagtattatcatttataccaaagttttgcatagtccctgttgactttgtaatgttaacggagtcataaaagcactaggcaagagaaagatagaaatttgcttttaatctttttgccttttattttgcacattatgcaaaaggaaaaacattaaagaacacttttttttaagtgagtgaaaacatggtaaagacatacagtgcttttatgcacattgttaagctaaatcaaggtcatttataatcattttccttttttatttaagattttaagtaaacaaattttagaattttcagcatttcaaaaatgattttatttttcaagtcttaaattcaatattttacacctatgttttgaggctaaaaatatgaaattatataatgtatgatacagggttatcaaatatctaataatttttgaaattagctcttgtttttggtttttttgttgttgtttttacagatttcaggttacaaactgcaaagtttatgcataattaagtatggtatggttgccagaaaagcctaaaattactacttagaaaatttaagactgtttacccccattgtcttgtacttgcgagctaacttgtactattcttgtgaaagcactgtcatcttttagtagcaaattttgataatgtttctcgtggaaaaaaaaatcagtatctatctttagaacaatgtaattataatgtgggaagtgtgcatgaatgagagagagtgtgtgtgtatctgtgtgtgtgtgcgcgtgtgtgtgtgtcttttaatagtttatgccagcaatctttgcttgaatgtttaacgatgccttcagtgtgatgctggccaatagatgattgcagtttaaaatgtcattattgtgcaggcttggataactaacattccatgatgtagcttgtttctgatgagatgattgtaggtacatttttctcattatccaatcatctgtgggatacttagttttctaatgtgccattatctatttttattctgcagttatgttcaaaatacagtacatattttaaaatagaataaattgttaaacataaaattttaaaagtagtagatgtgcgtaagaaaactttgtaaaatagttatgagtcctacccagtagcaacttctggcattcaagcaggattccactatgtaaatatctgtaatgcatttataataagttgtgtagtttgtcctgcatccatactacactatttgctaaagtctcagtgccatctcctaatgagactgacattttaaaagtctgtatggaatatccttgataattcaaggaaatatccctcctgcctaagttccaaactgggaaacattcaaattatataaatgacatttcaggactttaagtatgaagataatgggaattttattgttttgctttttaaaatgagagcatttttatttgataattttttttaaatttttaatttttaactaatttcattattttaaagtaatcagtttttcaaatcatgattttgatatcattattctaaggagttatctcaaaggcacaaaatatgaattctgcaagaaggctattttttattgtagtttgaatgggttaggaaaagcctcaatttttcactcttaagtccttcagtacatttttctttcatcttattacttatgcaagttaaggttctttggtaacagaattcttgcaactgtaaaataaaactacatagatgtaagaagtcatgtaaacggttaacaagcttaccaaggttagcaaaactttcattgtaaatcagtctgtactgagcaaataaaaatcattattagttgtataaacacaaattccattttgactttcaggatgtcatactacttctgtacctagcattttcagtccttatatttgcaatgttacacaaactgtactattttcttttatgtgcagtttgcatgagtaaaccatcagagaataaattctatctttaaattatgt

SEQ ID NO: 309614 - DNA, 4468 bp, Homo sapiens
ctcgcgagagaggacggaagcctgtgggagcccgtggcctttaaagtgccgttcagccttttcctccaggggtgctttgtaaacacggctgtgctcagggctcgcgggtgaccgaaaggatcatgaactagtgacctggaaagggtactagatggaaacttgagaaaggactgcttattgataacagctaaggtattcctggaagcagagtaaataaagctcatggcccaccagctagaaagtattcttgccatgagaaaaagaatgtgataagttattcaacttatgaaattcaagttacatgtgaattctgccaggcaatacaaggacctgtggaatatgagtgatgacaaaccctttctatgtactgcgcctggatgtggccagcgttttaccaacgaggatcatttggctgtccataaacataaacatgagatgacactgaaatttggtccagcacgtaatgacagtgtcattgtggctgatcagaccccaacaccaacaagattcttgaaaaactgtgaagaagtgggtttgtttaatgagttggcgagtccatttgagaatgaattcaagaaagcttcagaagatgacattaaaaaaatgcctctagatttatcccctcttgcaacacctatcataagaagcaaaattgaggagccttctgttgtagaaacaactcaccaggatagtcctttacctcacccagagtctactaccagtgatgagaaggaagtaccattggcacaaactgcacagcccacatcagctattgttcgtccagcatcattacaggttcccaatgtgctgcttacaagttctgactcaagtgtaattattcagcaggcagtaccttcaccaacctcaagtactgtaatcacccaggcaccatcctctaacaggccaattgtccctgtaccaggcccatttcctcttctgttacatcttcctaatggacaaaccatgcctgttgctattcctgcatcaattacaagttctaatgtgcatgttccagctgcagtcccactcgttcgaccagtcaccatggtgcctagtgttccaggaatcccaggtccttcctctccccaaccagtacagtcagaagcaaaaatgagattaaaagctgctttgacccagcaacatcctccagttaccaatggtgatactgtcaaaggtcatggtagcggattggttaggactcagtcagaggaatctcgaccgcagtcattacaacagccagccacatccactacagaaactccggcttctccagctcacacaactccacagacccaaagtacaagtggtcgtcggagaagagcagctaacgaagatcctgatgaaaaaaggagaaagtttttagagcgaaatagagcagcagcttcaagatgccgacaaaaaaggaaagtctgggttcagtctttagagaagaaagctgaagacttgagttcattaaatggtcagctgcagagtgaagtcaccctgctgagaaatgaagtggcacagctgaaacagcttcttctggctcataaagattgccctgtaaccgccatgcagaagaaatctggctatcatactgctgataaagatgatagttcagaagacatttcagtgccgagtagtccacatacagaagctatacagcatagttcggtcagcacatccaatggagtcagttcaacctccaaggcagaagctgtagccacttcagtcctcacccagatggcggaccagagtacagagcctgctctttcacagatcgttatggctccttcctcccagtcacagccctcaggaagttgattaaaaacctgcagtacaacagttttagatactcattagtgacttcaaagggaaatcaaggaaagaccagtttccatttatgcgaaatctgtggttgtaaattttttttttttacttgaaattaaatttggctctaaagttggtgtagcagcagttgatcagactgaaaaacggtttttagtctctggaaaaagactgattttgctttttttataaatattattagatttattaatttttctgtgctcaatgtgtaaattgtattataattcattgtgatttatttcacttttaatttgctggtgttttaataaatgggggtgttactgaatctttcttcccacttccatttcttttgaccaccccttaaccctcaactgtgacggtagtagtattatcatttataccaaagttttgcatagtccctgttgactttgtaatgttaacggagtcataaaagcactaggcaagagaaagatagaaatttgcttttaatctttttgccttttattttgcacattatgcaaaaggaaaaacattaaagaacacttttttttaagtgagtgaaaacatggtaaagacatacagtgcttttatgcacattgttaagctaaatcaaggtcatttataatcattttccttttttatttaagattttaagtaaacaaattttagaattttcagcatttcaaaaatgattttatttttcaagtcttaaattcaatattttacacctatgttttgaggctaaaaatatgaaattatataatgtatgatacagggttatcaaatatctaataatttttgaaattagctcttgtttttggtttttttgttgttgtttttacagatttcaggttacaaactgcaaagtttatgcataattaagtatggtatggttgccagaaaagcctaaaattactacttagaaaatttaagactgtttacccccattgtcttgtacttgcgagctaacttgtactattcttgtgaaagcactgtcatcttttagtagcaaattttgataatgtttctcgtggaaaaaaaaatcagtatctatctttagaacaatgtaattataatgtgggaagtgtgcatgaatgagagagagtgtgtgtgtatctgtgtgtgtgtgcgcgtgtgtgtgtgtcttttaatagtttatgccagcaatctttgcttgaatgtttaacgatgccttcagtgtgatgctggccaatagatgattgcagtttaaaatgtcattattgtgcaggcttggataactaacattccatgatgtagcttgtttctgatgagatgattgtaggtacatttttctcattatccaatcatctgtgggatacttagttttctaatgtgccattatctatttttattctgcagttatgttcaaaatacagtacatattttaaaatagaataaattgttaaacataaaattttaaaagtagtagatgtgcgtaagaaaactttgtaaaatagttatgagtcctacccagtagcaacttctggcattcaagcaggattccactatgtaaatatctgtaatgcatttataataagttgtgtagtttgtcctgcatccatactacactatttgctaaagtctcagtgccatctcctaatgagactgacattttaaaagtctgtatggaatatccttgataattcaaggaaatatccctcctgcctaagttccaaactgggaaacattcaaattatataaatgacatttcaggactttaagtatgaagataatgggaattttattgttttgctttttaaaatgagagcatttttatttgataattttttttaaatttttaatttttaactaatttcattattttaaagtaatcagtttttcaaatcatgattttgatatcattattctaaggagttatctcaaaggcacaaaatatgaattctgcaagaaggctattttttattgtagtttgaatgggttaggaaaagcctcaatttttcactcttaagtccttcagtacatttttctttcatcttattacttatgcaagttaaggttctttggtaacagaattcttgcaactgtaaaataaaactacatagatgtaagaagtcatgtaaacggttaacaagcttaccaaggttagcaaaactttcattgtaaatcagtctgtactgagcaaataaaaatcattattagttgtataaacacaaattccattttgactttcaggatgtcatactacttctgtacctagcattttcagtccttatatttgcaatgttacacaaactgtactattttcttttatgtgcagtttgcatgagtaaaccatcagagaataaattctatctttaaattatgtcaaaaaaaaaaaaaaaaaaaaaaaaaaaattgtttgggcggcctcgaggcccttgagaaaaaaagtttctaaaacaatccgtggggcgcgccggccccaagtgaggcaccggtcgacccgtggcgccataagccggtcccccaaggaaaatcccggcccaggatcaagggctgggctttcctccacccaataaaaaaacgccgggggcaaccgggagggttcggaaccaactccagatggggtcccggaggccataacggctcttatcaccagggggtcaggcgagccgaataaatacagacaggggggagg

SEQ ID NO: 309615 - DNA, 1975 bp, Homo sapiens
ctcgcgagagaggacggaagcctgtgggagcccgtggcctttaaagtgccgttcagccttttcctccaggggtgctttgtaaacacggctgtgctcagggctcgcgggtgaccgaaaggatcatgaactagtgacctggaaagggtactagatggaaacttgagaaaggactgcttattgataacagctaaggtattcctggaagcagagtaaataaagctcatggcccaccagctagaaagtattcttgccatgagaaaaagaatgtgataagttattcaacttatgaaattcaagttacatgtgaattctgccaggcaatacaaggacctgtggaatatgagtgatgacaaaccctttctatgtactgcgcctggatgtggccagcgttttaccaacgaggatcatttggctgtccataaacataaacatgagatgacactgaaatttggtccagcacgtaatgacagtgtcattgtggctgatcagaccccaacaccaacaagattcttgaaaaactgtgaagaagtgggtttgtttaatgagttggcgagtccatttgagaatgaattcaagaaagcttcagaagatgacattaaaaaaatgcctctagatttatcccctcttgcaacacctatcataagaagcaaaattgaggagccttctgttgtagaaacaactcaccaggatagtcctttacctcacccagagtctactaccagtgatgagaaggaagtaccattggcacaaactgcacagcccacatcagctattgttcgtccagcatcattacaggttcccaatgtgctgcttacaagttctgactcaagtgtaattattcagcaggcagtaccttcaccaacctcaagtactgtaatcacccaggcaccatcctctaacaggccaattgtccctgtaccaggcccatttcctcttctgttacatcttcctaatggacaaaccatgcctgttgctattcctgcatcaattacaagttctaatgtgcatgttccagctgcagtcccactcgttcgaccagtcaccatggtgcctagtgttccaggaatcccaggtccttcctctccccaaccagtacagtcagaagcaaaaatgagattaaaagctgctttgacccagcaacatcctccagttaccaatggtgatactgtcaaaggtcatggtagcggattggttaggactcagtcagaggaatctcgaccgcagtcattacaacagccagccacatccactacagaaactccggcttctccagctcacacaactccacagacccaaagtacaagtggtcgtcggagaagagcagctaacgaagatcctgatgaaaaaaggagaaagtttttagagcgaaatagagcagcagcttcaagatgccgacaaaaaaggaaagtctgggttcagtctttagagaagaaagctgaagacttgagttcattaaatggtcagctgcagagtgaagtcaccctgctgagaaatgaagtggcacagctgaaacagcttcttctggctcataaagattgccctgtaaccgccatgcagaagaaatctggctatcatagtgagtaatgttccattacctatagccttaggctacgtcagtgaaataccgtcagagtgaactgagctgctactttaaaaatggagactgtgcttctaatattcaagattaaatatcagaatttctgtaaggttattatagaatgcagtagagaggtataattttttagaatctagagagtttgagttttcctgtttctagcttttttcctaagcgttactatagatcaacaaaatggattagctaataatttaaaatatactgtaagtacttgatgatattttgttcatcttctcaggataacactttgtcttagattgacagggtgaaacactacttttttcccagcctccgttcattaatgatgatatttttctttttaaaatcagctgactgcct

SEQ ID NO: 309616 - DNA, 769 bp, Homo sapiens
gacagtttttctcattttacaaattggagattgtcctaagtaaatccataacttttctcttcttttcaatactgctacacaggttatgcatttaagatgcaattaaaaataattaaattttgctatttgctttgctgtggttagaaaatgtatttttaaatgatatgattataggagtaaaaatactattgtatttttaagagacagttggtatgaatctcttttttaaaatttctcttcttttgtttttcttagccctgtaccaggcccatttcctcttctgttacatcttcctaatggacaaaccatgcctgttgctattcctgcatcaattacaagttctaatgtgcatgttccagctgcagtcccagtaagaaagttagactatttaaatctctatcgcaaaactgatctttgtagtcagaaaataaagttggctgcttgactggcttatgaaattgaatttaacataatattgattagcagttgatagtatttatttgttatcattgtaatagcatataccattcaaggtatagctattttttctcttctccccaaaaccttaattttttttttatactgagatcttcttattcaacccatatcaatttgactggacttgtagcattcaaatattaacacagatttcaaattttagaaagatatttgtactagaatacttgtcaggtaactctgtggtatttctattagtatggaaattgtttataaagacacactctgaatttttgtggtcaagtagggtttg

SEQ ID NO: 309617 - DNA, 733 bp, Homo sapiens
tgctagcaaccttgtttagatgtagatcttgtttagatgtagcaaccacttgacatttaatttatcatcttaaccttgaatgattctttgttttgttttttgttattgagatggagtctcacttccagcctgggcgacagagcgagactccatctccaaaaaaaaaaaaaagtgaggttgagatttgcatggtaccaaggcttacatgcttcagaatagatcaatggttattgtataagtaattttatcctaaaacattatgacattttttgtttcttattgagggtagataatgttaatattaaactactaataggaggcccttatcacttctcttttcattttttccatgcagtgataggtattattagaaaaaagttatttcttgagttacacctaagaggaagaagtaacatgatggaaagtggttggagatagcacccaattaacatcgacagccaagtcttctatttcagaatattgatttatttcgctttggcttttgatgccatcatgagatttaagtctgcagtttcaaaagctcatgctacttagaagagatgatttttgcagcttaaaaaattgcttgtgactgcagtatgtacacagttaaaaagctgttcactgcccctttcaaccttttcattttgagctttactaagagaatgcttttaggaacagaattcctaaagtgtaattttttatgtataaataaagttttatctatatctga

SEQ ID NO: 309618 - DNA, 4113 bp, Homo sapiens
tacgtcatttctcggcgccgggaaacctgccattcttcgctgctgatcgcgggattctttttggatagggttgacgttcgtggatagactcatatctgtgaccagtgtccgccaccgcggatggcaagagacctgatcggaccggccctgccgcccggcttcaaggcccgcggaacagcggaggacgaagagcgggacccgagccctgttgcaggaccagctctgccccctaattataaaagcagtagttcagattcatcagacagcgatgaagacagtagttctttgtacgaagaaggaaatcaagaatctgaagaagatgacagtggtccaactgcaagaaaacagaggaaaaatcaggatgatgacgatgatgatgatgatgggttttttggaccagcccttcctcctggatttaaaaagcaggatgattctcctccaaggcccataataggtcctgcattgccacctggtttcattaaatctacacagaaaagtgacaagggcagagatgatccaggacaacaggaaacagacagcagtgaagatgaggatattattggaccaatgcctgcaaaaggaccagttaactataatgtaacgacagagtttgaaaaaagggcccagagaatgaaagaaaaactgaccaaaggagatgatgattcatctaaacccattgtaagagagtcatggatgactgaacttcctccagaaatgaaagactttggtcttgggccaaggacttttaagagaagagctgatgacacatctggagatcgatcaatctggacagatactccagctgatagggaaaggaaagctaaggaaacacaagaagcaaggaagtcatccagtaagaaagatgaagaacatatattatcaggaagagataagagactggctgagcaggtatcttcatacaatgaatcaaaaagatcagaatctcttatggacatacatcataaaaagttaaagagtaaggctgctgaagacaaaaataagcctcaagagagaataccatttgaccgtgataaagatctcaaggttaatcggtttgatgaagctcagaaaaaagccctaataaaaaaatctagagaactaaacaccagattttcacacggcaaaggcaatatgtttttataaggggatttccctgtgcaatgaagaaaagttgaagaatactctttgtccatctttatttctttgtttttggcttcttaagattagagattactttaatcttaaaaaacatacaaatttaccttgttctgtatgtccttttaaggtcatgtggaaacataaaacgaatgttttttatgtagaacagaatattctatgtgcctttagcttctgtggaagtatggggaattatgggcttttcttcaaataattattttaagaggcttccattccccctgatttttgtggtgtctcacaagtaccctctaaggtctggtcaggactgaccaccaaatctctaccacagcctggacctccttgtgaaatatacctaacctgccctagagtcagtgtgtcaagtccttcctgtaaatccatgactttgaaatttgttgttttttccctttaaactgcagccagtgaatacaaatttacttgaaaatagagggtatggggttttgcctgttttgtaatcagtttgcttgttttagcactcagggctttttatttgttatttaattttttaattgtttttaagtcagaaagatctctgggttatctcatgtgctaaggaaaaactattttgctttttccaactttaatagttagtatttctaggggaggcaatcaagataagatatgccattaactgttagcattgtgaaatctgtaagactcaatctctgatctcaaccaaagctttctgagtcctggaactttgctttgggacaactttactttacccatttatatgctgtacttaacagtttgtagctaatttatggggtcatatcttttttttagctaatttacgggggtcatatcagtcatgaatagccttttttaaaaatttaataatccctgaatacaaaaatggaaatggaaaatttataatcataacccccctaattgggagtattataagtttgtaatgctttaagcactgcctcttaagatgataaatttataagatgagaaattctatttaaactattaaactattgttaaataaatgccaattctataagttatattttcttgcagattaatcccaattgttccactagtattctagttttgatgagacacaaatttttgttgttgtttatttttgtttttttgagagatggagtcttgctctgtcacccaggctggagtagagtggcgtgatctcggcttactgcaacctccgcctcctgggttcaagcgattctcctgcctcagtgtcccaagtagctgggactacaggcgtccaccatgcctggccaagacacaaatttttaatggaaaaatattctgattcccagttcatgtaagctttatgaaaattgagtatattgtttatatgatggtacaaattattcttcctctaataatagcagtacagtatattttttccatagcatcagtgtaaaccatagcaaactaaaggagcattgctattaaaaagatgaattagctgggcgcagtggctcatacctgtaatcccagctactcaggaggctgaagcaggagaattgcttgaacctaggaggcggaggttgcagtgagccaagatcacaccattgcattccagcctgggcaacaagagtgaaactccatctctaaataaataagtaaataaatagatgaatttttctcctaagcaaattgaaaaagcttcttgtgtactcaaaattgaacagagctaccttttgactaaaaatgtcatttttaatgagcagtattttctgaacacaaaattttgtacaagagtgtctccattgcattaatttaattttgttataattttttcccaatgaaaggaaaaaagtattttgtagctcctcttccttatgtaaattcttaacatatatttttgagaaatttgcattttttaaagtaaaattgttatctttggatacttacttttctttgttttcctcatttaaagagaatagggatatttctgtattatatatttactgtttcatccctcacctttggagtgaccatgaccttggcatgaaggagagaaacctctgctttccgcctattgcttccaggagttactaccttactggccttggagataatgctcttttgtgccaacctgaggataattttaacaaaatgtaaggccagtttcagaggttgttttgccccacagagagactaatcccaatacaagaatattgacaacaaaaggacaaagtagttattgcacaggacggaaaggtgtctttatttcatcccctccccacttccaaagatgcaaaaggcctaattgaatcaagtctcctttccatctggcaggagacattttaataaggactttttaatttcctacatttcttggccaagtgtcataggaatgtggcctcttttgaaatttaaaaatgaagaagaaaaaaagagcaacactaagttaatataatggagcagatacttttaatgttcttaccattgaatatgccatttaagtttgttatacttgaaattatatgatttttgtccagctctctaaattgtcatctccaatagatttagatgcttcaaatagtaaccacattactgtgataggtattattagaaaaaagttatttcttgagttacacctaagaggaagaagtaacatgatggaaagtggttggagatagcacccaattaacatcgacagccaagtcttctatttcagaatattgatttatttcgctttggcttttgatgccatcatgagatttaagtctgcagtttcaaaagctcatgctacttagaagagatgatttttgcagcttaaaaaattgcttgtgactgcagtatgtacacagttaaaaagctgttcactgcccctttcaaccttttcattttgagctttactaagagaatgcttttaggaacagaattcctaaagtgtaattttttatgtataaataaagttttatctatatctga

SEQ ID NO: 309619 - DNA, 1407 bp, Homo sapiens
tacgtcatttctcggcgccgggaaacctgccattcttcgctgctgatcgcgggattctttttggatagggttgacgttcgtggatagactcatatctgtgaccagtgtccgccaccgcggatggcaagagacctgatcggaccggccctgccgcccggcttcaaggcccgcggaacagcggaggacgaagagcgggacccgagccctgttgcaggaccagctctgccccctaattataaaagcagtagttcagattcatcagacagcgatgaagacagtagttctttgtacgaagaaggaaatcaagaatctgaagaagatgacagtggtccaactgcaagaaaacagaggaaaaatcaggatgatgacgatgatgatgatgatgggttttttggaccagcccttcctcctggatttaaaaagcaggatgattctcctccaaggcccataataggtcctgcattgccacctggtttcattaaatctacacagaaaagtgacaagggcagagatgatccaggacaacaggaaacagacagcagtgaagatgaggatattattggaccaatgcctgcaaaaggaccagttaactataatgtaacgacagagtttgaaaaaagggcccagagaatgaaagaaaaactgaccaaaggagatgatgattcatctaaacccattgtaagagagtcatggatgactgaacttcctccagaaatgaaagactttggtcttgggccaaggacttttaagagaagagctgatgacacatctggagatcgatcaatctggacagatactccagctgatagggaaaggaaagctaaggaaacacaagaagcaaggaagtcatccagtaagaaagatgaagaacatatattatcaggaagagataagagactggctgagcaggtatcttcatacaatgaatcaaaaagatcagaatctcttatggacatacatcataaaaagttaaagagtaaggctgctgaagacaaaaataagcctcaagagagaataccatttgaccgtgataaagatctcaaggttaatcggtttgatgaagctcagaaaaaagccctaataaaaaaatctagagaactaaacaccagattttcacacggcaaaggcaatatgtttttataagtaagtatatttcagtgaggtatattttaatactgatcaatgtgaacttttctaaatactctattgtctttaataattgtgctgaaatctatttccttttataatagattaaaaattttatatttttataagtaaacagtgatttttgaaaagtcagccttgtgggatgaaaaatatgtcttactggaaaaatccctcataataacctaatagggcattgctattaaaaatgctaaaataaaaattcagcttatgagaaatggc

SEQ ID NO: 309620 - DNA, 1312 bp, Homo sapiens
  misc_feature (41)..(41): n is a, c, g, or t
  misc_feature (83)..(83): n is a, c, g, or t
tttttttgagatgaagtctcactctgtagcccagactggantccggtggcacgatctcagctcactgtagcctctgcctcctnagttcaagtggttctcctgtctcagtctcccaagtagctggaactacagaaaacagaggaaaaatcaggatgatgacgatgatgatgatgatgggttttttggaccagcccttcctcctggatttaaaaagcaggatgattctcctccaaggcccataataggtcctgcattgccacctggtttcattaaatctacacagaaaagtgacaagggcagagatgatccaggacaacaggaaacagacagcagtgaagatgaggatattattggaccaatgcctgcaaaaggaccagttaactataatgtaacgacagagtttgaaaaaagggcccagagaatgaaagaaaaactgaccaaaggagatgatgattcatctaaacccattgtaagagagtcatggatgactgaacttcctccagaaatgaaagactttggtcttgggccaaggacttttaagagaagagctgatgacacatctggagatcgatcaatctggacagatactccagctgatagggaaaggaaagctaaggaaacacaagaagcaaggaagtcatccagtaagaaagatgaagaacatatattatcaggaagagataagagactggctgagcaggtatcttcatacaatgaatcaaaaagatcagaatctcttatggacatacatcataaaaagttaaagagtaaggctgctgaagacaaaaataagcctcaagagagaataccatttgaccgtgataaagatctcaaggttaatcggtttgatgaagctcagaaaaaagccctaataaaaaaatctagagaactaaacaccagattttcacacggcaaaggcaatatgtttttataatgataggtattattagaaaaaagttatttcttgagttacacctaagaggaagaagtaacatgatggaaagtggttggagatagcacccaattaacatcgacagccaagtcttctatttcagaatattgatttatttcgctttggcttttgatgccatcatgagatttaagtctgcagtttcaaaagctcatgctacttagaagagatgatttttgcagcttaaaaaattgcttgtgactgcagtatgtacacagttaaaaagctgttcactgcccctttcaaccttttcattttgagctttactaagagaatgcttttaggaacagaattcctaaagtgtaattttttatgtataaataaagttttatctatatctga

SEQ ID NO: 309621 - DNA, 546 bp, Homo sapiens
tacgtcatttctcggcgccgggaaacctgccattcttcgctgctgatcgcgggattctttttggatagggttgacgttcgtggatagactcatatctgtgaccagtgtccgccaccgcggatggcaagagacctgatcggaccggccctgccgcccggcttcaaggcccgcggaacagcggaggacgaagagcgggacccgagccctgatggagtcttgctctgtcgcacaggctggagtgcaatggcgtgatcttggctcactgcaacctccactgccagaattcaagcaattcacctgcctcagcctcctgagtagctgggattacagacgcacaccaccatgcccagctaattttgtatttttagtagagacagggtttcaccatgttgcccaggctggtcccgaactcctgacctcgggtgatccgcccacctcggcctcccaaagtgctgggattacaggcgtgagccaccacacctggcccacaccattttttatcagctttctaatgcatatcccctgttgctgatctctcttgtctat

SEQ ID NO: 309622 - DNA, 3905 bp, Homo sapiens
tacgtcatttctcggcgccgggaaacctgccattcttcgctgctgatcgcgggattctttttggatagggttgacgttcgtggatagactcatatctgtgaccagtgtccgccaccgcggatggcaagagacctgatcggaccggccctgccgcccggcttcaaggcccgcggaacagcggaggacgaagagcgggacccgagccctgttgcaggaccagctctgccccctaattataaaagcagtagttcagattcatcagacagcgatgaagacagtagttctttgtacgaagaaggaaatcaagaatctgaagaagatgacagtggtccaactgcaagaaaacagaggaaaaatcaggatgatgacgatgatgatgatgatgggttttttggaccagcccttcctcctggatttaaaaagcaggatgattctcctccaaggcccataataggtcctgcattgccacctggtttcattaaatctacacagaaaagtgacaagggcagagatgatccaggacaacaggaaacagacagcagtgaagatgaggatattattggaccaatgcctgcaaaaggaccagttaactataatgtaacgacagagtttgaaaaaagggcccagagaatgaaagaaaaactgaccaaaggagatgatgattcatctaaacccattgtaagagagtcatggatgactgaacttcctccagaaatgaaagactttggtcttgggccaaggacttttaagagaagagctgatgacacatctggagatcgatcaatctggacagatactccagctgatagggaaaggaaagctaaggaaacacaagaagcaaggaagtcatccagtaagaaagatgaagaacatatattatcaggaagagataagagactggctgagcaggtatcttcatacaatgaatcaaaaagatcagaatctcttatggacatacatcataaaaagttaaagagtaaggctgctgaagacaaaaataagcctcaagagagaataccatttgaccgtgataaagatctcaaggttaatcggtttgatgaagctcagaaaaaagccctaataaaaaaatctagagaactaaacaccagattttcacacggcaaaggcaatatgtttttataaggggatttccctgtgcaatgaagaaaagttgaagaatactctttgtccatctttatttctttgtttttggcttcttaagattagagattactttaatcttaaaaaacatacaaatttaccttgttctgtatgtccttttaaggtcatgtggaaacataaaacgaatgttttttatgtagaacagaatattctatgtgcctttagcttctgtggaagtatggggaattatgggcttttcttcaaataattattttaagaggcttccattccccctgatttttgtggtgtctcacaagtaccctctaaggtctggtcaggactgaccaccaaatctctaccacagcctggacctccttgtgaaatatacctaacctgccctagagtcagtgtgtcaagtccttcctgtaaatccatgactttgaaatttgttgttttttccctttaaactgcagccagtgaatacaaatttacttgaaaatagagggtatggggttttgcctgttttgtaatcagtttgcttgttttagcactcagggctttttatttgttatttaattttttaattgtttttaagtcagaaagatctctgggttatctcatgtgctaaggaaaaactattttgctttttccaactttaatagttagtatttctaggggaggcaatcaagataagatatgccattaactgttagcattgtgaaatctgtaagactcaatctctgatctcaaccaaagctttctgagtcctggaactttgctttgggacaactttactttacccatttatatgctgtacttaacagtttgtagctaatttatggggtcatatcttttttttagctaatttacgggggtcatatcagtcatgaatagccttttttaaaaatttaataatccctgaatacaaaaatggaaatggaaaatttataatcataacccccctaattgggagtattataagtttgtaatgctttaagcactgcctcttaagatgataaatttataagatgagaaattctatttaaactattaaactattgttaaataaatgccaattctataagttatattttcttgcagattaatcccaattgttccactagtattctagttttgatgagacacaaatttttgttgttgtttatttttgtttttttgagagatggagtcttgctctgtcacccaggctggagtagagtggcgtgatctcggcttactgcaacctccgcctcctgggttcaagcgattctcctgcctcagtgtcccaagtagctgggactacaggcgtccaccatgcctggccaagacacaaatttttaatggaaaaatattctgattcccagttcatgtaagctttatgaaaattgagtatattgtttatatgatggtacaaattattcttcctctaataatagcagtacagtatattttttccatagcatcagtgtaaaccatagcaaactaaaggagcattgctattaaaaagatgaattagctgggcgcagtggctcatacctgtaatcccagctactcaggaggctgaagcaggagaattgcttgaacctaggaggcggaggttgcagtgagccaagatcacaccattgcattccagcctgggcaacaagagtgaaactccatctctaaataaataagtaaataaatagatgaatttttctcctaagcaaattgaaaaagcttcttgtgtactcaaaattgaacagagctaccttttgactaaaaatgtcatttttaatgagcagtattttctgaacacaaaattttgtacaagagtgtctccattgcattaatttaattttgttataattttttcccaatgaaaggaaaaaagtattttgtagctcctcttccttatgtaaattcttaacatatatttttgagaaatttgcattttttaaagtaaaattgttatctttggatacttacttttctttgttttcctcatttaaagagaatagggatatttctgtattatatatttactgtttcatccctcacctttggagtgaccatgaccttggcatgaaggagagaaacctctgctttccgcctattgcttccaggagttactaccttactggccttggagataatgctcttttgtgccaacctgaggataattttaacaaaatgtaaggccagtttcagaggttgttttgccccacagagagactaatcccaatacaagaatattgacaacaaaaggacaaagtagttattgcacaggacggaaaggtgtctttatttcatcccctccccacttccaaagatgcaaaaggcctaattgaatcaagtctcctttccatctggcaggagacattttaataaggactttttaatttcctacatttcttggccaagtgtcataggaatgtggcctcttttgaaatttaaaaatgaagaagaaaaaaagagcaacactaagttaatataatggagcagatacttttaatgttcttaccattgaatatgccatttaagtttgttatacttgaaattatatgatttttgtccagctctctaaattgtcatctccaatagatttagatgcttcaaatagtaaccacattactggtaagtaaacggtggggttattgggtttagcaagtggggaagtaaggggtgaacaaaacacgagagatggtggctacacccctactaagactgccttaccagataaatgaaatcctttttgtattaggcacaacatggtaaattaagtcttgctctaaaaaaaaagaaaa

SEQ ID NO: 309623 - DNA, 3518 bp, Homo sapiens
tacgtcatttctcggcgccgggaaacctgccattcttcgctgctgatcgcgggattctttttggatagggttgacgttcgtggatagactcatatctgtgaccagtgtccgccaccgcggatggcaagagacctgatcggaccggccctgccgcccggcttcaaggcccgcggaacagcggaggacgaagagcgggacccgagccctgttgcaggaccagctctgccccctaattataaaagcagtagttcagattcatcagacagcgatgaagacagtagttctttgtacgaagaaggaaatcaagaatctgaagaagatgacagtggtccaactgcaagaaaacagaggaaaaatcaggatgatgacgatgatgatgatgatgggttttttggaccagcccttcctcctggatttaaaaagcaggatgattctcctccaaggcccataataggtcctgcattgccacctggtttcattaaatctacacagaaaagtgacaagggcagagatgatccaggacaacaggaaacagacagcagtgaagatgaggatattattggaccaatgcctgcaaaaggaccagttaactataatgtaacgacagagtttgaaaaaagggcccagagaatgaaagaaaaactgaccaaaggagatgatgattcatctaaacccattgtaagagagtcatggatgactgaacttcctccagaaatgaaagactttggtcttgggccaaggacttttaagagaagagctgatgacacatctggagatcgatcaatctggacagatactccagctgatagggaaaggaaagctaaggaaacacaagaagcaaggaagtcatccagtaagaaagatgaagaacatatattatcaggaagagataagagactggctgagcaggtatcttcatacaatgaatcaaaaagatcagaatctcttatggacatacatcataaaaagttaaagagtaaggctgctgaagacaaaaataagcctcaagagagaataccatttgaccgtgataaagatctcaaggttaatcggtttgatgaagctcagaaaaaagccctaataaaaaaatctagagaactaaacaccagattttcacacggcaaaggcaatatgtttttataaggggatttccctgtgcaatgaagaaaagttgaagaatactctttgtccatctttatttctttgtttttggcttcttaagattagagattactttaatcttaaaaaacatacaaatttaccttgttctgtatgtccttttaaggtcatgtggaaacataaaacgaatgttttttatgtagaacagaatattctatgtgcctttagcttctgtggaagtatggggaattatgggcttttcttcaaataattattttaagaggcttccattccccctgatttttgtggtgtctcacaagtaccctctaaggtctggtcaggactgaccaccaaatctctaccacagcctggacctccttgtgaaatatacctaacctgccctagagtcagtgtgtcaagtccttcctgtaaatccatgactttgaaatttgttgttttttccctttaaactgcagccagtgaatacaaatttacttgaaaatagagggtatggggttttgcctgttttgtaatcagtttgcttgttttagcactcagggctttttatttgttatttaattttttaattgtttttaagtcagaaagatctctgggttatctcatgtgctaaggaaaaactattttgctttttccaactttaatagttagtatttctaggggaggcaatcaagataagatatgccattaactgttagcattgtgaaatctgtaagactcaatctctgatctcaaccaaagctttctgagtcctggaactttgctttgggacaactttactttacccatttatatgctgtacttaacagtttgtagctaatttatggggtcatatcttttttttagctaatttacgggggtcatatcagtcatgaatagccttttttaaaaatttaataatccctgaatacaaaaatggaaatggaaaatttataatcataacccccctaattgggagtattataagtttgtaatgctttaagcactgcctcttaagatgataaatttataagatgagaaattctatttaaactattaaactattgttaaataaatgccaattctataagttatattttcttgcagattaatcccaattgttccactagtattctagttttgatgagacacaaatttttgttgttgtttatttttgtttttttgagagatggagtcttgctctgtcacccaggaggttgcagtgagccaagatcacaccattgcattccagcctgggcaacaagagtgaaactccatctctaaataaataagtaaataaatagatgaatttttctcctaagcaaattgaaaaagcttcttgtgtactcaaaattgaacagagctaccttttgactaaaaatgtcatttttaatgagcagtattttctgaacacaaaattttgtacaagagtgtctccattgcattaatttaattttgttataattttttcccaatgaaaggaaaaaagtattttgtagctcctcttccttatgtaaattcttaacatatatttttgagaaatttgcattttttaaagtaaaattgttatctttggatacttacttttctttgttttcctcatttaaagagaatagggatatttctgtattatatatttactgtttcatccctcacctttggagtgaccatgaccttggcatgaaggagagaaacctctgctttccgcctattgcttccaggagttactaccttactggccttggagataatgctcttttgtgccaacctgaggataattttaacaaaatgtaaggccagtttcagaggttgttttgccccacagagagactaatcccaatacaagaatattgacaacaaaaggacaaagtagttattgcacaggacggaaaggtgtctttatttcatcccctccccacttccaaagatgcaaaaggcctaattgaatcaagtctcctttccatctggcaggagacattttaataaggactttttaatttcctacatttcttggccaagtgtcataggaatgtggcctcttttgaaatttaaaaatgaagaagaaaaaaagagcaacactaagttaatataatggagcagatacttttaatgttcttaccattgaatatgccatttaagtttgttatacttgaaattatatgatttttgtccagctctctaaattgtcatctccaatagatttagatgcttcaaatagtaaccacattactggtaagtaaacggtggggttattgggtttagcaagtggggaagtaaggggtgaacaaaacacgagagatggtggctacacccctactaagactgccttaccagataaatgaaatcctttttgtattaggcacaacatggtaaattaagtcttgctctaaaaaaaaagaaaa

SEQ ID NO: 309624 - DNA, 3405 bp, Homo sapiens
tacgtcatttctcggcgccgggaaacctgccattcttcgctgctgatcgcgggattctttttggatagggttgacgttcgtggatagactcatatctgtgaccagtgtccgccaccgcggatggcaagagacctgatcggaccggccctgccgcccggcttcaaggcccgcggaacagcggaggacgaagagcgggacccgagccctgttgcaggaccagctctgccccctaattataaaagcagtagttcagattcatcagacagcgatgaagacagtagttctttgtacgaagaaggaaatcaagaatctgaagaagatgacagtggtccaactgcaagaaaacagaggaaaaatcaggatgatgacgatgatgatgatgatgggttttttggaccagcccttcctcctggatttaaaaagcaggatgattctcctccaaggcccataataggtcctgcattgccacctggtttcattaaatctacacagaaaagtgacaagggcagagatgatccaggacaacaggaaacagacagcagtgaagatgaggatattattggaccaatgcctgcaaaaggaccagttaactataatgtaacgacagagtttgaaaaaagggcccagagaatgaaagaaaaactgaccaaaggagatgatgattcatctaaacccattgtaagagagtcatggatgactgaacttcctccagaaatgaaagactttggtcttgggccaaggacttttaagagaagagctgatgacacatctggagatcgatcaatctggacagatactccagctgatagggaaaggaaagctaaggaaacacaagaagcaaggaagtcatccagtaagaaagatgaagaacatatattatcaggaagagataagagactggctgagcaggtatcttcatacaatgaatcaaaaagatcagaatctcttatggacatacatcataaaaagttaaagagtaaggctgctgaagacaaaaataagcctcaagagagaataccatttgaccgtgataaagatctcaaggttaatcggtttgatgaagctcagaaaaaagccctaataaaaaaatctagagaactaaacaccagattttcacacggcaaaggcaatatgtttttataaggggatttccctgtgcaatgaagaaaagttgaagaatactctttgtccatctttatttctttgtttttggcttcttaagattagagattactttaatcttaaaaaacatacaaatttaccttgttctgtatgtccttttaaggtcatgtggaaacataaaacgaatgttttttatgtagaacagaatattctatgtgcctttagcttctgtggaagtatggggaattatgggcttttcttcaaataattattttaagaggcttccattccccctgatttttgtggtgtctcacaagtaccctctaaggtctggtcaggactgaccaccaaatctctaccacagcctggacctccttgtgaaatatacctaacctgccctagagtcagtgtgtcaagtccttcctgtaaatccatgactttgaaatttgttgttttttccctttaaactgcagccagtgaatacaaatttacttgaaaatagagggtatggggttttgcctgttttgtaatcagtttgcttgttttagcactcagggctttttatttgttatttaattttttaattgtttttaagtcagaaagatctctgggttatctcatgtgctaaggaaaaactattttgctttttccaactttaatagttagtatttctaggggaggcaatcaagataagatatgccattaactgttagcattgtgaaatctgtaagactcaatctctgatctcaaccaaagctttctgagtcctggaactttgctttgggacaactttactttacccatttatatgctgtacttaacagtttgtagctaatttatggggtcatatcttttttttagctaatttacgggggtcatatcagtcatgaatagccttttttaaaaatttaataatccctgaatacaaaaatggaaatggaaaatttataatcataacccccctaattgggagtattataagtttgtaatgctttaagcactgcctcttaagatgataaatttataagatgagaaattctatttaaactattaaactattgttaaataaatgccaattctataagttatattttgaggttgcagtgagccaagatcacaccattgcattccagcctgggcaacaagagtgaaactccatctctaaataaataagtaaataaatagatgaatttttctcctaagcaaattgaaaaagcttcttgtgtactcaaaattgaacagagctaccttttgactaaaaatgtcatttttaatgagcagtattttctgaacacaaaattttgtacaagagtgtctccattgcattaatttaattttgttataattttttcccaatgaaaggaaaaaagtattttgtagctcctcttccttatgtaaattcttaacatatatttttgagaaatttgcattttttaaagtaaaattgttatctttggatacttacttttctttgttttcctcatttaaagagaatagggatatttctgtattatatatttactgtttcatccctcacctttggagtgaccatgaccttggcatgaaggagagaaacctctgctttccgcctattgcttccaggagttactaccttactggccttggagataatgctcttttgtgccaacctgaggataattttaacaaaatgtaaggccagtttcagaggttgttttgccccacagagagactaatcccaatacaagaatattgacaacaaaaggacaaagtagttattgcacaggacggaaaggtgtctttatttcatcccctccccacttccaaagatgcaaaaggcctaattgaatcaagtctcctttccatctggcaggagacattttaataaggactttttaatttcctacatttcttggccaagtgtcataggaatgtggcctcttttgaaatttaaaaatgaagaagaaaaaaagagcaacactaagttaatataatggagcagatacttttaatgttcttaccattgaatatgccatttaagtttgttatacttgaaattatatgatttttgtccagctctctaaattgtcatctccaatagatttagatgcttcaaatagtaaccacattactggtaagtaaacggtggggttattgggtttagcaagtggggaagtaaggggtgaacaaaacacgagagatggtggctacacccctactaagactgccttaccagataaatgaaatcctttttgtattaggcacaacatggtaaattaagtcttgctctaaaaaaaaagaaaa

SEQ ID NO: 309625 - DNA, 3850 bp, Homo sapiens
tacgtcatttctcggcgccgggaaacctgccattcttcgctgctgatcgcgggattctttttggatagggttgacgttcgtggatagactcatatctgtgaccagtgtccgccaccgcggatggcaagagacctgatcggaccggccctgccgcccggcttcaaggcccgcggaacagcggaggacgaagagcgggacccgagccctgttgcaggaccagctctgccccctaattataaaagcagtagttcagattcatcagacagcgatgaagacagtagttctttgtacgaagaaggaaatcaagaatctgaagaagatgacagtggtccaactgcaagaaaacagaggaaaaatcaggatgatgacgatgatgatgatgatgggttttttggaccagcccttcctcctggatttaaaaagcaggatgattctcctccaaggcccataataggtcctgcattgccacctggtttcattaaatctacacagaaaagtgacaagggcagagatgatccaggacaacaggaaacagacagcagtgaagatgaggatattattggaccaatgcctgcaaaaggaccagttaactataatgtaacgacagagtttgaaaaaagggcccagagaatgaaagaaaaactgaccaaaggagatgatgattcatctaaacccattgtaagagagtcatggatgactgaacttcctccagaaatgaaagactttggtcttgggccaaggacttttaagagaagagctgatgacacatctggagatcgatcaatctggacagatactccagctgatagggaaaggaaagctaaggaaacacaagaagcaaggaagtcatccagtaagaaagatgaagaacatatattatcaggaagagataagagactggctgagcaggtatcttcatacaatgaatcaaaaagatcagaatctcttatggacatacatcataaaaagttaaagagtaaggctgctgaagacaaaaataagcctcaagagagaataccatttgaccgtgataaagatctcaaggttaatcggtttgatgaagctcagaaaaaagccctaataaaaaaggggatttccctgtgcaatgaagaaaagttgaagaatactctttgtccatctttatttctttgtttttggcttcttaagattagagattactttaatcttaaaaaacatacaaatttaccttgttctgtatgtccttttaaggtcatgtggaaacataaaacgaatgttttttatgtagaacagaatattctatgtgcctttagcttctgtggaagtatggggaattatgggcttttcttcaaataattattttaagaggcttccattccccctgatttttgtggtgtctcacaagtaccctctaaggtctggtcaggactgaccaccaaatctctaccacagcctggacctccttgtgaaatatacctaacctgccctagagtcagtgtgtcaagtccttcctgtaaatccatgactttgaaatttgttgttttttccctttaaactgcagccagtgaatacaaatttacttgaaaatagagggtatggggttttgcctgttttgtaatcagtttgcttgttttagcactcagggctttttatttgttatttaattttttaattgtttttaagtcagaaagatctctgggttatctcatgtgctaaggaaaaactattttgctttttccaactttaatagttagtatttctaggggaggcaatcaagataagatatgccattaactgttagcattgtgaaatctgtaagactcaatctctgatctcaaccaaagctttctgagtcctggaactttgctttgggacaactttactttacccatttatatgctgtacttaacagtttgtagctaatttatggggtcatatcttttttttagctaatttacgggggtcatatcagtcatgaatagccttttttaaaaatttaataatccctgaatacaaaaatggaaatggaaaatttataatcataacccccctaattgggagtattataagtttgtaatgctttaagcactgcctcttaagatgataaatttataagatgagaaattctatttaaactattaaactattgttaaataaatgccaattctataagttatattttcttgcagattaatcccaattgttccactagtattctagttttgatgagacacaaatttttgttgttgtttatttttgtttttttgagagatggagtcttgctctgtcacccaggctggagtagagtggcgtgatctcggcttactgcaacctccgcctcctgggttcaagcgattctcctgcctcagtgtcccaagtagctgggactacaggcgtccaccatgcctggccaagacacaaatttttaatggaaaaatattctgattcccagttcatgtaagctttatgaaaattgagtatattgtttatatgatggtacaaattattcttcctctaataatagcagtacagtatattttttccatagcatcagtgtaaaccatagcaaactaaaggagcattgctattaaaaagatgaattagctgggcgcagtggctcatacctgtaatcccagctactcaggaggctgaagcaggagaattgcttgaacctaggaggcggaggttgcagtgagccaagatcacaccattgcattccagcctgggcaacaagagtgaaactccatctctaaataaataagtaaataaatagatgaatttttctcctaagcaaattgaaaaagcttcttgtgtactcaaaattgaacagagctaccttttgactaaaaatgtcatttttaatgagcagtattttctgaacacaaaattttgtacaagagtgtctccattgcattaatttaattttgttataattttttcccaatgaaaggaaaaaagtattttgtagctcctcttccttatgtaaattcttaacatatatttttgagaaatttgcattttttaaagtaaaattgttatctttggatacttacttttctttgttttcctcatttaaagagaatagggatatttctgtattatatatttactgtttcatccctcacctttggagtgaccatgaccttggcatgaaggagagaaacctctgctttccgcctattgcttccaggagttactaccttactggccttggagataatgctcttttgtgccaacctgaggataattttaacaaaatgtaaggccagtttcagaggttgttttgccccacagagagactaatcccaatacaagaatattgacaacaaaaggacaaagtagttattgcacaggacggaaaggtgtctttatttcatcccctccccacttccaaagatgcaaaaggcctaattgaatcaagtctcctttccatctggcaggagacattttaataaggactttttaatttcctacatttcttggccaagtgtcataggaatgtggcctcttttgaaatttaaaaatgaagaagaaaaaaagagcaacactaagttaatataatggagcagatacttttaatgttcttaccattgaatatgccatttaagtttgttatacttgaaattatatgatttttgtccagctctctaaattgtcatctccaatagatttagatgcttcaaatagtaaccacattactggtaagtaaacggtggggttattgggtttagcaagtggggaagtaaggggtgaacaaaacacgagagatggtggctacacccctactaagactgccttaccagataaatgaaatcctttttgtattaggcacaacatggtaaattaagtcttgctctaaaaaaaaagaaaa

SEQ ID NO: 309626 - DNA, 4529 bp, Homo sapiens
tacgtcatttctcggcgccgggaaacctgccattcttcgctgctgatcgcgggattctttttggatagggttgacgttcgtggatagactcatatctgtgaccagtgtccgccaccgcggatggcaagagacctgatcggaccggccctgccgcccggcttcaaggcccgcggaacagcggaggacgaagagcgggacccgagccctgttgcaggaccagctctgccccctaattataaaagcagtagttcagattcatcagacagcgatgaagacagtagttctttgtacgaagaaggaaatcaagaatctgaagaagatgacagtggtccaactgcaagaaaacagaggaaaaatcaggatgatgacgatgatgatgatgatgggttttttggaccagcccttcctcctggatttaaaaagcaggatgattctcctccaaggcccataataggtcctgcattgccacctggtttcattaaatctacacagaaaagtgacaagggcagagatgatccaggacaacaggaaacagacagcagtgaagatgaggatattattggaccaatgcctgcaaaaggaccagttaactataatgtaacgacagagtttgaaaaaagggcccagagaatgaaagaaaaactgaccaaaggagatgatgattcatctaaacccattgtaagagagtcatggatgactgaacttcctccagaaatgaaagactttggtcttgggccaaggacttttaagagaagagctgatgacacatctggagatcgatcaatctggacagatactccagctgatagggaaaggaaagctaaggaaacacaagaagcaaggaagtcatccagtaagaaagatgaagaacatatattatcaggaagagataagagactggctgagcaggtatcttcatacaatgaatcaaaaagatcagaatctcttatggacatacatcataaaaagttaaagagtaaggctgctgaagacaaaaataagcctcaagagagaataccatttgaccgtgataaagatctcaaggttaatcggtttgatgaagctcagaaaaaagccctaataaaaaaatctagagaactaaacaccagattttcacacggcaaaggcaatatgtttttataaggggatttccctgtgcaatgaagaaaagttgaagaatactctttgtccatctttatttctttgtttttggcttcttaagattagagattactttaatcttaaaaaacatacaaatttaccttgttctgtatgtccttttaaggtcatgtggaaacataaaacgaatgttttttatgtagaacagaatattctatgtgcctttagcttctgtggaagtatggggaattatgggcttttcttcaaataattattttaagaggcttccattccccctgatttttgtggtgtctcacaagtaccctctaaggtctggtcaggactgaccaccaaatctctaccacagcctggacctccttgtgaaatatacctaacctgccctagagtcagtgtgtcaagtccttcctgtaaatccatgactttgaaatttgttgttttttccctttaaactgcagccagtgaatacaaatttacttgaaaatagagggtatggggttttgcctgttttgtaatcagtttgcttgttttagcactcagggctttttatttgttatttaattttttaattgtttttaagtcagaaagatctctgggttatctcatgtgctaaggaaaaactattttgctttttccaactttaatagttagtatttctaggggaggcaatcaagataagatatgccattaactgttagcattgtgaaatctgtaagactcaatctctgatctcaaccaaagctttctgagtcctggaactttgctttgggacaactttactttacccatttatatgctgtacttaacagtttgtagctaatttatggggtcatatcttttttttagctaatttacgggggtcatatcagtcatgaatagccttttttaaaaatttaataatccctgaatacaaaaatggaaatggaaaatttataatcataacccccctaattgggagtattataagtttgtaatgctttaagcactgcctcttaagatgataaatttataagatgagaaattctatttaaactattaaactattgttaaataaatgccaattctataagttatattttcttgcagattaatcccaattgttccactagtattctagttttgatgagacacaaatttttgttgttgtttatttttgtttttttgagagatggagtcttgctctgtcacccaggctggagtagagtggcgtgatctcggcttactgcaacctccgcctcctgggttcaagcgattctcctgcctcagtgtcccaagtagctgggactacaggcgtccaccatgcctggccaagacacaaatttttaatggaaaaatattctgattcccagttcatgtaagctttatgaaaattgagtatattgtttatatgatggtacaaattattcttcctctaataatagcagtacagtatattttttccatagcatcagtgtaaaccatagcaaactaaaggagcattgctattaaaaagatgaattagctgggcgcagtggctcatacctgtaatcccagctactcaggaggctgaagcaggagaattgcttgaacctaggaggcggaggttgcagtgagccaagatcacaccattgcattccagcctgggcaacaagagtgaaactccatctctaaataaataagtaaataaatagatgaatttttctcctaagcaaattgaaaaagcttcttgtgtactcaaaattgaacagagctaccttttgactaaaaatgtcatttttaatgagcagtattttctgaacacaaaattttgtacaagagtgtctccattgcattaatttaattttgttataattttttcccaatgaaaggaaaaaagtattttgtagctcctcttccttatgtaaattcttaacatatatttttgagaaatttgcattttttaaagtaaaattgttatctttggatacttacttttctttgttttcctcatttaaagagaatagggatatttctgtattatatatttactgtttcatccctcacctttggagtgaccatgaccttggcatgaaggagagaaacctctgctttccgcctattgcttccaggagttactaccttactggccttggagataatgctcttttgtgccaacctgaggataattttaacaaaatgtaaggccagtttcagaggttgttttgccccacagagagactaatcccaatacaagaatattgacaacaaaaggacaaagtagttattgcacaggacggaaaggtgtctttatttcatcccctccccacttccaaagatgcaaaaggcctaattgaatcaagtctcctttccatctggcaggagacattttaataaggactttttaatttcctacatttcttggccaagtgtcataggaatgtggcctcttttgaaatttaaaaatgaagaagaaaaaaagagcaacactaagttaatataatggagcagatacttttaatgttcttaccattgaatatgccatttaagtttgttatacttgaaattatatgatttttgtccagctctctaaattgtcatctccaatagatttagatgcttcaaatagtaaccacattactgtgataggtattattagaaaaaagttatttcttgagttacacctaagaggaagaagtaacatgatggaaagtggttggagatagcacccaattaacatcgacagccaagtcttctatttcagaatattgatttatttcgctttggcttttgatgccatcatgagatttaagtctgcagtttcaaaagctcatgctacttagaagagatgatttttgcagcttaaaaaattgcttgtgactgcagtatgtacacagttaaaaagctgttcactgcccctttcaaccttttcattttgagctttactaagagaatgcttttaggaacagaattcctaaagtgtaattttttatgtataaataaagttttatctatatctgaaaaaaaaaaaaaaaaaaaaaaaaaaaaaaaaaaaaaaaaaaagaaggacaaaacaaaaggagggggggggcaaaaaaacggagggggggggggcagaaacccccgtggagagggccacacgacgccaacactaacgacaaccgtcccaccgccgcacttcacacctccgaccacgcacccgccccgctacgctaccaggcgacacacccaccccgacgtacaaccagcccacaccccggggatcagcaccggcccacaagccaacgctcgccgacaacacccaacacgcagcaactatagcactgtgaaacatccgcggccaacaagcgccacaacacaccaggcagaagcagaacaagcgaggcgcgaccaccgcacccccacagcacagagcgccacgagcaaagccaatacaa

SEQ ID NO: 309627 - DNA, 3147 bp, Homo sapiens
tacgtcatttctcggcgccgggaaacctgccattcttcgctgctgatcgcgggattctttttggatagggttgacgttcgtggatagactcatatctgtgaccagtgtccgccaccgcggatggcaagagacctgatcggaccggccctgccgcccggcttcaaggcccgcggaacagcggaggacgaagagcgggacccgagccctgttgcaggaccagctctgccccctaattataaaagcagtagttcagattcatcagacagcgatgaagacagtagttctttgtacgaagaaggaaatcaagaatctgaagaagatgacagtggtccaactgcaagaaaacagaggaaaaatcaggatgatgacgatgatgatgatgatgggttttttggaccagcccttcctcctggatttaaaaagcaggatgattctcctccaaggcccataataggtcctgcattgccacctggtttcattaaatctacacagaaaagtgacaagggcagagatgatccaggacaacaggaaacagacagcagtgaagatgaggatattattggaccaatgcctgcaaaaggaccagttaactataatgtaacgacagagtttgaaaaaagggcccagagaatgaaagaaaaactgaccaaaggagatgatgattcatctaaacccattgtaagagagtcatggatgactgaacttcctccagaaatgaaagactttggtcttgggccaaggacttttaagagaagagctgatgacacatctggagatcgatcaatctggacagatactccagctgatagggaaaggaaagctaaggaaacacaagaagcaaggaagtcatccagtaagaaagatgaagaacatatattatcaggaagagataagagactggctgagcaggtatcttcatacaatgaatcaaaaagatcagaatctcttatggacatacatcataaaaagttaaagagtaaggctgctgaagacaaaaataagcctcaagagagaataccatttgaccgtgataaagatctcaaggttaatcggtttgatgaagctcagaaaaaagccctaataaaaaaatctagagaactaaacaccagattttcacacggcaaaggcaatatgtttttataaggggatttccctgtgcaatgaagaaaagttgaagaatactctttgtccatctttatttctttgtttttggcttcttaagattagagattactttaatcttaaaaaacatacaaatttaccttgttctgtatgtccttttaaggtcatgtggaaacataaaacgaatgttttttatgtagaacagaatattctatgtgcctttagcttctgtggaagtatggggaattatgggcttttcttcaaataattattttaagaggcttccattccccctgatttttgtggtgtctcacaagtaccctctaaggtctggtcaggactgaccaccaaatctctaccacagcctggacctccttgtgaaatatacctaacctgccctagagtcagtgtgtcaagtccttcctgtaaatccatgactttgaaatttgttgttttttccctttaaactgcagccagtgaatacaaatttacttgaaaatagagggtatggggttttgcctgttttgtaatcagtttgcttgttttagcactcagggctttttatttgttatttaattttttaattgtttttaagtcagaaagatctctgggttatctcatgtgctaaggaaaaactattttgctttttccaactttaatagttagtatttctaggggaggcaatcaagataagatatgccattaactgttagcattgtgaaatctgtaagactcaatctctgatctcaaccaaagctttctgagtcctggaactttgctttgggacaactttactttacccatttatatgctgtacttaacagtttgtagctaatttatggggtcatatcttttttttagctaatttacgggggtcatatcagtcatgaatagccttttttaaaaatttaataatccctgaatacaaaaatggaaatggaaaatttataatcataacccccctaattgggagtattataagtttgtaatgctttaagcactgcctcttaagatgataaatttataagatgagaaattctatttaaactattaaactattgttaaataaatgccaattctataagttatattttcttgcagattaatcccaattgttccactagtattctagttttgatgagacacaaatttttgttgttgtttatttttgtttttttgagagatggagtcttgctctgtcacccaggctggagtagagtggcgtgatctcggcttactgcaacctccgcctcctgggttcaagcgattctcctgcctcagtgtcccaagtagctgggactacaggcgtatggcggtgtgcgcctgtagtcccagctactcgggaggctgaggcagaagaattgcttgaacccaggaggcggaggttgcagtgagccaagatcgcgccactgcactccagcctgggcgacagagcgagactccatctccaaaaaaaaaaaaaagtgaggttgagatttgcatggtaccaaggcttacatgcttcagaatagatcaatggttattgtataagtaattttatcctaaaacattatgacattttttgtttcttattgagggtagataatgttaatattaaactactaataggaggcccttatcacttctcttttcattttttccatgcagtgataggtattattagaaaaaagttatttcttgagttacacctaagaggaagaagtaacatgatggaaagtggttggagatagcacccaattaacatcgacagccaagtcttctatttcagaatattgatttatttcgctttggcttttgatgccatcatgagatttaagtctgcagtttcaaaagctcatgctacttagaagagatgatttttgcagcttaaaaaattgcttgtgactgcagtatgtacacagttaaaaagctgttcactgcccctttcaaccttttcattttgagctttactaagagaatgcttttaggaacagaattcctaaagtgtaattttttatgtataaataaagttttatctatatctga

SEQ ID NO: 309628 - DNA, 3696 bp, Homo sapiens
  misc_feature (41)..(41): n is a, c, g, or t
  misc_feature (83)..(83): n is a, c, g, or t
tttttttgagatgaagtctcactctgtagcccagactggantccggtggcacgatctcagctcactgtagcctctgcctcctnagttcaagtggttctcctgtctcagtctcccaagtagctggaactacagaaaacagaggaaaaatcaggatgatgacgatgatgatgatgatgggttttttggaccagcccttcctcctggatttaaaaagcaggatgattctcctccaaggcccataataggtcctgcattgccacctggtttcattaaatctacacagaaaagtgacaagggcagagatgatccaggacaacaggaaacagacagcagtgaagatgaggatattattggaccaatgcctgcaaaaggaccagttaactataatgtaacgacagagtttgaaaaaagggcccagagaatgaaagaaaaactgaccaaaggagatgatgattcatctaaacccattgtaagagagtcatggatgactgaacttcctccagaaatgaaagactttggtcttgggccaaggacttttaagagaagagctgatgacacatctggagatcgatcaatctggacagatactccagctgatagggaaaggaaagctaaggaaacacaagaagcaaggaagtcatccagtaagaaagatgaagaacatatattatcaggaagagataagagactggctgagcaggtatcttcatacaatgaatcaaaaagatcagaatctcttatggacatacatcataaaaagttaaagagtaaggctgctgaagacaaaaataagcctcaagagagaataccatttgaccgtgataaagatctcaaggttaatcggtttgatgaagctcagaaaaaagccctaataaaaaaatctagagaactaaacaccagattttcacacggcaaaggcaatatgtttttataaggggatttccctgtgcaatgaagaaaagttgaagaatactctttgtccatctttatttctttgtttttggcttcttaagattagagattactttaatcttaaaaaacatacaaatttaccttgttctgtatgtccttttaaggtcatgtggaaacataaaacgaatgttttttatgtagaacagaatattctatgtgcctttagcttctgtggaagtatggggaattatgggcttttcttcaaataattattttaagaggcttccattccccctgatttttgtggtgtctcacaagtaccctctaaggtctggtcaggactgaccaccaaatctctaccacagcctggacctccttgtgaaatatacctaacctgccctagagtcagtgtgtcaagtccttcctgtaaatccatgactttgaaatttgttgttttttccctttaaactgcagccagtgaatacaaatttacttgaaaatagagggtatggggttttgcctgttttgtaatcagtttgcttgttttagcactcagggctttttatttgttatttaattttttaattgtttttaagtcagaaagatctctgggttatctcatgtgctaaggaaaaactattttgctttttccaactttaatagttagtatttctaggggaggcaatcaagataagatatgccattaactgttagcattgtgaaatctgtaagactcaatctctgatctcaaccaaagctttctgagtcctggaactttgctttgggacaactttactttacccatttatatgctgtacttaacagtttgtagctaatttatggggtcatatcttttttttagctaatttacgggggtcatatcagtcatgaatagccttttttaaaaatttaataatccctgaatacaaaaatggaaatggaaaatttataatcataacccccctaattgggagtattataagtttgtaatgctttaagcactgcctcttaagatgataaatttataagatgagaaattctatttaaactattaaactattgttaaataaatgccaattctataagttatattttcttgcagattaatcccaattgttccactagtattctagttttgatgagacacaaatttttgttgttgtttatttttgtttttttgagagatggagtcttgctctgtcacccaggctggagtagagtggcgtgatctcggcttactgcaacctccgcctcctgggttcaagcgattctcctgcctcagtgtcccaagtagctgggactacaggcgtccaccatgcctggccaagacacaaatttttaatggaaaaatattctgattcccagttcatgtaagctttatgaaaattgagtatattgtttatatgatggtacaaattattcttcctctaataatagcagtacagtatattttttccatagcatcagtgtaaaccatagcaaactaaaggagcattgctattaaaaagatgaattagctgggcgcagtggctcatacctgtaatcccagctactcaggaggctgaagcaggagaattgcttgaacctaggaggcggaggttgcagtgagccaagatcacaccattgcattccagcctgggcaacaagagtgaaactccatctctaaataaataagtaaataaatagatgaatttttctcctaagcaaattgaaaaagcttcttgtgtactcaaaattgaacagagctaccttttgactaaaaatgtcatttttaatgagcagtattttctgaacacaaaattttgtacaagagtgtctccattgcattaatttaattttgttataattttttcccaatgaaaggaaaaaagtattttgtagctcctcttccttatgtaaattcttaacatatatttttgagaaatttgcattttttaaagtaaaattgttatctttggatacttacttttctttgttttcctcatttaaagagaatagggatatttctgtattatatatttactgtttcatccctcacctttggagtgaccatgaccttggcatgaaggagagaaacctctgctttccgcctattgcttccaggagttactaccttactggccttggagataatgctcttttgtgccaacctgaggataattttaacaaaatgtaaggccagtttcagaggttgttttgccccacagagagactaatcccaatacaagaatattgacaacaaaaggacaaagtagttattgcacaggacggaaaggtgtctttatttcatcccctccccacttccaaagatgcaaaaggcctaattgaatcaagtctcctttccatctggcaggagacattttaataaggactttttaatttcctacatttcttggccaagtgtcataggaatgtggcctcttttgaaatttaaaaatgaagaagaaaaaaagagcaacactaagttaatataatggagcagatacttttaatgttcttaccattgaatatgccatttaagtttgttatacttgaaattatatgatttttgtccagctctctaaattgtcatctccaatagatttagatgcttcaaatagtaaccacattactggtaagtaaacggtggggttattgggtttagcaagtggggaagtaaggggtgaacaaaacacgagagatggtggctacacccctactaagactgccttaccagataaatgaaatcctttttgtattaggcacaacatggtaaattaagtcttgctctaaaaaaaaagaaaa

SEQ ID NO: 309629 - DNA, 4026 bp, Homo sapiens
tacgtcatttctcggcgccgggaaacctgccattcttcgctgctgatcgcgggattctttttggatagggttgacgttcgtggatagactcatatctgtgaccagtgtccgccaccgcggatggcaagagacctgatcggaccggccctgccgcccggcttcaaggcccgcggaacagcggaggacgaagagcgggacccgagccctgttgcaggaccagctctgccccctaattataaaagcagtagttcagattcatcagacagcgatgaagacagtagttctttgtacgaagaaggaaatcaagaatctgaagaagatgacagtggtccaactgcaagaaaacagaggaaaaatcaggatgatgacgatgatgatgatgatgggttttttggaccagcccttcctcctggatttaaaaagcaggatgattctcctccaaggcccataataggtcctgcattgccacctggtttcattaaatctacacagaaaagtgacaagggcagagatgatccaggacaacaggtatcatcatcccatttcaactctaaggtttggaaagttttcattgaaagaataagatgtattgtaacaaactccaaactttatgcatgcagttactacaaccactggactcaactgtaatgaaacagacagcagtgaagatgaggatattattggaccaatgcctgcaaaaggaccagttaactataatgtaacgacagagtttgaaaaaagggcccagagaatgaaagaaaaactgaccaaaggagatgatgattcatctaaacccattgtaagagagtcatggatgactgaacttcctccagaaatgaaagactttggtcttgggccaaggacttttaagagaagagctgatgacacatctggagatcgatcaatctggacagatactccagctgatagggaaaggaaagctaaggaaacacaagaagcaaggaagtcatccagtaagaaagatgaagaacatatattatcaggaagagataagagactggctgagcaggtatcttcatacaatgaatcaaaaagatcagaatctcttatggacatacatcataaaaagttaaagagtaaggctgctgaagacaaaaataagcctcaagagagaataccatttgaccgtgataaagatctcaaggttaatcggtttgatgaagctcagaaaaaagccctaataaaaaaatctagagaactaaacaccagattttcacacggcaaaggcaatatgtttttataaggggatttccctgtgcaatgaagaaaagttgaagaatactctttgtccatctttatttctttgtttttggcttcttaagattagagattactttaatcttaaaaaacatacaaatttaccttgttctgtatgtccttttaaggtcatgtggaaacataaaacgaatgttttttatgtagaacagaatattctatgtgcctttagcttctgtggaagtatggggaattatgggcttttcttcaaataattattttaagaggcttccattccccctgatttttgtggtgtctcacaagtaccctctaaggtctggtcaggactgaccaccaaatctctaccacagcctggacctccttgtgaaatatacctaacctgccctagagtcagtgtgtcaagtccttcctgtaaatccatgactttgaaatttgttgttttttccctttaaactgcagccagtgaatacaaatttacttgaaaatagagggtatggggttttgcctgttttgtaatcagtttgcttgttttagcactcagggctttttatttgttatttaattttttaattgtttttaagtcagaaagatctctgggttatctcatgtgctaaggaaaaactattttgctttttccaactttaatagttagtatttctaggggaggcaatcaagataagatatgccattaactgttagcattgtgaaatctgtaagactcaatctctgatctcaaccaaagctttctgagtcctggaactttgctttgggacaactttactttacccatttatatgctgtacttaacagtttgtagctaatttatggggtcatatcttttttttagctaatttacgggggtcatatcagtcatgaatagccttttttaaaaatttaataatccctgaatacaaaaatggaaatggaaaatttataatcataacccccctaattgggagtattataagtttgtaatgctttaagcactgcctcttaagatgataaatttataagatgagaaattctatttaaactattaaactattgttaaataaatgccaattctataagttatattttcttgcagattaatcccaattgttccactagtattctagttttgatgagacacaaatttttgttgttgtttatttttgtttttttgagagatggagtcttgctctgtcacccaggctggagtagagtggcgtgatctcggcttactgcaacctccgcctcctgggttcaagcgattctcctgcctcagtgtcccaagtagctgggactacaggcgtccaccatgcctggccaagacacaaatttttaatggaaaaatattctgattcccagttcatgtaagctttatgaaaattgagtatattgtttatatgatggtacaaattattcttcctctaataatagcagtacagtatattttttccatagcatcagtgtaaaccatagcaaactaaaggagcattgctattaaaaagatgaattagctgggcgcagtggctcatacctgtaatcccagctactcaggaggctgaagcaggagaattgcttgaacctaggaggcggaggttgcagtgagccaagatcacaccattgcattccagcctgggcaacaagagtgaaactccatctctaaataaataagtaaataaatagatgaatttttctcctaagcaaattgaaaaagcttcttgtgtactcaaaattgaacagagctaccttttgactaaaaatgtcatttttaatgagcagtattttctgaacacaaaattttgtacaagagtgtctccattgcattaatttaattttgttataattttttcccaatgaaaggaaaaaagtattttgtagctcctcttccttatgtaaattcttaacatatatttttgagaaatttgcattttttaaagtaaaattgttatctttggatacttacttttctttgttttcctcatttaaagagaatagggatatttctgtattatatatttactgtttcatccctcacctttggagtgaccatgaccttggcatgaaggagagaaacctctgctttccgcctattgcttccaggagttactaccttactggccttggagataatgctcttttgtgccaacctgaggataattttaacaaaatgtaaggccagtttcagaggttgttttgccccacagagagactaatcccaatacaagaatattgacaacaaaaggacaaagtagttattgcacaggacggaaaggtgtctttatttcatcccctccccacttccaaagatgcaaaaggcctaattgaatcaagtctcctttccatctggcaggagacattttaataaggactttttaatttcctacatttcttggccaagtgtcataggaatgtggcctcttttgaaatttaaaaatgaagaagaaaaaaagagcaacactaagttaatataatggagcagatacttttaatgttcttaccattgaatatgccatttaagtttgttatacttgaaattatatgatttttgtccagctctctaaattgtcatctccaatagatttagatgcttcaaatagtaaccacattactggtaagtaaacggtggggttattgggtttagcaagtggggaagtaaggggtgaacaaaacacgagagatggtggctacacccctactaagactgccttaccagataaatgaaatcctttttgtattaggcacaacatggtaaattaagtcttgctctaaaaaaaaagaaaa

SEQ ID NO: 309630 - DNA, 3851 bp, Homo sapiens
tacgtcatttctcggcgccgggaaacctgccattcttcgctgctgatcgcgggattctttttggatagggttgacgttcgtggatagactcatatctgtgaccagtgtccgccaccgcggatggcaagagacctgatcggaccggccctgccgcccggcttcaaggcccgcggaacagcggaggacgaagagcgggacccgagccctgttgcaggaccagctctgccccctaattataaaagcagtagttcagattcatcagacagcgatgaagacagtagttctttgtacgaagaaggaaatcaagaatctgaagaagatgacagtggtccaactgcaagaaaacagaggaaaaatcaggatgatgacgatgatgatgatgatgggttttttggaccagcccttcctcctggatttaaaaagcaggatgattctcctccaaggcccataataggtcctgcattgccacctggtttcattaaatctacacagaaaagtgacaagggcagagatgatccaggacaacaggaaacagacagcagtgaagatgaggatattattggaccaatgcctgcaaaaggaccagttaactataatgtaacgacagagtttgaaaaaagggcccagagaatgaaagagatgactgaacttcctccagaaatgaaagactttggtcttgggccaaggacttttaagagaagagctgatgacacatctggagatcgatcaatctggacagatactccagctgatagggaaaggaaagctaaggaaacacaagaagcaaggaagtcatccagtaagaaagatgaagaacatatattatcaggaagagataagagactggctgagcaggtatcttcatacaatgaatcaaaaagatcagaatctcttatggacatacatcataaaaagttaaagagtaaggctgctgaagacaaaaataagcctcaagagagaataccatttgaccgtgataaagatctcaaggttaatcggtttgatgaagctcagaaaaaagccctaataaaaaaatctagagaactaaacaccagattttcacacggcaaaggcaatatgtttttataaggggatttccctgtgcaatgaagaaaagttgaagaatactctttgtccatctttatttctttgtttttggcttcttaagattagagattactttaatcttaaaaaacatacaaatttaccttgttctgtatgtccttttaaggtcatgtggaaacataaaacgaatgttttttatgtagaacagaatattctatgtgcctttagcttctgtggaagtatggggaattatgggcttttcttcaaataattattttaagaggcttccattccccctgatttttgtggtgtctcacaagtaccctctaaggtctggtcaggactgaccaccaaatctctaccacagcctggacctccttgtgaaatatacctaacctgccctagagtcagtgtgtcaagtccttcctgtaaatccatgactttgaaatttgttgttttttccctttaaactgcagccagtgaatacaaatttacttgaaaatagagggtatggggttttgcctgttttgtaatcagtttgcttgttttagcactcagggctttttatttgttatttaattttttaattgtttttaagtcagaaagatctctgggttatctcatgtgctaaggaaaaactattttgctttttccaactttaatagttagtatttctaggggaggcaatcaagataagatatgccattaactgttagcattgtgaaatctgtaagactcaatctctgatctcaaccaaagctttctgagtcctggaactttgctttgggacaactttactttacccatttatatgctgtacttaacagtttgtagctaatttatggggtcatatcttttttttagctaatttacgggggtcatatcagtcatgaatagccttttttaaaaatttaataatccctgaatacaaaaatggaaatggaaaatttataatcataacccccctaattgggagtattataagtttgtaatgctttaagcactgcctcttaagatgataaatttataagatgagaaattctatttaaactattaaactattgttaaataaatgccaattctataagttatattttcttgcagattaatcccaattgttccactagtattctagttttgatgagacacaaatttttgttgttgtttatttttgtttttttgagagatggagtcttgctctgtcacccaggctggagtagagtggcgtgatctcggcttactgcaacctccgcctcctgggttcaagcgattctcctgcctcagtgtcccaagtagctgggactacaggcgtccaccatgcctggccaagacacaaatttttaatggaaaaatattctgattcccagttcatgtaagctttatgaaaattgagtatattgtttatatgatggtacaaattattcttcctctaataatagcagtacagtatattttttccatagcatcagtgtaaaccatagcaaactaaaggagcattgctattaaaaagatgaattagctgggcgcagtggctcatacctgtaatcccagctactcaggaggctgaagcaggagaattgcttgaacctaggaggcggaggttgcagtgagccaagatcacaccattgcattccagcctgggcaacaagagtgaaactccatctctaaataaataagtaaataaatagatgaatttttctcctaagcaaattgaaaaagcttcttgtgtactcaaaattgaacagagctaccttttgactaaaaatgtcatttttaatgagcagtattttctgaacacaaaattttgtacaagagtgtctccattgcattaatttaattttgttataattttttcccaatgaaaggaaaaaagtattttgtagctcctcttccttatgtaaattcttaacatatatttttgagaaatttgcattttttaaagtaaaattgttatctttggatacttacttttctttgttttcctcatttaaagagaatagggatatttctgtattatatatttactgtttcatccctcacctttggagtgaccatgaccttggcatgaaggagagaaacctctgctttccgcctattgcttccaggagttactaccttactggccttggagataatgctcttttgtgccaacctgaggataattttaacaaaatgtaaggccagtttcagaggttgttttgccccacagagagactaatcccaatacaagaatattgacaacaaaaggacaaagtagttattgcacaggacggaaaggtgtctttatttcatcccctccccacttccaaagatgcaaaaggcctaattgaatcaagtctcctttccatctggcaggagacattttaataaggactttttaatttcctacatttcttggccaagtgtcataggaatgtggcctcttttgaaatttaaaaatgaagaagaaaaaaagagcaacactaagttaatataatggagcagatacttttaatgttcttaccattgaatatgccatttaagtttgttatacttgaaattatatgatttttgtccagctctctaaattgtcatctccaatagatttagatgcttcaaatagtaaccacattactggtaagtaaacggtggggttattgggtttagcaagtggggaagtaaggggtgaacaaaacacgagagatggtggctacacccctactaagactgccttaccagataaatgaaatcctttttgtattaggcacaacatggtaaattaagtcttgctctaaaaaaaaagaaaa

SEQ ID NO: 309631 - DNA, 1468 bp, Homo sapiens
tacgtcatttctcggcgccgggaaacctgccattcttcgctgctgatcgcgggattctttttggatagggttgacgttcgtggatagactcatatctgtgaccagtgtccgccaccgcggatggcaagagacctgatcggaccggccctgccgcccggcttcaaggcccgcggaacagcggaggacgaagagcgggacccgagccctgttgcaggaccagctctgccccctaattataaaagcagtagttcagattcatcagacagcgatgaagacagtagttctttgtacgaagaaggaaatcaagaatctgaagaagatgacagtggtccaactgcaagaaaacagaggaaaaatcaggatgatgacgatgatgatgatgatgggttttttggaccagcccttcctcctggatttaaaaagcaggatgattctcctccaaggcccataataggtcctgcattgccacctggtttcattaaatctacacagaaaagtgacaagggcagagatgatccaggacaacaggaaacagacagcagtgaagatgaggatattattggaccaatgcctgcaaaaggaccagttaactataatgtaacgacagagtttgaaaaaagggcccagagaatgaaagaaaaactgaccaaaggagatgatgattcatctaaacccattgtaagagagtcatggatgactgaacttcctccagaaatgaaagactttggtcttgggccaaggacttttaagagaagagctgatgacacatctggagatcgatcaatctggacagatactccagctgatagggaaaggaaagctaaggaaacacaagaagcaaggaagtcatccagtaagaaagatgaagaacatatattatcaggaagagataagagactggctgagcaggtatcttcatacaatgaatcaaaaagatcagaatctcttatggacatacatcataaaaagttaaagagtaaggctgctgaagacaaaaataagcctcaagagagaataccatttgaccgtgataaagatctcaaggttaatcggtttgatgaagctcagaaaaaagccctaataaaaaaatctagagaactaaacaccagattttcacacggcaaaggcaatatgtttttataagtaagtatatttcagtgaggtatattttaatactgatcaatgtgaacttttctaaatactctattgtctttaataattgtgctgaaatctatttccttttataatagattaaaaattttatatttttataagtaaacagtgatttttgaaaagtcagccttgtgggatgaaaaatatgtcttactggaaaaatccctcataataacctaatagggcattgctattaaaaatgctaaaataaaaattcagcttatgagaaatggcaaaggaaggtgtggtttgatacttgagtaaatatgcatgctttattaaagatgaagaaagg

SEQ ID NO: 309632 - DNA, 379 bp, Homo sapiens
aaaaatataaaaattagtcgggcctggtggcgggtgcctgtaatcccagctactcaggaggctgaagcaggagaattgcttgaacctaggaggcggaggttgcagtgagccaagatcacaccattgcattccagcctgggcaacaagagtgaaactccatctctaaataaataagtaaataaatagatgaatttttctcctaagcaaattgaaaaagcttcttgtgtactcaaaattgaacagagctaccttttgactaaaaatgtcatttttaatgagcagtattttctgaacacaaaattttgtacaagagtgtctccattgcattaatttaattttgttataattttttcccaatgaaaggaaaaaagtattttgt

SEQ ID NO: 309633 - DNA, 6649 bp, Homo sapiens
ccccgactagcccgacagtccccgactagcccgacagccccagcaggatctgcatcgtcatcgagccggcccagcttctgaagggagatgtcatggtgaaatgctaccacaagaaataccgctcggccacccgtgacgtcattttccgcctgcagtttcacactggggctgtgcagggctacgggctggtgtttgggaaggaggatctggacaatgccagcaaagatgaccgttttcctgactatgggaaggttgaattagtcttctctgccacgcctgagaagattcaagggtccgaacacttgtacaacgaccacggtgtgattgtggactacaacacaacagacccactgatacgctgggactcgtacgagaacctcagtgcagatggagaagtgctacacacgcagggccctgtcgatggcagcctttacgcgaaggtgaggaagaaaagctcctcggatcctggcatcccaggtggcccccaggcaatcccggccaccaacagcccagaccacagtgaccacaccttgtctgtcagcagtgactccggccactctacagcctctgccaggacggataagacggaagagcgcctggccccaggaaccaggaggggcctgagtgcccaggagaaggcagagttggaccagctgctcagtggctttggcctggaagatcctggaagctccctcaaggaaatgactgatgctcgaagcaagtacagtgggacccgccacgtggtgccagcccaggttcacgtgaatggagacgctgctctgaaggatcgggagacagacattctggatgacgagatgccccaccacgacctgcacagtgtggacagccttgggaccctgtcctcctcggaagggcctcagtcggcccacctgggtcccttcacctgccacaagagcagccagaactcactcctatctgacggttttggcagcaacgttggtgaagatccgcagggcaccctcgttccggacctgggccttggcatggacggcccctatgagcgggagcggacttttgggagtcgagagcccaagcagccccagcccctgctgagaaagccctcagtgtccgcccagatgcaggcctatgggcagagcagctactccacacagacctgggtgcgccagcagcagatggttgtagctcaccagtatagcttcgccccagatggggaggcccggctggtgagccgctgccctgcagacaatcctggcctcgtccaggcccagcccagagtgccactcacccccacccgagggaccagcagtagggtggctgtccagaggggtgtaggcagtgggccacatccccctgacacacagcagccctctcccagcaaagcgttcaaacccaggtttccaggagaccaggttgtgaatggagccggcccagagctgagcacaggcccctccccaggctcgcccaccctggacatcgaccagtccatcgagcagctcaacaggctgatcctggagctggatcccaccttcgagcccatccctacccacatgaacgccctcggtagccaggccaatggctctgtgtctccagacagcgtgggaggtgggctccgggcaagcagcaggctgcctgacacaggagagggccccagcagggccaccgggcggcaaggctcctctgctgaacagcccctgggcgggagactcaggaagctgagcctggggcagtacgacaacgatgctggggggcagctgcccttctccaaatgtgcatggggaaaggctggtgtggactatgccccaaacctgccgccattcccctcaccagcggacgtcaaagagacgatgacccctggctatccccaggacctcgatattatcgatggcagaattttaagtagcaaggagtccatgtgttcaactccagcatttcctgtgtctccagagacaccgtatgtgaaaacagcgctgcgccatcctccgttcagcccacctgagcccccgctgagcagcccagccagtcagcacaaaggaggacgtgaaccacgaagctgccctgagacgctcactcacgctgtggggatgtcagagagccccatcggacccaaatccacgatgctccgggctgatgcgtcctcgacgccctcctttcagcaggcttttgcttcttcctgcaccatttccagcaacggccctgggcagaggagagagagctcctcttctgcagaacgccagtgggtggagagcagccccaagcccatggtttccctgctggggagcggccggcccaccggaagtcccctcagcgctgagttctccggtaccaggaaggactccccagtgctgtcctgcttcccgccgtcagagctccaggctcctttccacagccatgagctgtccctagcagagccaccggactccctggcgcctcccagcagccaggccttcctgggcttcggcaccgccccagtgggaagtggccttccgcccgaggaggacctgggggccttgctggccaattctcatggagcgtcaccgacccccagcatcccgctgacagcgacaggggctgccgacaatggcttcctgtcccacaactttctcacggtggcgcctggacacagcagccaccacagtccaggcctgcagggccagggtgtgaccctgcccgggcagccacccctccctgagaagaagcgggcctcggagggggatcgttctttgggctcagtctctccctcctccagtggcttctccagcccgcacagcgggagcaccatcagtatccccttcccaaatgtccttcccgacttttccaaggcttcagaagcggcctcacctctgccagatagtccaggtgataaacttgtgatcgtgaaatttgttcaagacacttccaagttctggtacaaggcggatatttcaagagaacaagccatcgccatgttgaaggacaaggagccgggctcattcattgttcgagacagccattccttccgaggggcctatggcctggccatgaaggtggccacgcccccaccttcagtcctgcagctgaacaagaaagctggagatttggccaatgaactcgtccggcactttttgatcgagtgtaccccgaagggagtgcggttgaaagggtgctcgaatgaaccatatttcgggagcctgacggccttggtgtgccagcattccatcacgcccttggccttgccgtgcaagctgcttatcccagagagagatccattggaggaaatagcagaaagttctccccagacggcagccaattcagcagctgagctgttgaagcagggggcagcctgcaacgtgtggtacttgaactctgtggagatggagtccctcaccggccaccaggcgatccagaaggccctgagcatcaccctggtccaggagcctccacctgtgtccacagttgtgcacttcaaggtgtcagcccagggcatcaccctgacagacaatcagaggaagctcttcttccggaggcattaccccgtgaacagtgtgattttctgtgccttggacccacaagacaggaagtggatcaaagatggcccttcctcaaaagtctttggatttgtggcccggaagcagggcagtgccacggataatgtgtgccacctgtttgcagagcatgaccctgagcagcctgccagtgccattgtcaacttcgtatcaaaggtcatgattggttccccaaagaaggtctgagaactcccctccctccctggacccaccgatgcctctcgaagccctggagacagccgttgggtgagggtggggcccccactttttaccaaactagtaaacctgacattccaggcccatgaggggaaagaggatcttccagctctgcaaaaacaagaacaaacaacatcaccgtgaattggcctttcctgaaagtgacttatctgacacatctctgtagccacatgctttttgggtagaagaagctgggcatgggtgcaccccaccccctagggtccccatgggaaagggacatgcaaggaaacagcacagaacacgaggtggtccccatgtccctggcacactagcattctgggggatgaggaatccccagcccttgaggcagaggtgccgagtgactgccatgcttcgcccgtccgcatgggcgcttctgtccagctgcacccgaggccgggggtttccctcacctcggtcttcccaagatggagatgctaacgaaactgagaagggggcgtatgtttgacgaaggtttgtgcaagtcaggcccttctggaacacagcagggcctacaacgaggggcctttgcgatgggctgtgaggatgggggtggtgggaagaattggccacgttagagaccccatgccaccccaccatggtgagtgctctgtgcctcctgctcacctgtggtgagctgggcgagctgggcgagctgggcgagctgggctggggagagcctgtgaggaccgagaggagaaatgagaagaaggaacaaaaatattatttctatgtaatttatattttacttatgccaaattatttatgataatttgccattgctatactgtaccagtgtcaaatgctgcagcctgccaagctgtgattttgtgaggcttgtccctatgtaggatgcaccgcaggcccctggccactgaaagagtgtgcagtggactgtgggtctcccatatgcggtgccgcccaaaggtggctttgcctcaagcaacctaccctgatgttttactcattggaatgtttttccccgattgtggatgacttcttttctgatggagagagtccaggagggatggaaaactcctggatttaagctcagcatcccccacatgggcttttcgatcatcttcaggcctgaagctgcacgacctgaagttcgcctgcatttatcagccctctttgtgctgctccttgccaccttggggttcctgctggggaccatgtgtggttgtggcatgtgtgagcagaagggaggatgaggaaaaagagaagaaaccccggtactgacaagctgtttttgagtgccactgtttgccatcatctaagccactgaatcaagtgtatttcaggcttatttcaacattccaatgccctggttttcctgcttgaatctgttcgtggtcaaaggtttgggggaatttgtgaccctggaacatccccagagtgaaagatggagctgggccacatcagaataaggccttggccccatcctctcacagcctaggtgctctgcaggcatgctgactgtcctgattgcgatccagcccgaaattccctcctctgctttcaaaagtcaaatcccccattcttaggccacactggtgtcacaagctcctgtcagggagctggggtttgggaatgtgctttgtgaactctgctttaaagtgaggggccgaggaaaacttagaaacaggcagagttggaagcagccaaatcacagtgggtgttgtgtgtgtgtgcgtgtgtgcatgcgtgcgtgtatgcgtgtgtgaaagcaggtggaccattccactttttagctcctattgatgcaccaaaccaagtgcctcatttctgtgccaaatgtttgccttggtcgttgtggacctccttctctaacttgcggtggcatgactgtcaggaggtgctggcattttcagcagatcctcatgtgttgaccctgatgtctttagcagaggcctctagcatctcggtttttcatccactgcaggaatgtggccacagggagcagaggtttgtactttccccaagaggtcctcatcctgagacggtctctacccatgtttaacccaaagagtgcaggccaggttccttatccttctgatgaaggatgagagagctcatttagaagtcagagcaaactagggtctcagtattgagaaacgcagcctgccagggaatcacagagacatcggggtgcccgcgatggccctcatgaagccatgcctcgacggcattcaggaagccctgcaaacgtgctttttgaactcattggccaggtgtgatttttacacaaggtaaacgtggtcaagggcatcggggaatttgctccaagcagatagctccctctgaggaaccaaaggaagcaagtttccacgatttctgaagagctggtataggaagtttctttcttccttttgtgttacatgtgcattaaacagaacaagctgtgtgtcatcacagattgtactgtgggctcagaaaccgtgagagagcccccaccgtggacaccggctctagggccacaggaaaaggaacgtttccaggcattttgtctccagggctcccgctggacaggcacgtactgccctggggagtaaatgcggagagttcacgaactgtgcccaacgcatgttatagccagggtcctactaactactcagtaaaagaacgtattgttgtattcctccagtgttaagctatagccatgttaaaagtcactgtgcatttattctcagcatcaaataccttgtaacgtcttctctgccttgttagtgcatatttttacttttctgatactgtaaagaatatatccagtatgtaaatgaatgttctataaatcttttgtatagtcattttctctgctccttaaatatcatctctattcagagtataataaaattatgaacttggtaagcctccgtgagacggta

SEQ ID NO: 309634 - DNA, 515 bp, Homo sapiens
gccccccagagcagcgcaatgcctgcctggctcccttagcccctgccctgtgccactcttctgagctcctcacgcgccatctcttaattctcaccatgaccctgcccggaaggcactattgttacctgcagttttcagatgtggaaactgaggcccagagagattaaaggccaaggtcctgtggctaggagctctcggtcttcagagactatggtggagtcaaagtctcctctccccgtctcttgtgcggaatggaataaccaggtggtgattccctgcggtgtgcaagtccgactggaacagaaagccagacagaggaagtgaccagagcaacaagaccaaccaacacaaggacaggacagatgtgactgtcaggaagtcttgcaggtcacgtgctgccatccctgcctctgccccagtgaccgtgatggagtctcatgaagctatttgattctttcagaaagaatgctgaccaaatggatgatgaggagcttcagataaatgaaatcacttta

SEQ ID NO: 309635 - DNA, 6275 bp, Homo sapiens
tctccggttttctcccccgcagtgctacacacgcagggccctgtcgatggcagcctttacgcgaaggtgaggaagaaaagctcctcggatcctggcatcccaggtggcccccaggcaatcccggccaccaacagcccagaccacagtgaccacaccttgtctgtcagcagtgactccggccactctacagcctctgccaggacggataagacggaagagcgcctggccccaggaaccaggaggggcctgagtgcccaggagaaggcagagttggaccagctgctcagtggctttggcctggaagatcctggaagctccctcaaggaaatgactgatgctcgaagcaagtacagtgggacccgccacgtggtgccagcccaggttcacgtgaatggagacgctgctctgaaggatcgggagacagacattctggatgacgagatgccccaccacgacctgcacagtgtggacagccttgggaccctgtcctcctcggaagggcctcagtcggcccacctgggtcccttcacctgccacaagagcagccagaactcactcctatctgacggttttggcagcaacgttggtgaagatccgcagggcaccctcgttccggacctgggccttggcatggacggcccctatgagcgggagcggacttttgggagtcgagagcccaagcagccccagcccctgctgagaaagccctcagtgtccgcccagatgcaggcctatgggcagagcagctactccacacagacctgggtgcgccagcagcagatggttgtagctcaccagtatagcttcgccccagatggggaggcccggctggtgagccgctgccctgcagacaatcctggcctcgtccaggcccagcccagagtgccactcacccccacccgagggaccagcagtagggtggctgtccagaggggtgtaggcagtgggccacatccccctgacacacagcagccctctcccagcaaagcgttcaaacccaggtttccaggagaccaggttgtgaatggagccggcccagagctgagcacaggcccctccccaggctcgcccaccctggacatcgaccagtccatcgagcagctcaacaggctgatcctggagctggatcccaccttcgagcccatccctacccacatgaacgccctcggtagccaggccaatggctctgtgtctccagacagcgtgggaggtgggctccgggcaagcagcaggctgcctgacacaggagagggccccagcagggccaccgggcggcaaggctcctctgctgaacagcccctgggcgggagactcaggaagctgagcctggggcagtacgacaacgatgctggggggcagctgcccttctccaaatgtgcatggggaaaggctggtgtggactatgccccaaacctgccgccattcccctcaccagcggacgtcaaagagacgatgacccctggctatccccaggacctcgatattatcgatggcagaattttaagtagcaaggagtccatgtgttcaactccagcatttcctgtgtctccagagacaccgtatgtgaaaacagcgctgcgccatcctccgttcagcccacctgagcccccgctgagcagcccagccagtcagcacaaaggaggacgtgaaccacgaagctgccctgagacgctcactcacgctgtggggatgtcagagagccccatcggacccaaatccacgatgctccgggctgatgcgtcctcgacgccctcctttcagcaggcttttgcttcttcctgcaccatttccagcaacggccctgggcagaggagagagagctcctcttctgcagaacgccagtgggtggagagcagccccaagcccatggtttccctgctggggagcggccggcccaccggaagtcccctcagcgctgagttctccggtaccaggaaggactccccagtgctgtcctgcttcccgccgtcagagctccaggctcctttccacagccatgagctgtccctagcagagccaccggactccctggcgcctcccagcagccaggccttcctgggcttcggcaccgccccagtgggaagtggccttccgcccgaggaggacctgggggccttgctggccaattctcatggagcgtcaccgacccccagcatcccgctgacagcgacaggggctgccgacaatggcttcctgtcccacaactttctcacggtggcgcctggacacagcagccaccacagtccaggcctgcagggccagggtgtgaccctgcccgggcagccacccctccctgagaagaagcgggcctcggagggggatcgttctttgggctcagtctctccctcctccagtggcttctccagcccgcacagcgggagcaccatcagtatccccttcccaaatgtccttcccgacttttccaaggcttcagaagcggcctcacctctgccagatagtccaggtgataaacttgtgatcgtgaaatttgttcaagacacttccaagttctggtacaaggcggatatttcaagagaacaagccatcgccatgttgaaggacaaggagccgggctcattcattgttcgagacagccattccttccgaggggcctatggcctggccatgaaggtggccacgcccccaccttcagtcctgcagctgaacaagaaagctggagatttggccaatgaactcgtccggcactttttgatcgagtgtaccccgaagggagtgcggttgaaagggtgctcgaatgaaccatatttcgggagcctgacggccttggtgtgccagcattccatcacgcccttggccttgccgtgcaagctgcttatcccagagagagatccattggaggaaatagcagaaagttctccccagacggcagccaattcagcagctgagctgttgaagcagggggcagcctgcaacgtgtggtacttgaactctgtggagatggagtccctcaccggccaccaggcgatccagaaggccctgagcatcaccctggtccaggagcctccacctgtgtccacagttgtgcacttcaaggtgtcagcccagggcatcaccctgacagacaatcagaggaagctcttcttccggaggcattaccccgtgaacagtgtgattttctgtgccttggacccacaagacaggaagtggatcaaagatggcccttcctcaaaagtctttggatttgtggcccggaagcagggcagtgccacggataatgtgtgccacctgtttgcagagcatgaccctgagcagcctgccagtgccattgtcaacttcgtatcaaaggtcatgattggttccccaaagaaggtctgagaactcccctccctccctggacccaccgatgcctctcgaagccctggagacagccgttgggtgagggtggggcccccactttttaccaaactagtaaacctgacattccaggcccatgaggggaaagaggatcttccagctctgcaaaaacaagaacaaacaacatcaccgtgaattggcctttcctgaaagtgacttatctgacacatctctgtagccacatgctttttgggtagaagaagctgggcatgggtgcaccccaccccctagggtccccatgggaaagggacatgcaaggaaacagcacagaacacgaggtggtccccatgtccctggcacactagcattctgggggatgaggaatccccagcccttgaggcagaggtgccgagtgactgccatgcttcgcccgtccgcatgggcgcttctgtccagctgcacccgaggccgggggtttccctcacctcggtcttcccaagatggagatgctaacgaaactgagaagggggcgtatgtttgacgaaggtttgtgcaagtcaggcccttctggaacacagcagggcctacaacgaggggcctttgcgatgggctgtgaggatgggggtggtgggaagaattggccacgttagagaccccatgccaccccaccatggtgagtgctctgtgcctcctgctcacctgtggtgagctgggcgagctgggcgagctgggcgagctgggctggggagagcctgtgaggaccgagaggagaaatgagaagaaggaacaaaaatattatttctatgtaatttatattttacttatgccaaattatttatgataatttgccattgctatactgtaccagtgtcaaatgctgcagcctgccaagctgtgattttgtgaggcttgtccctatgtaggatgcaccgcaggcccctggccactgaaagagtgtgcagtggactgtgggtctcccatatgcggtgccgcccaaaggtggctttgcctcaagcaacctaccctgatgttttactcattggaatgtttttccccgattgtggatgacttcttttctgatggagagagtccaggagggatggaaaactcctggatttaagctcagcatcccccacatgggcttttcgatcatcttcaggcctgaagctgcacgacctgaagttcgcctgcatttatcagccctctttgtgctgctccttgccaccttggggttcctgctggggaccatgtgtggttgtggcatgtgtgagcagaagggaggatgaggaaaaagagaagaaaccccggtactgacaagctgtttttgagtgccactgtttgccatcatctaagccactgaatcaagtgtatttcaggcttatttcaacattccaatgccctggttttcctgcttgaatctgttcgtggtcaaaggtttgggggaatttgtgaccctggaacatccccagagtgaaagatggagctgggccacatcagaataaggccttggccccatcctctcacagcctaggtgctctgcaggcatgctgactgtcctgattgcgatccagcccgaaattccctcctctgctttcaaaagtcaaatcccccattcttaggccacactggtgtcacaagctcctgtcagggagctggggtttgggaatgtgctttgtgaactctgctttaaagtgaggggccgaggaaaacttagaaacaggcagagttggaagcagccaaatcacagtgggtgttgtgtgtgtgtgcgtgtgtgcatgcgtgcgtgtatgcgtgtgtgaaagcaggtggaccattccactttttagctcctattgatgcaccaaaccaagtgcctcatttctgtgccaaatgtttgccttggtcgttgtggacctccttctctaacttgcggtggcatgactgtcaggaggtgctggcattttcagcagatcctcatgtgttgaccctgatgtctttagcagaggcctctagcatctcggtttttcatccactgcaggaatgtggccacagggagcagaggtttgtactttccccaagaggtcctcatcctgagacggtctctacccatgtttaacccaaagagtgcaggccaggttccttatccttctgatgaaggatgagagagctcatttagaagtcagagcaaactagggtctcagtattgagaaacgcagcctgccagggaatcacagagacatcggggtgcccgcgatggccctcatgaagccatgcctcgacggcattcaggaagccctgcaaacgtgctttttgaactcattggccaggtgtgatttttacacaaggtaaacgtggtcaagggcatcggggaatttgctccaagcagatagctccctctgaggaaccaaaggaagcaagtttccacgatttctgaagagctggtataggaagtttctttcttccttttgtgttacatgtgcattaaacagaacaagctgtgtgtcatcacagattgtactgtgggctcagaaaccgtgagagagcccccaccgtggacaccggctctagggccacaggaaaaggaacgtttccaggcattttgtctccagggctcccgctggacaggcacgtactgccctggggagtaaatgcggagagttcacgaactgtgcccaacgcatgttatagccagggtcctactaactactcagtaaaagaacgtattgttgtattcctccagtgttaagctatagccatgttaaaagtcactgtgcatttattctcagcatcaaataccttgtaacgtcttctctgccttgttagtgcatatttttacttttctgatactgtaaagaatatatccagtatgtaaatgaatgttctataaatcttttgtatagtcattttctctgctccttaaatatcatctctattcagagtataataaaattatgaacttggtaagcctccgtgagacggta

SEQ ID NO: 309636 - DNA, 3913 bp, Homo sapiens
ggagccaggacacaggtgaggccgggccacttttggctttttccagcctgttctctgagctcactgcaagccattccttctcttggcaaccaggatttgaggacacatgcttccctcatggttgtttctcaagggcctctgggctccttacctataacagtagttgggtttcatattaatgtgactgttgtccatacccaccctgagaccagagaaggtgccttgggctccacctgggacacgagggtttaatactgctgcagggcgaatagaaagctccctctggctggtgggaaggcaaagccacaccaggcgggtctgctttgctctagtaactcgcttattctctgccttgacatgggagtaagtgcatccttggagcactcactgttcatgttttcagaattaggggcaaaggccatctgccttacatgcacccagcataggccacatgcgcaagttgttcataaacccagtctgcacatcagcaactgcctgtgtgttaacaggacacacctgtcccaatagttgcaactaacatgtgtctcccttggtgtcttccagcctgcaacgtgtggtacttgaactctgtggagatggagtccctcaccggccaccaggcgatccagaaggccctgagcatcaccctggtccaggagcctccacctgtgtccacagttgtgcacttcaaggtgtcagcccagggcatcaccctgacagacaatcagaggaagctcttcttccggaggcattaccccgtgaacagtgtgattttctgtgccttggacccacaagacaggaagtggatcaaagatggcccttcctcaaaagtctttggatttgtggcccggaagcagggcagtgccacggataatgtgtgccacctgtttgcagagcatgaccctgagcagcctgccagtgccattgtcaacttcgtatcaaaggtcatgattggttccccaaagaaggtctgagaactcccctccctccctggacccaccgatgcctctcgaagccctggagacagccgttgggtgagggtggggcccccactttttaccaaactagtaaacctgacattccaggcccatgaggggaaagaggatcttccagctctgcaaaaacaagaacaaacaacatcaccgtgaattggcctttcctgaaagtgacttatctgacacatctctgtagccacatgctttttgggtagaagaagctgggcatgggtgcaccccaccccctagggtccccatgggaaagggacatgcaaggaaacagcacagaacacgaggtggtccccatgtccctggcacactagcattctgggggatgaggaatccccagcccttgaggcagaggtgccgagtgactgccatgcttcgcccgtccgcatgggcgcttctgtccagctgcacccgaggccgggggtttccctcacctcggtcttcccaagatggagatgctaacgaaactgagaagggggcgtatgtttgacgaaggtttgtgcaagtcaggcccttctggaacacagcagggcctacaacgaggggcctttgcgatgggctgtgaggatgggggtggtgggaagaattggccacgttagagaccccatgccaccccaccatggtgagtgctctgtgcctcctgctcacctgtggtgagctgggcgagctgggcgagctgggcgagctgggctggggagagcctgtgaggaccgagaggagaaatgagaagaaggaacaaaaatattatttctatgtaatttatattttacttatgccaaattatttatgataatttgccattgctatactgtaccagtgtcaaatgctgcagcctgccaagctgtgattttgtgaggcttgtccctatgtaggatgcaccgcaggcccctggccactgaaagagtgtgcagtggactgtgggtctcccatatgcggtgccgcccaaaggtggctttgcctcaagcaacctaccctgatgttttactcattggaatgtttttccccgattgtggatgacttcttttctgatggagagagtccaggagggatggaaaactcctggatttaagctcagcatcccccacatgggcttttcgatcatcttcaggcctgaagctgcacgacctgaagttcgcctgcatttatcagccctctttgtgctgctccttgccaccttggggttcctgctggggaccatgtgtggttgtggcatgtgtgagcagaagggaggatgaggaaaaagagaagaaaccccggtactgacaagctgtttttgagtgccactgtttgccatcatctaagccactgaatcaagtgtatttcaggcttatttcaacattccaatgccctggttttcctgcttgaatctgttcgtggtcaaaggtttgggggaatttgtgaccctggaacatccccagagtgaaagatggagctgggccacatcagaataaggccttggccccatcctctcacagcctaggtgctctgcaggcatgctgactgtcctgattgcgatccagcccgaaattccctcctctgctttcaaaagtcaaatcccccattcttaggccacactggtgtcacaagctcctgtcagggagctggggtttgggaatgtgctttgtgaactctgctttaaagtgaggggccgaggaaaacttagaaacaggcagagttggaagcagccaaatcacagtgggtgttgtgtgtgtgtgcgtgtgtgcatgcgtgcgtgtatgcgtgtgtgaaagcaggtggaccattccactttttagctcctattgatgcaccaaaccaagtgcctcatttctgtgccaaatgtttgccttggtcgttgtggacctccttctctaacttgcggtggcatgactgtcaggaggtgctggcattttcagcagatcctcatgtgttgaccctgatgtctttagcagaggcctctagcatctcggtttttcatccactgcaggaatgtggccacagggagcagaggtttgtactttccccaagaggtcctcatcctgagacggtctctacccatgtttaacccaaagagtgcaggccaggttccttatccttctgatgaaggatgagagagctcatttagaagtcagagcaaactagggtctcagtattgagaaacgcagcctgccagggaatcacagagacatcggggtgcccgcgatggccctcatgaagccatgcctcgacggcattcaggaagccctgcaaacgtgctttttgaactcattggccaggtgtgatttttacacaaggtaaacgtggtcaagggcatcggggaatttgctccaagcagatagctccctctgaggaaccaaaggaagcaagtttccacgatttctgaagagctggtataggaagtttctttcttccttttgtgttacatgtgcattaaacagaacaagctgtgtgtcatcacagattgtactgtgggctcagaaaccgtgagagagcccccaccgtggacaccggctctagggccacaggaaaaggaacgtttccaggcattttgtctccagggctcccgctggacaggcacgtactgccctggggagtaaatgcggagagttcacgaactgtgcccaacgcatgttatagccagggtcctactaactactcagtaaaagaacgtattgttgtattcctccagtgttaagctatagccatgttaaaagtcactgtgcatttattctcagcatcaaataccttgtaacgtcttctctgccttgttagtgcatatttttacttttctgatactgtaaagaatatatccagtatgtaaatgaatgttctataaatcttttgtatagtcattttctctgctccttaaatatcatctctattcagagtataataaaattatgaacttggtaagcctccgtgagacggta
